United States Patent Application Publication US 2007/0214517 A1 - sequence listing, part 81

SEQ ID NO: 104597 - DNA, 1233 bp, Arabidopsis thaliana
  misc_feature (1)..(1233): Ceres Seq. ID no. 13615354
  misc_feature: MA Experiment ID: 108434 Result: Up-regulated in Transcription
  misc_feature: MA Experiment 108434 PARAMETER Experiment Name: At_Root_Tips_cDNA_P Parameter: Tissue Value: Root Tips
  misc_feature: MA Experiment ID: 108461 Result: Up-regulated in Transcription
  misc_feature: MA Experiment 108461 PARAMETER Experiment Name: At_Germinating_Seeds_cDNA_P Parameter: Age (day) Value: 1 vs. 0
  misc_feature: MA Experiment 108461 PARAMETER Experiment Name: At_Germinating_Seeds_cDNA_P Parameter: Tissue Value: Germinating Seeds
  misc_feature: MA Experiment ID: 108462 Result: Up-regulated in Transcription
  misc_feature: MA Experiment 108462 PARAMETER Experiment Name: At_Germinating_Seeds_cDNA_P Parameter: Age (day) Value: 2 vs. 0
  misc_feature: MA Experiment 108462 PARAMETER Experiment Name: At_Germinating_Seeds_cDNA_P Parameter: Tissue Value: Germinating Seeds
  misc_feature: MA Experiment ID: 108595 Result: Down-regulated in Transcription
  misc_feature: MA Experiment 108595 PARAMETER Experiment Name: At_Ler-pi_Ovule_cDNA_P Parameter: Plant Line Value: null
  misc_feature: MA Experiment ID: 20000180 Result: Up-regulated in Transcription
  misc_feature: MA Experiment 20000180 PARAMETER Experiment Name: At_Germinating_Seeds_P Parameter: Age (hr) Value: 24 vs. 0
  misc_feature: MA Experiment 20000180 PARAMETER Experiment Name: At_Germinating_Seeds_P Parameter: Tissue Value: Germinating Seeds
  misc_feature: MA Experiment ID: 20000184 Result: Up-regulated in Transcription
  misc_feature: MA Experiment 20000184 PARAMETER Experiment Name: At_Shoots__P Parameter: Age (day) Value: 7
  misc_feature: MA Experiment 20000184 PARAMETER Experiment Name: At_Shoots__P Parameter: Tissue Value: Shoots vs. Whole Plant
  misc_feature: MA Experiment ID: 20000234 Result: Up-regulated in Transcription
  misc_feature: MA Experiment 20000234 PARAMETER Experiment Name: At_Siliques_P Parameter: Age (day) Value: 21
  misc_feature: MA Experiment 20000234 PARAMETER Experiment Name: At_Siliques_P Parameter: Organism Value: A. thaliana
  misc_feature: MA Experiment 20000234 PARAMETER Experiment Name: At_Siliques_P Parameter: Plant Line Value: WS
  misc_feature: MA Experiment 20000234 PARAMETER Experiment Name: At_Siliques_P Parameter: Tissue Value: Less Than 5mm Siliques vs. Whole Plant
  misc_feature: MA Experiment ID: 20000286 Result: Up-regulated in Transcription
  misc_feature: MA Experiment 20000286 PARAMETER Experiment Name: At_Open_Flower_P Parameter: Age (day) Value: 21
  misc_feature: MA Experiment 20000286 PARAMETER Experiment Name: At_Open_Flower_P Parameter: Plant Line Value: WS
  misc_feature: MA Experiment 20000286 PARAMETER Experiment Name: At_Open_Flower_P Parameter: Tissue Value: Half Open vs. Whole Plant
  misc_feature: MA Experiment ID: 20000438 Result: Up-regulated in Transcription
  misc_feature: MA Experiment 20000438 PARAMETER Experiment Name: At_Shoots__P Parameter: Age (day) Value: 14
  misc_feature: MA Experiment 20000438 PARAMETER Experiment Name: At_Shoots__P Parameter: Tissue Value: Shoots vs. Whole Plant
  misc_feature: MA Experiment ID: 20001560 Result: Up-regulated in Transcription
  misc_feature: MA Experiment 20001560 PARAMETER Experiment Name: At_Drought_Soil_Dry_P Parameter: Age (day) Value: 28
  misc_feature: MA Experiment 20001560 PARAMETER Experiment Name: At_Drought_Soil_Dry_P Parameter: Organism Value: A. thaliana
  misc_feature: MA Experiment 20001560 PARAMETER Experiment Name: At_Drought_Soil_Dry_P Parameter: Plant Line Value: WS
  misc_feature: MA Experiment 20001560 PARAMETER Experiment Name: At_Drought_Soil_Dry_P Parameter: Post Timepoint (hr) Value: None
  misc_feature: MA Experiment 20001560 PARAMETER Experiment Name: At_Drought_Soil_Dry_P Parameter: Post-Treatment Value: None
  misc_feature: MA Experiment 20001560 PARAMETER Experiment Name: At_Drought_Soil_Dry_P Parameter: Timepoint (day) Value: 14
  misc_feature: MA Experiment 20001560 PARAMETER Experiment Name: At_Drought_Soil_Dry_P Parameter: Treatment Value: Drought vs. No Drought
  misc_feature: MA Experiment ID: 20001911 Result: Down-regulated in Transcription
  misc_feature: MA Experiment 20001911 PARAMETER Experiment Name: At_Drought_Reproduction_P Parameter: Age (day) Value: 40
  misc_feature: MA Experiment 20001911 PARAMETER Experiment Name: At_Drought_Reproduction_P Parameter: Organism Value: A. thaliana
  misc_feature: MA Experiment 20001911 PARAMETER Experiment Name: At_Drought_Reproduction_P Parameter: Plant Line Value: WS
  misc_feature: MA Experiment 20001911 PARAMETER Experiment Name: At_Drought_Reproduction_P Parameter: Timepoint (day) Value: 10
  misc_feature: MA Experiment 20001911 PARAMETER Experiment Name: At_Drought_Reproduction_P Parameter: Tissue Value: Flowers
  misc_feature: MA Experiment 20001911 PARAMETER Experiment Name: At_Drought_Reproduction_P Parameter: Treatment Value: Drought vs. No Drought
gacatcttctctctctctttctgaagtgaactgttgttgttgtgctctttggtttcatcgagagagaacctaaacccgatctgaaccaataacaataagaagacgaatggcgtcttcgtcgttctcagtcacatctccagctgctgctgcttccgtctatgcagtcactcaaacctcctcgcacttcccaatccaaaaccgctctcgcagagtttctttccgtctctctgctaagcccaagcttcgctttctctccaagcctagtcgcagtagctaccctgtggtgaaagcacaatctaacaaggttagtactggtgcatcatcaaatgctgccaaagttgatgggccatcatcagctgaaggaaaggagaaaaactcattgaaggagtcgtctgcttcttctcctgaattagctacagaagagtctatttctgagttccttacccaagtaacaactcttgtcaagcttgtggattcaagagacattgttgagttgcagttgaaacaactcgactgtgaactagtcattcgaaaaaaagaagccttacctcaacctcaagctcctgcatcttatgttatgatgcagcaaccaaatcaaccatcttatgcccagcaaatggctcctcctgctgcacctgctgctgccgcaccagccccttctacgccagcctctctgcctccaccatccccacctactccagccaaatcgtcacttcctactgttaaaagccccatggctggcacattctaccgtagtcctgcacctggtgaaccaccctttattaaggttggagacaaagtgcagaaggggcaagttctatgcattgttgaagccatgaagttaatgaatgaaatagagtctgaccataccggaaccgtagtcgatattgtcgcagaagacggcaagcctgtcagcctcgacactcctctgtttgtggttcaaccgtagaatcggcaccatgagaaatggagaaaagaagctctactaaattcattctctgtgctttggtaatacaaaatttgctgagacttctaaaaacgtttccccttcgctgtcactgttaaagtctgttaggtttgttagtttggtgaggaagaattgagttttctttagtttctctattcgttaaaaaaaaaaagatgagacatttttttccataagctctgtttttatttctttcctatatacacgaactcttcttgttctgttctatttgcaaattatccaatttc

SEQ ID NO: 104598 - protein, 280 aa, Arabidopsis thaliana; identical to SEQ ID NO: 76139
  peptide (1)..(280): Ceres Seq. ID no. 13615355
  misc_feature (204)..(278): Pfam Name: Biotin-requiring enzyme Pfam Description: Biotin-requiring enzyme
  misc_feature (1)..(280): Homolog of NCBI NO: 1066348 NR Description: acetyl-CoA carboxylase biotin-containing subunit
  misc_feature (1)..(280): Homolog of NCBI NO: 15237339 NR Description: biotin carboxyl carrier protein 1 (BCCP1) thaliana] >gi|17380471|sp|Q42533|BCCP_ARATH Biotin carboxyl
  misc_feature (1)..(280): Homolog of NCBI NO: 1588550 NR Description: Ac-CoA carboxylase
  misc_feature (1)..(275): Homolog of NCBI NO: 1916613 NR Description: acetyl-CoA carboxylase
  misc_feature (84)..(280): Homolog of NCBI NO: 2129784 NR Description: biotin carboxyl carrier protein (clone BP1) - (fragment) >gi|1070000|emb|CAA62261.1| biotin carboxyl carrier
  misc_feature (3)..(280): Homolog of NCBI NO: 29169309 NR Description: biotin carboxylase carrier protein [Lycopersicon

SEQ ID NO: 104599 - DNA, 769 bp, Arabidopsis thaliana
  misc_feature (1)..(769): Ceres Seq. ID no. 13615360
  misc_feature: MA Experiment ID: 20000307 Result: Up-regulated in Transcription
  misc_feature: MA Experiment 20000307 PARAMETER Experiment Name: At_Germinating_Seeds_Sub_P Parameter: Age (hr) Value: 24 vs. 0
  misc_feature: MA Experiment 20000307 PARAMETER Experiment Name: At_Germinating_Seeds_Sub_P Parameter: Organism Value: A. thaliana
  misc_feature: MA Experiment 20000307 PARAMETER Experiment Name: At_Germinating_Seeds_Sub_P Parameter: Plant Line Value: WS
  misc_feature: MA Experiment 20000307 PARAMETER Experiment Name: At_Germinating_Seeds_Sub_P Parameter: Tissue Value: Germinating Seeds
  misc_feature: MA Experiment ID: 20000315 Result: Down-regulated in Transcription
  misc_feature: MA Experiment 20000315 PARAMETER Experiment Name: At_14day_Shoots-Roots_Sub_P Parameter: Age (day) Value: 14
  misc_feature: MA Experiment 20000315 PARAMETER Experiment Name: At_14day_Shoots-Roots_Sub_P Parameter: Organism Value: A. thaliana
  misc_feature: MA Experiment 20000315 PARAMETER Experiment Name: At_14day_Shoots-Roots_Sub_P Parameter: Plant Line Value: WS
  misc_feature: MA Experiment 20000315 PARAMETER Experiment Name: At_14day_Shoots-Roots_Sub_P Parameter: Tissue Value: Shoots vs. Whole Plant
  misc_feature: MA Experiment ID: 20000328 Result: Down-regulated in Transcription
  misc_feature: MA Experiment 20000328 PARAMETER Experiment Name: At_42deg_Heat_Sub_P Parameter: Age (day) Value: 14
  misc_feature: MA Experiment 20000328 PARAMETER Experiment Name: At_42deg_Heat_Sub_P Parameter: Organism Value: A. thaliana
  misc_feature: MA Experiment 20000328 PARAMETER Experiment Name: At_42deg_Heat_Sub_P Parameter: Plant Line Value: WS
  misc_feature: MA Experiment 20000328 PARAMETER Experiment Name: At_42deg_Heat_Sub_P Parameter: Temperature (deg C) Value: 42 vs. 22
  misc_feature: MA Experiment 20000328 PARAMETER Experiment Name: At_42deg_Heat_Sub_P Parameter: Timepoint (hr) Value: 6
  misc_feature: MA Experiment 20000328 PARAMETER Experiment Name: At_42deg_Heat_Sub_P Parameter: Tissue Value: Aerial
  misc_feature: MA Experiment ID: 20000347 Result: Up-regulated in Transcription
  misc_feature: MA Experiment 20000347 PARAMETER Experiment Name: At_2mM_SA_Sub_P Parameter: Age (day) Value: 14
  misc_feature: MA Experiment 20000347 PARAMETER Experiment Name: At_2mM_SA_Sub_P Parameter: Organism Value: A. thaliana
  misc_feature: MA Experiment 20000347 PARAMETER Experiment Name: At_2mM_SA_Sub_P Parameter: Plant Line Value: WS
  misc_feature: MA Experiment 20000347 PARAMETER Experiment Name: At_2mM_SA_Sub_P Parameter: Timepoint (hr) Value: 6
  misc_feature: MA Experiment 20000347 PARAMETER Experiment Name: At_2mM_SA_Sub_P Parameter: Tissue Value: Aerial
  misc_feature: MA Experiment 20000347 PARAMETER Experiment Name: At_2mM_SA_Sub_P Parameter: Treatment Value: 2mM SA vs. No Treatment
aaaaagtaaaaaaatcaatcatttataatttattatggagaagtgagagcaagtgttagcttttgatctttcttatattcttctctgaaatagtaacacactgtgaagagtttttcctacatctgaattttgtctgatccaggaaaaagaagaaaatggcgtttgtgacaactgcggaagtttgtgacgcgaatcaagagctgattcggagtggtcagctacgagctttgcaacccattttccagatttatggccgtcgacaaatattctcaggaccagttgtcactgtcaaagtttttgaagacaatggcttaatccgtcaattcatcgaggagaaaggaaacggtagagttcttgtggtggatggtggagggagtcaacgatgtgcaatactcggaggtaaccccgttgttcaagctcagaacaacggatgggcaggaatcgttgtgaacggatgcatcagagacgtcgatgagatcaacggttgtgatatcggagtgagagctttggcctctcatccgataaaagcgagtaagaaaggacttggagaacaacgagttccggtaaatatcgcagggactcggatttgtgatggtgaatggctttatgcagatactgatgggattcttgtctcccaaattgagttatccgtttaataaaaaaggctttgatcagttaccaaaaaaaaaaaaacagaacgtggtttgtgttcatcttcttgttacttaagagattgttgaattataatggaaaataaatttttgttttg

SEQ ID NO: 104600 - protein, 166 aa, Arabidopsis thaliana; identical to SEQ ID NO: 29350
  peptide (1)..(166): Ceres Seq. ID no. 13615361
  misc_feature (2)..(159): Pfam Name: Demethylmenaquinone methyltransferase Pfam Description: Demethylmenaquinone methyltransferase
  misc_feature (1)..(166): Homolog of NCBI NO: 15237348 NR Description: dimethylmenaquinone methyltransferase family thaliana] >gi|30685861|ref|NP_850830.1| dimethylmenaquinone family [Arabidopsis thaliana] >gi|17368893|sp|Q9FFE0|MEG2_ARATH
  misc_feature (1)..(166): Homolog of NCBI NO: 21537415 NR Description: S-adenosylmethionine:2-demethylmenaquinone
  misc_feature (1)..(166): Homolog of NCBI NO: 15232963 NR Description: dimethylmenaquinone methyltransferase family
  misc_feature (4)..(166): Homolog of NCBI NO: 34910724 NR Description: S-adenosylmethionine:2-demethylmenaquinone
  misc_feature (1)..(166): Homolog of NCBI NO: 15241161 NR Description: dimethylmenaquinone methyltransferase family
  misc_feature (1)..(164): Homolog of NCBI NO: 22982141 NR Description: hypothetical protein [Burkholderia fungorum]
  misc_feature (1)..(164): Homolog of NCBI NO: 22978085 NR Description: hypothetical protein [Ralstonia metallidurans]
  misc_feature (4)..(164): Homolog of NCBI NO: 17546073 NR Description: PROBABLE METHYLTRANSFERASE PROTEIN [Ralstonia solanacearum]
  misc_feature (1)..(160): Homolog of NCBI NO: 34497095 NR Description: S-adenosylmethionine:2-demethylmenaquinone
  misc_feature (1)..(160): Homolog of NCBI NO: 23103535 NR Description: hypothetical protein [Azotobacter vinelandii]

SEQ ID NO: 104601 - DNA, 901 bp, Arabidopsis thaliana
  misc_feature (1)..(901): Ceres Seq. ID no. 13615362
  misc_feature: MA Experiment ID: 108469 Result: Up-regulated in Transcription
  misc_feature: MA Experiment ID: 108579 Result: Down-regulated in Transcription
  misc_feature: MA Experiment 108579 PARAMETER Experiment Name: At_4deg_Cold_cDNA_P Parameter: Temperature (deg C) Value: 4 vs. 22
  misc_feature: MA Experiment 108579 PARAMETER Experiment Name: At_4deg_Cold_cDNA_P Parameter: Timepoint (hr) Value: 6
  misc_feature: MA Experiment 108579 PARAMETER Experiment Name: At_4deg_Cold_cDNA_P Parameter: Tissue Value: Aerial
  misc_feature: MA Experiment ID: 20000227 Result: Down-regulated in Transcription
  misc_feature: MA Experiment 20000227 PARAMETER Experiment Name: At_Root-Tips-vs-Tops_P Parameter: Tissue Value: Root Tips vs. Root Tops
  misc_feature: MA Experiment ID: 20001247 Result: Up-regulated in Transcription
  misc_feature: MA Experiment 20001247 PARAMETER Experiment Name: At_Far-red-induction_P Parameter: Age (day) Value: 7
  misc_feature: MA Experiment 20001247 PARAMETER Experiment Name: At_Far-red-induction_P Parameter: Light Value: Far-red vs. White
  misc_feature: MA Experiment 20001247 PARAMETER Experiment Name: At_Far-red-induction_P Parameter: Organism Value: A. thaliana
  misc_feature: MA Experiment 20001247 PARAMETER Experiment Name: At_Far-red-induction_P Parameter: Plant Line Value: Columbia
  misc_feature: MA Experiment 20001247 PARAMETER Experiment Name: At_Far-red-induction_P Parameter: Timepoint (hr) Value: 1
  misc_feature: MA Experiment 20001247 PARAMETER Experiment Name: At_Far-red-induction_P Parameter: Tissue Value: Whole Plant
  misc_feature: MA Experiment ID: 20001248 Result: Up-regulated in Transcription
  misc_feature: MA Experiment 20001248 PARAMETER Experiment Name: At_Far-red-induction_P Parameter: Age (day) Value: 7
  misc_feature: MA Experiment 20001248 PARAMETER Experiment Name: At_Far-red-induction_P Parameter: Light Value: Far-red vs. White
  misc_feature: MA Experiment 20001248 PARAMETER Experiment Name: At_Far-red-induction_P Parameter: Organism Value: A. thaliana
  misc_feature: MA Experiment 20001248 PARAMETER Experiment Name: At_Far-red-induction_P Parameter: Plant Line Value: Columbia
  misc_feature: MA Experiment 20001248 PARAMETER Experiment Name: At_Far-red-induction_P Parameter: Timepoint (hr) Value: 4
  misc_feature: MA Experiment 20001248 PARAMETER Experiment Name: At_Far-red-induction_P Parameter: Tissue Value: Whole Plant
  misc_feature: MA Experiment ID: 20001451 Result: Up-regulated in Transcription
  misc_feature: MA Experiment 20001451 PARAMETER Experiment Name: At_Far-red-induction_P Parameter: Age (day) Value: 7
  misc_feature: MA Experiment 20001451 PARAMETER Experiment Name: At_Far-red-induction_P Parameter: Light Value: Far-red vs. White
  misc_feature: MA Experiment 20001451 PARAMETER Experiment Name: At_Far-red-induction_P Parameter: Organism Value: A. thaliana
  misc_feature: MA Experiment 20001451 PARAMETER Experiment Name: At_Far-red-induction_P Parameter: Plant Line Value: Columbia
  misc_feature: MA Experiment 20001451 PARAMETER Experiment Name: At_Far-red-induction_P Parameter: Timepoint (hr) Value: 24
  misc_feature: MA Experiment 20001451 PARAMETER Experiment Name: At_Far-red-induction_P Parameter: Tissue Value: Whole Plant
aacgaatctctatctctctctagattttggggattttgctctctctccctctctgtctctctttggtgctcgtagctttctgtctcccaattgagagaaggagggagatagaaacgtcgatgggcttaattgtggatgatgataacgatggagaagttttgattccgccgccgaatttttcaatggtagaagatgaaatttaccgatctgggtttcctgagctggagaatttcggattcttatcaaccctaaatcttcgatccatcatttatctgtgtcctgagccataccctgaggacaatctcaagtctcttgcatccaacaacattaagcttttccagttcgggattgaaggcaaaacggatcctccaactcctatgccaaaggatacagtgttgagtgctcttagagtactagttgatgttcgaaatcatccaattcttatccactgtaagcgcggaaagcataggacaggttgtcttgtgggatgcttgaggaaagtgcagaactggtgcttgtcatcggttctcgaggaataccagaagtgtgcgggtttgaaatggagacaaagagatttaaggttcattgaggatttcgatgtgctcagattgaagcaatgtctatacagcatcatatatcagtacaatgggtatggtctcaagagaagaaagttgctgtatcaagaagagaatgttgttcaagaacagcaaaaacctcaagccaccaaaggataaagaaagagatttgaaatcggatttttttttgtttctttacattttgtcgtgatgatgatgatgatttttttgagaataggatagttctttaaaaagcttgagaaaacagaggatttgatttggtctctctctatcttttttttacggttagagaaatttacagattg

SEQ ID NO: 104602 - protein, 204 aa, Arabidopsis thaliana
  peptide (1)..(204): Ceres Seq. ID no. 13615363
  misc_feature (14)..(172): Pfam Name: Tyrosine phosphatase family Pfam Description: Tyrosine phosphatase family
  misc_feature (1)..(204): Homolog of NCBI NO: 15237359 NR Description: expressed protein [Arabidopsis thaliana] contains similarity to tyrosine phosphatase~gene_id:MQK4.21
  misc_feature (1)..(204): Homolog of NCBI NO: 21553927 NR Description: unknown [Arabidopsis thaliana]
  misc_feature (7)..(203): Homolog of NCBI NO: 15232985 NR Description: expressed protein [Arabidopsis thaliana]
  misc_feature (14)..(161): Homolog of NCBI NO: 15220383 NR Description: unkown protein [Arabidopsis thaliana]
  misc_feature (14)..(165): Homolog of NCBI NO: 15225761 NR Description: expressed protein [Arabidopsis thaliana]
  misc_feature (80)..(165): Homolog of NCBI NO: 30102538 NR Description: At2g32960 [Arabidopsis thaliana]
  misc_feature (14)..(86): Homolog of NCBI NO: 30102538 NR Description: At2g32960 [Arabidopsis thaliana]
  misc_feature (5)..(165): Homolog of NCBI NO: 18412419 NR Description: expressed protein [Arabidopsis thaliana] AT4g03960/T24M8_4 [Arabidopsis thaliana] AT4g03960/T24M8_4 [Arabidopsis thaliana]
  misc_feature (14)..(166): Homolog of NCBI NO: 6324296 NR Description: Synthetic interaction with Whi2; Siw14p cerevisiae] >gi|1730719|sp|P53965|YND2_YEAST HYPOTHETICAL 32.8 KD
  misc_feature (5)..(165): Homolog of NCBI NO: 7487406 NR Description: hypothetical protein T24M8.4 - Arabidopsis
MGLIVDDDNDGEVLIPPPNFSMVEDEIYRSGFPELENFGFLSTLNLRSIIYLCPEPYPEDNLKSLASNNIKLFQFGIEGKTDPPTPMPKDTVLSALRVLVDVRNHPILIHCKRGKHRTGCLVGCLRKVQNWCLSSVLEEYQKCAGLKWRQRDLRFIEDFDVLRLKQCLYSIIYQYNGYGLKRRKLLYQEENVVQEQQKPQATKG

SEQ ID NO: 104603 - protein, 183 aa, Arabidopsis thaliana
  peptide (1)..(183): Ceres Seq. ID no. 13615364
  misc_feature (1)..(151): Pfam Name: Tyrosine phosphatase family Pfam Description: Tyrosine phosphatase family
  misc_feature (1)..(183): Homolog of NCBI NO: 15237359 NR Description: expressed protein [Arabidopsis thaliana] contains similarity to tyrosine phosphatase~gene_id:MQK4.21
  misc_feature (1)..(183): Homolog of NCBI NO: 21553927 NR Description: unknown [Arabidopsis thaliana]
  misc_feature (1)..(182): Homolog of NCBI NO: 15232985 NR Description: expressed protein [Arabidopsis thaliana]
  misc_feature (1)..(140): Homolog of NCBI NO: 15220383 NR Description: unkown protein [Arabidopsis thaliana]
  misc_feature (1)..(144): Homolog of NCBI NO: 15225761 NR Description: expressed protein [Arabidopsis thaliana]
  misc_feature (59)..(144): Homolog of NCBI NO: 30102538 NR Description: At2g32960 [Arabidopsis thaliana]
  misc_feature (1)..(65): Homolog of NCBI NO: 30102538 NR Description: At2g32960 [Arabidopsis thaliana]
  misc_feature (1)..(144): Homolog of NCBI NO: 18412419 NR Description: expressed protein [Arabidopsis thaliana] AT4g03960/T24M8_4 [Arabidopsis thaliana] AT4g03960/T24M8_4 [Arabidopsis thaliana]
  misc_feature (1)..(145): Homolog of NCBI NO: 6324296 NR Description: Synthetic interaction with Whi2; Siw14p cerevisiae] >gi|1730719|sp|P53965|YND2_YEAST HYPOTHETICAL 32.8 KD
  misc_feature (1)..(144): Homolog of NCBI NO: 7487406 NR Description: hypothetical protein T24M8.4 - Arabidopsis
MVEDEIYRSGFPELENFGFLSTLNLRSIIYLCPEPYPEDNLKSLASNNIKLFQFGIEGKTDPPTPMPKDTVLSALRVLVDVRNHPILIHCKRGKHRTGCLVGCLRKVQNWCLSSVLEEYQKCAGLKWRQRDLRFIEDFDVLRLKQCLYSIIYQYNGYGLKRRKLLYQEENVVQEQQKPQATKG

SEQ ID NO: 104604 - protein, 118 aa, Arabidopsis thaliana; identical to SEQ ID NO: 30545
  peptide (1)..(118): Ceres Seq. ID no. 13615365
  misc_feature (1)..(86): Pfam Name: Tyrosine phosphatase family Pfam Description: Tyrosine phosphatase family
  misc_feature (1)..(118): Homolog of NCBI NO: 15237359 NR Description: expressed protein [Arabidopsis thaliana] contains similarity to tyrosine phosphatase~gene_id:MQK4.21
  misc_feature (1)..(118): Homolog of NCBI NO: 21553927 NR Description: unknown [Arabidopsis thaliana]
  misc_feature (1)..(117): Homolog of NCBI NO: 15232985 NR Description: expressed protein [Arabidopsis thaliana]
  misc_feature (1)..(75): Homolog of NCBI NO: 15220383 NR Description: unkown protein [Arabidopsis thaliana]
  misc_feature (1)..(79): Homolog of NCBI NO: 15225761 NR Description: expressed protein [Arabidopsis thaliana]
  misc_feature (1)..(79): Homolog of NCBI NO: 30102538 NR Description: At2g32960 [Arabidopsis thaliana]
  misc_feature (1)..(79): Homolog of NCBI NO: 18412419 NR Description: expressed protein [Arabidopsis thaliana] AT4g03960/T24M8_4 [Arabidopsis thaliana] AT4g03960/T24M8_4 [Arabidopsis thaliana]
  misc_feature (1)..(80): Homolog of NCBI NO: 6324296 NR Description: Synthetic interaction with Whi2; Siw14p cerevisiae] >gi|1730719|sp|P53965|YND2_YEAST HYPOTHETICAL 32.8 KD
  misc_feature (1)..(79): Homolog of NCBI NO: 7487406 NR Description: hypothetical protein T24M8.4 - Arabidopsis
  misc_feature (1)..(71): Homolog of NCBI NO: 15027525 NR Description: conserved hypothetical protein [Leishmania major]

SEQ ID NO: 104605 - DNA, 2159 bp, Arabidopsis thaliana
  misc_feature (1)..(2159): Ceres Seq. ID no. 13615366
  misc_feature: MA Experiment ID: 108463 Result: Down-regulated in Transcription
  misc_feature: MA Experiment 108463 PARAMETER Experiment Name: At_Germinating_Seeds_cDNA_P Parameter: Age (day) Value: 3 vs. 0
  misc_feature: MA Experiment 108463 PARAMETER Experiment Name: At_Germinating_Seeds_cDNA_P Parameter: Tissue Value: Germinating Seeds
  misc_feature: MA Experiment ID: 108573 Result: Up-regulated in Transcription
  misc_feature: MA Experiment 108573 PARAMETER Experiment Name: At_Drought_cDNA_P Parameter: Timepoint (hr) Value: 6
  misc_feature: MA Experiment 108573 PARAMETER Experiment Name: At_Drought_cDNA_P Parameter: Tissue Value: Aerial
  misc_feature: MA Experiment 108573 PARAMETER Experiment Name: At_Drought_cDNA_P Parameter: Treatment Value: Drought vs. No Drought
  misc_feature: MA Experiment ID: 20000173 Result: Down-regulated in Transcription
  misc_feature: MA Experiment 20000173 PARAMETER Experiment Name: At_42deg_Heat_P Parameter: Age (day) Value: 14
  misc_feature: MA Experiment 20000173 PARAMETER Experiment Name: At_42deg_Heat_P Parameter: Organism Value: A. thaliana
  misc_feature: MA Experiment 20000173 PARAMETER Experiment Name: At_42deg_Heat_P Parameter: Plant Line Value: WS
  misc_feature: MA Experiment 20000173 PARAMETER Experiment Name: At_42deg_Heat_P Parameter: Temperature (deg C) Value: 42 vs. 22
  misc_feature: MA Experiment 20000173 PARAMETER Experiment Name: At_42deg_Heat_P Parameter: Timepoint (hr) Value: 6
  misc_feature: MA Experiment 20000173 PARAMETER Experiment Name: At_42deg_Heat_P Parameter: Tissue Value: Aerial
gacttcttcgtcttcgtttcttcatttcgaagctctctctgtgtgtgatggcgtgccctagaaactccataacatacaacgccacgcgctgcgcgtgcggtatcggtcagctactaaaccggagctccgggagctgcgagatcttcggttggccgtcaacaatctccacagacaaagatgtaaactacagcgtaatatcattcgccgagactttattcgctttcgataggatccgtaagttcacgcaatctcaagctattttcttagaagctacgctcgtgatgcttctctcctggttagtcttttgtttcttcctgagattcaccaaactcggcgatggtcgtaatgtctggtttaatctccgttggtggattactcgacttgacgtcttcttctccactagacattggctcgttagtgctttctctactctcattgcttttgtctccatgaattggtttcttttgagtaaaccaattaggttcctgaatcttgtaggatgatcaacaaattgtcaagaaacgtaaaacagaacttggtggaacattttctgttgcgagctggattgttttcattggtttattcgctgcgtgagtttgataacttcagaatttagtgcttcctttggtttttgttaacttagtcagtttcttcacaggctgctttatcaaatcataaccaagagaacaattgaagttcacaatgtgagagctactggttctccagatttgatctcattcgagaacgatttggagtttaacatcaccgctgtttcggatatgagttgctctaatttacgcggtattgggaacgtggtcatgggtaatcccgggtttagcgagttcaaagttgctgctctttctagtttaggaagctatacttgtaagaatacaacttcaggaccaacagtgaatttcaaatgtaccaaatgtcgtctcaccaacgattacatatatatctcgtggcatttcgttgatcttcctgattcgcctgctgctgctgttggatttcagtttaactttacgtctaagaatggacctaacgagaagcatatgagttttgttagtggcactctgagaaacggaagcattctcgatgaaagtccggttactttccgtggaaccgaagggaatatattgaagtttaatctgtttcctcggatttaccatcatttgcatgatctaaagctaatccaacctctctttcacgagtttatccctggctctgtttaccgagacactactcagcttcaggcatctatgggaaggtcaacagatggcatactcaatacgacattgttcatcaactatctctctgcttatattgttgagatagaccatgaaaatatactcggtcctgttagcttccttgccgatcttggtggtttgtattgcatcagtattggcatatttttctacctactagtgcagtgtgagtacaggatcaagaagctgcgaaatgaagatactgttttcaggaagataaggaatcgtcgtaaagctctagatcactgggataaactgagaagatatgttgcatacacatgggattgcagcatattggtcgatgatgccatcaaaacgacaaaggtatcaggaatgtgtggtttaacgagacctccaacatcttctaatagctcggaacacggggaatcgatcatggcgaacaagaagcctaacttaggtattgagaagaatgtgatttcacaacctgcaagtttagaactgagctcttttgattcggcttcttctctggctcatggagataatttctcaaataaaaagagtataactcatccaatttctcatagtgaagacgtttcaatccctccacctcctccaatggagttcattgatggatcttctggttcagaagtggacgcaatggatatcaagaataaatttcaacttctttacgactacaatgtattgcttagggaaaaacttttagagactcagtctttgcttaatactttggcacccaaaccaatagcatcatcatcttcaaccgtggaacgcagtgcctagaacaacgaggttgtttgacatgtattgtttgtatactccctgtaacttccacatttattgaacaaaggaatgactaatgcttgttgtatctttgtgaatatacctagttgctaatagtaacaaattttcgct

SEQ ID NO: 104606 - protein, 415 aa, Arabidopsis thaliana
  peptide (1)..(415): Ceres Seq. ID no. 13615367
  misc_feature (1)..(415): Homolog of NCBI NO: 30685896 NR Description: expressed protein [Arabidopsis thaliana] unknown protein [Arabidopsis thaliana]
  misc_feature (1)..(415): Homolog of NCBI NO: 9759136 NR Description: gene_id:MQK4.27~unknown protein [Arabidopsis
  misc_feature (1)..(299): Homolog of NCBI NO: 34893992 NR Description: P0672D08.4 [Oryza sativa (japonica >gi|15128436|dbj|BAB62620.1| hypothetical protein~similar to
MSCSNLRGIGNVVMGNPGFSEFKVAALSSLGSYTCKNTTSGPTVNFKCTKCRLTNDYIYISWHFVDLPDSPAAAVGFQFNFTSKNGPNEKHMSFVSGTLRNGSILDESPVTFRGTEGNILKFNLFPRIYHHLHDLKLIQPLFHEFIPGSVYRDTTQLQASMGRSTDGILNTTLFINYLSAYIVEIDHENILGPVSFLADLGGLYCISIGIFFYLLVQCEYRIKKLRNEDTVFRKIRNRRKALDHWDKLRRYVAYTWDCSILVDDAIKTTKVSGMCGLTRPPTSSNSSEHGESIMANKKPNLGIEKNVISQPASLELSSFDSASSLAHGDNFSNKKSITHPISHSEDVSIPPPPPMEFIDGSSGSEVDAMDIKNKFQLLYDYNVLLREKLLETQSLLNTLAPKPIASSSSTVERSA

SEQ ID NO: 104607 - protein, 402 aa, Arabidopsis thaliana
  peptide (1)..(402): Ceres Seq. ID no. 13615368
  misc_feature (1)..(402): Homolog of NCBI NO: 30685896 NR Description: expressed protein [Arabidopsis thaliana] unknown protein [Arabidopsis thaliana]
  misc_feature (1)..(402): Homolog of NCBI NO: 9759136 NR Description: gene_id:MQK4.27~unknown protein [Arabidopsis
  misc_feature (1)..(286): Homolog of NCBI NO: 34893992 NR Description: P0672D08.4 [Oryza sativa (japonica >gi|15128436|dbj|BAB62620.1| hypothetical protein~similar to
MGNPGFSEFKVAALSSLGSYTCKNTTSGPTVNFKCTKCRLTNDYIYISWHFVDLPDSPAAAVGFQFNFTSKNGPNEKHMSFVSGTLRNGSILDESPVTFRGTEGNILKFNLFPRIYHHLHDLKLIQPLFHEFIPGSVYRDTTQLQASMGRSTDGILNTTLFINYLSAYIVEIDHENILGPVSFLADLGGLYCISIGIFFYLLVQCEYRIKKLRNEDTVFRKIRNRRKALDHWDKLRRYVAYTWDCSILVDDAIKTTKVSGMCGLTRPPTSSNSSEHGESIMANKKPNLGIEKNVISQPASLELSSFDSASSLAHGDNFSNKKSITHPISHSEDVSIPPPPPMEFIDGSSGSEVDAMDIKNKFQLLYDYNVLLREKLLETQSLLNTLAPKPIASSSSTVERSA

SEQ ID NO: 104608 - protein, 324 aa, Arabidopsis thaliana
  peptide (1)..(324): Ceres Seq. ID no. 13615369
  misc_feature (1)..(324): Homolog of NCBI NO: 30685896 NR Description: expressed protein [Arabidopsis thaliana] unknown protein [Arabidopsis thaliana]
  misc_feature (1)..(324): Homolog of NCBI NO: 9759136 NR Description: gene_id:MQK4.27~unknown protein [Arabidopsis
  misc_feature (1)..(208): Homolog of NCBI NO: 34893992 NR Description: P0672D08.4 [Oryza sativa (japonica >gi|15128436|dbj|BAB62620.1| hypothetical protein~similar to
MSFVSGTLRNGSILDESPVTFRGTEGNILKFNLFPRIYHHLHDLKLIQPLFHEFIPGSVYRDTTQLQASMGRSTDGILNTTLFINYLSAYIVEIDHENILGPVSFLADLGGLYCISIGIFFYLLVQCEYRIKKLRNEDTVFRKIRNRRKALDHWDKLRRYVAYTWDCSILVDDAIKTTKVSGMCGLTRPPTSSNSSEHGESIMANKKPNLGIEKNVISQPASLELSSFDSASSLAHGDNFSNKKSITHPISHSEDVSIPPPPPMEFIDGSSGSEVDAMDIKNKFQLLYDYNVLLREKLLETQSLLNTLAPKPIASSSSTVERSA

SEQ ID NO: 104609 - DNA, 1039 bp, Arabidopsis thaliana
  misc_feature (1)..(1039): Ceres Seq. ID no. 13615370
  misc_feature: MA Experiment ID: 108573 Result: Up-regulated in Transcription
  misc_feature: MA Experiment 108573 PARAMETER Experiment Name: At_Drought_cDNA_P Parameter: Timepoint (hr) Value: 6
  misc_feature: MA Experiment 108573 PARAMETER Experiment Name: At_Drought_cDNA_P Parameter: Tissue Value: Aerial
  misc_feature: MA Experiment 108573 PARAMETER Experiment Name: At_Drought_cDNA_P Parameter: Treatment Value: Drought vs. No Drought
  misc_feature: MA Experiment ID: 20000071 Result: Up-regulated in Transcription
  misc_feature: MA Experiment 20000071 PARAMETER Experiment Name: At_100uM_ABA_Mutants_cDNA_P Parameter: Plant Line Value: CS8104
  misc_feature: MA Experiment 20000071 PARAMETER Experiment Name: At_100uM_ABA_Mutants_cDNA_P Parameter: Timepoint (hr) Value: 6
  misc_feature: MA Experiment 20000071 PARAMETER Experiment Name: At_100uM_ABA_Mutants_cDNA_P Parameter: Tissue Value: Aerial
  misc_feature: MA Experiment 20000071 PARAMETER Experiment Name: At_100uM_ABA_Mutants_cDNA_P Parameter: Treatment Value: 100uM ABA vs. No Treatment
  misc_feature: MA Experiment ID: 20000111 Result: Up-regulated in Transcription
  misc_feature: MA Experiment 20000111 PARAMETER Experiment Name: At_42deg_Heat_cDNA_P Parameter: Temperature (deg C) Value: 42 vs. 22
  misc_feature: MA Experiment 20000111 PARAMETER Experiment Name: At_42deg_Heat_cDNA_P Parameter: Timepoint (hr) Value: 6
  misc_feature: MA Experiment 20000111 PARAMETER Experiment Name: At_42deg_Heat_cDNA_P Parameter: Tissue Value: Aerial
  misc_feature: MA Experiment ID: 20000113 Result: Up-regulated in Transcription
  misc_feature: MA Experiment 20000113 PARAMETER Experiment Name: At_42deg_Heat_cDNA_P Parameter: Temperature (deg C) Value: 42 vs. 22
  misc_feature: MA Experiment 20000113 PARAMETER Experiment Name: At_42deg_Heat_cDNA_P Parameter: Timepoint (hr) Value: 8
  misc_feature: MA Experiment 20000113 PARAMETER Experiment Name: At_42deg_Heat_cDNA_P Parameter: Tissue Value: Aerial
  misc_feature: MA Experiment ID: 20000173 Result: Up-regulated in Transcription
  misc_feature: MA Experiment 20000173 PARAMETER Experiment Name: At_42deg_Heat_P Parameter: Age (day) Value: 14
  misc_feature: MA Experiment 20000173 PARAMETER Experiment Name: At_42deg_Heat_P Parameter: Organism Value: A. thaliana
  misc_feature: MA Experiment 20000173 PARAMETER Experiment Name: At_42deg_Heat_P Parameter: Plant Line Value: WS
  misc_feature: MA Experiment 20000173 PARAMETER Experiment Name: At_42deg_Heat_P Parameter: Temperature (deg C) Value: 42 vs. 22
  misc_feature: MA Experiment 20000173 PARAMETER Experiment Name: At_42deg_Heat_P Parameter: Timepoint (hr) Value: 6
  misc_feature: MA Experiment 20000173 PARAMETER Experiment Name: At_42deg_Heat_P Parameter: Tissue Value: Aerial
  misc_feature: MA Experiment ID: 20000224 Result: Down-regulated in Transcription
  misc_feature: MA Experiment ID: 20000265 Result: Down-regulated in Transcription
  misc_feature: MA Experiment 20000265 PARAMETER Experiment Name: At_Open_Flower_P Parameter: Age (day) Value: 21
  misc_feature: MA Experiment 20000265 PARAMETER Experiment Name: At_Open_Flower_P Parameter: Plant Line Value: WS
  misc_feature: MA Experiment 20000265 PARAMETER Experiment Name: At_Open_Flower_P Parameter: Tissue Value: Closed Flower vs. Whole Plant
  misc_feature: MA Experiment ID: 20000436 Result: Up-regulated in Transcription
  misc_feature: MA Experiment 20000436 PARAMETER Experiment Name: At_Drought_P Parameter: Age (day) Value: 7
  misc_feature: MA Experiment 20000436 PARAMETER Experiment Name: At_Drought_P Parameter: Organism Value: A. thaliana
  misc_feature: MA Experiment 20000436 PARAMETER Experiment Name: At_Drought_P Parameter: Plant Line Value: WS
  misc_feature: MA Experiment 20000436 PARAMETER Experiment Name: At_Drought_P Parameter: Timepoint (hr) Value: 12
  misc_feature: MA Experiment 20000436 PARAMETER Experiment Name: At_Drought_P Parameter: Tissue Value: Whole Plant
  misc_feature: MA Experiment 20000436 PARAMETER Experiment Name: At_Drought_P Parameter: Treatment Value: Drought vs. No Drought
  misc_feature: MA Experiment ID: 20000437 Result: Up-regulated in Transcription
  misc_feature: MA Experiment 20000437 PARAMETER Experiment Name: At_Drought_P Parameter: Age (day) Value: 8
  misc_feature: MA Experiment 20000437 PARAMETER Experiment Name: At_Drought_P Parameter: Organism Value: A. thaliana
  misc_feature: MA Experiment 20000437 PARAMETER Experiment Name: At_Drought_P Parameter: Plant Line Value: WS
  misc_feature: MA Experiment 20000437 PARAMETER Experiment Name: At_Drought_P Parameter: Timepoint (hr) Value: 24
  misc_feature: MA Experiment 20000437 PARAMETER Experiment Name: At_Drought_P Parameter: Tissue Value: Whole Plant
  misc_feature: MA Experiment 20000437 PARAMETER Experiment Name: At_Drought_P Parameter: Treatment Value: Drought vs. No Drought
  misc_feature: MA Experiment ID: 20001905 Result: Up-regulated in Transcription
  misc_feature: MA Experiment 20001905 PARAMETER Experiment Name: At_Drought_Reproduction_P Parameter: Age (day) Value: 40
  misc_feature: MA Experiment 20001905 PARAMETER Experiment Name: At_Drought_Reproduction_P Parameter: Organism Value: A. thaliana
  misc_feature: MA Experiment 20001905 PARAMETER Experiment Name: At_Drought_Reproduction_P Parameter: Plant Line Value: WS
  misc_feature: MA Experiment 20001905 PARAMETER Experiment Name: At_Drought_Reproduction_P Parameter: Timepoint (day) Value: 10
  misc_feature: MA Experiment 20001905 PARAMETER Experiment Name: At_Drought_Reproduction_P Parameter: Tissue Value: Rosettes
  misc_feature: MA Experiment 20001905 PARAMETER Experiment Name: At_Drought_Reproduction_P Parameter: Treatment Value: Drought vs. No Drought
  misc_feature: MA Experiment ID: 20001910 Result: Up-regulated in Transcription
  misc_feature: MA Experiment 20001910 PARAMETER Experiment Name: At_Drought_Reproduction_P Parameter: Age (day) Value: 37
  misc_feature: MA Experiment 20001910 PARAMETER Experiment Name: At_Drought_Reproduction_P Parameter: Organism Value: A. thaliana
  misc_feature: MA Experiment 20001910 PARAMETER Experiment Name: At_Drought_Reproduction_P Parameter: Plant Line Value: WS
  misc_feature: MA Experiment 20001910 PARAMETER Experiment Name: At_Drought_Reproduction_P Parameter: Timepoint (day) Value: 7
  misc_feature: MA Experiment 20001910 PARAMETER Experiment Name: At_Drought_Reproduction_P Parameter: Tissue Value: Flowers
  misc_feature: MA Experiment 20001910 PARAMETER Experiment Name: At_Drought_Reproduction_P Parameter: Treatment Value: Drought vs. No Drought
  misc_feature: MA Experiment ID: 20001911 Result: Up-regulated in Transcription
  misc_feature: MA Experiment 20001911 PARAMETER Experiment Name: At_Drought_Reproduction_P Parameter: Age (day) Value: 40
  misc_feature: MA Experiment 20001911 PARAMETER Experiment Name: At_Drought_Reproduction_P Parameter: Organism Value: A. thaliana
  misc_feature: MA Experiment 20001911 PARAMETER Experiment Name: At_Drought_Reproduction_P Parameter: Plant Line Value: WS
  misc_feature: MA Experiment 20001911 PARAMETER Experiment Name: At_Drought_Reproduction_P Parameter: Timepoint (day) Value: 10
  misc_feature: MA Experiment 20001911 PARAMETER Experiment Name: At_Drought_Reproduction_P Parameter: Tissue Value: Flowers
  misc_feature: MA Experiment 20001911 PARAMETER Experiment Name: At_Drought_Reproduction_P Parameter: Treatment Value: Drought vs. No Drought
actcttattacttcctaaatccgatcgaaacaactgttgggttagtttctaatttccaagaatggcgcaagatcacgacgagacggagaataaaacctttgccgacgttgtcggtggcgatgatgtcggcgaaattgtcaacggaggaacaaagaatggctatcgtaaaccggactctgtggagaaggaagatgatgaggatttgaagagtctctattccttgatttgtctcacgatcggttcgattctgtttccagattcgaaaaccggtgatgcgtcttcgtttcttgaacgtgtaagaaactccgtcgctgaaaatgggcctaagcttcgagaagcttctgaaagaacaggacgcgagattcttctctggactcgtagaggcagctcgcttcgtgctctgcttgtcatcactatgggaacaatagttcttttgacaacaatggctttggttgtattcacactcttctttgtagctgcaacagccaatgctatcataatctctcttctgatttcacttgctgttgctggtggcttcttggcactcttctttctctgcttgactggtgtttacattggagccttatccgttgctgcattcgtcatctctaccgctacagtttctgctgtcgtttctgtcttaatagcttcaggttggattgggtttttctatgcggtgtggttgggaacaagaggaagcctacgcttggctaagcaatcggtttcagtggtgggatcagccatttcaggtaacactatcagtcgtcatcaacaccaagaccgggaggtaaacatcgaatcaaccaactgagaatccgtccttaccgcgtttgtaaataaaccccgacttttggttgttaatggaagcttgatataaatatgatctatggagtttgttgtgaagaagcagagaaagaatgataagaatatttcaaaatgcaacttgaaacattttgtgatcaatgtctacggatttttggatctatgtatgcatacattgtgtgttttatgtacttaagaaagaataatgatcagtatc

SEQ ID NO: 104610 - protein, 249 aa, Arabidopsis thaliana
  peptide (1)..(249): Ceres Seq. ID no. 13615371
  misc_feature (1)..(249): Homolog of NCBI NO: 18418008 NR Description: expressed protein [Arabidopsis thaliana]
  misc_feature (1)..(249): Homolog of NCBI NO: 14423560 NR Description: Unknown protein [Arabidopsis thaliana]
  misc_feature (27)..(239): Homolog of NCBI NO: 34905012 NR Description: P0456B03.14 [Oryza sativa (japonica
MAQDHDETENKTFADVVGGDDVGEIVNGGTKNGYRKPDSVEKEDDEDLKSLYSLICLTIGSILFPDSKTGDASSFLERVRNSVAENGPKLREASERTGREILLWTRRGSSLRALLVITMGTIVLLTTMALVVFTLFFVAATANAIIISLLISLAVAGGFLALFFLCLTGVYIGALSVAAFVISTATVSAVVSVLIASGWIGFFYAVWLGTRGSLRLAKQSVSVVGSAISGNTISRHQHQDREVNIESTN

SEQ ID NO: 104611 - protein, 131 aa, Arabidopsis thaliana; identical to SEQ ID NO: 20885
  peptide (1)..(131): Ceres Seq. ID no. 13615372
  misc_feature (1)..(131): Homolog of NCBI NO: 18418008 NR Description: expressed protein [Arabidopsis thaliana]
  misc_feature (1)..(131): Homolog of NCBI NO: 14423560 NR Description: Unknown protein [Arabidopsis thaliana]
  misc_feature (1)..(121): Homolog of NCBI NO: 34905012 NR Description: P0456B03.14 [Oryza sativa (japonica

SEQ ID NO: 104612 - DNA, 1005 bp, Arabidopsis thaliana
  misc_feature (1)..(1005): Ceres Seq. ID no. 13615373
  misc_feature: MA Experiment ID: 108434 Result: Up-regulated in Transcription
  misc_feature: MA Experiment 108434 PARAMETER Experiment Name: At_Root_Tips_cDNA_P Parameter: Tissue Value: Root Tips
  misc_feature: MA Experiment ID: 108462 Result: Up-regulated in Transcription
  misc_feature: MA Experiment 108462 PARAMETER Experiment Name: At_Germinating_Seeds_cDNA_P Parameter: Age (day) Value: 2 vs. 0
  misc_feature: MA Experiment 108462 PARAMETER Experiment Name: At_Germinating_Seeds_cDNA_P Parameter: Tissue Value: Germinating Seeds
  misc_feature: MA Experiment ID: 108463 Result: Up-regulated in Transcription
  misc_feature: MA Experiment 108463 PARAMETER Experiment Name: At_Germinating_Seeds_cDNA_P Parameter: Age (day) Value: 3 vs. 0
  misc_feature: MA Experiment 108463 PARAMETER Experiment Name: At_Germinating_Seeds_cDNA_P Parameter: Tissue Value: Germinating Seeds
  misc_feature: MA Experiment ID: 108464 Result: Up-regulated in Transcription
  misc_feature: MA Experiment 108464 PARAMETER Experiment Name: At_Germinating_Seeds_cDNA_P Parameter: Age (day) Value: 4 vs. 0
  misc_feature: MA Experiment 108464 PARAMETER Experiment Name: At_Germinating_Seeds_cDNA_P Parameter: Tissue Value: Germinating Seeds
  misc_feature: MA Experiment ID: 108576 Result: Down-regulated in Transcription
  misc_feature: MA Experiment 108576 PARAMETER Experiment Name: At_42deg_Heat_cDNA_P Parameter: Temperature (deg C) Value: 42 vs. 22
  misc_feature: MA Experiment 108576 PARAMETER Experiment Name: At_42deg_Heat_cDNA_P Parameter: Timepoint (hr) Value: 1
  misc_feature: MA Experiment 108576 PARAMETER Experiment Name: At_42deg_Heat_cDNA_P Parameter: Tissue Value: Aerial
  misc_feature: MA Experiment ID: 20000179 Result: Up-regulated in Transcription
  misc_feature: MA Experiment 20000179 PARAMETER Experiment Name: At_Germinating_Seeds_P Parameter: Age (hr) Value: 6 vs. 0
  misc_feature: MA Experiment 20000179 PARAMETER Experiment Name: At_Germinating_Seeds_P Parameter: Tissue Value: Germinating Seeds
  misc_feature: MA Experiment ID: 20000180 Result: Up-regulated in Transcription
  misc_feature: MA Experiment 20000180 PARAMETER Experiment Name: At_Germinating_Seeds_P Parameter: Age (hr) Value: 24 vs. 0
  misc_feature: MA Experiment 20000180 PARAMETER Experiment Name: At_Germinating_Seeds_P Parameter: Tissue Value: Germinating Seeds
  misc_feature: MA Experiment ID: 20000184 Result: Up-regulated in Transcription
  misc_feature: MA Experiment 20000184 PARAMETER Experiment Name: At_Shoots__P Parameter: Age (day) Value: 7
  misc_feature: MA Experiment 20000184 PARAMETER Experiment Name: At_Shoots__P Parameter: Tissue Value: Shoots vs. Whole Plant
  misc_feature: MA Experiment ID: 20000234 Result: Up-regulated in Transcription
  misc_feature: MA Experiment 20000234 PARAMETER Experiment Name: At_Siliques_P Parameter: Age (day) Value: 21
  misc_feature: MA Experiment 20000234 PARAMETER Experiment Name: At_Siliques_P Parameter: Organism Value: A. thaliana
  misc_feature: MA Experiment 20000234 PARAMETER Experiment Name: At_Siliques_P Parameter: Plant Line Value: WS
  misc_feature: MA Experiment 20000234 PARAMETER Experiment Name: At_Siliques_P Parameter: Tissue Value: Less Than 5mm Siliques vs. Whole Plant
  misc_feature: MA Experiment ID: 20000235 Result: Up-regulated in Transcription
  misc_feature: MA Experiment 20000235 PARAMETER Experiment Name: At_Siliques_P Parameter: Age (day) Value: 21
  misc_feature: MA Experiment 20000235 PARAMETER Experiment Name: At_Siliques_P Parameter: Organism Value: A. thaliana
  misc_feature: MA Experiment 20000235 PARAMETER Experiment Name: At_Siliques_P Parameter: Plant Line Value: WS
  misc_feature: MA Experiment 20000235 PARAMETER Experiment Name: At_Siliques_P Parameter: Tissue Value: 5-10mm Siliques vs. Whole Plant
  misc_feature: MA Experiment ID: 20000495 Result: Up-regulated in Transcription
  misc_feature: MA Experiment 20000495 PARAMETER Experiment Name: At_Guard_Cells_P Parameter: Harvest Date Value: 8/2/2002
  misc_feature: MA Experiment 20000495 PARAMETER Experiment Name: At_Guard_Cells_P Parameter: Organism Value: A. thaliana
  misc_feature: MA Experiment 20000495 PARAMETER Experiment Name: At_Guard_Cells_P Parameter: Tissue Value: Guard Cells vs. Leaves
  misc_feature: MA Experiment ID: 20000794 Result: Down-regulated in Transcription
  misc_feature: MA Experiment 20000794 PARAMETER Experiment Name: At_Petals_P Parameter: Age (day) Value: 23-25 days
  misc_feature: MA Experiment 20000794 PARAMETER Experiment Name: At_Petals_P Parameter: Plant Line Value: WS
  misc_feature: MA Experiment 20000794 PARAMETER Experiment Name: At_Petals_P Parameter: Tissue Value: Petals vs. Whole plant
  misc_feature: MA Experiment ID: 20001248 Result: Up-regulated in Transcription
  misc_feature: MA Experiment 20001248 PARAMETER Experiment Name: At_Far-red-induction_P Parameter: Age (day) Value: 7
  misc_feature: MA Experiment 20001248 PARAMETER Experiment Name: At_Far-red-induction_P Parameter: Light Value: Far-red vs. White
  misc_feature: MA Experiment 20001248 PARAMETER Experiment Name: At_Far-red-induction_P Parameter: Organism Value: A. thaliana
  misc_feature: MA Experiment 20001248 PARAMETER Experiment Name: At_Far-red-induction_P Parameter: Plant Line Value: Columbia
  misc_feature: MA Experiment 20001248 PARAMETER Experiment Name: At_Far-red-induction_P Parameter: Timepoint (hr) Value: 4
  misc_feature: MA Experiment 20001248 PARAMETER Experiment Name: At_Far-red-induction_P Parameter: Tissue Value: Whole Plant
  misc_feature: MA Experiment ID: 20001557 Result: Up-regulated in Transcription
  misc_feature: MA Experiment 20001557 PARAMETER Experiment Name: At_Drought_Soil_Dry_P Parameter: Age (day) Value: 27
  misc_feature: MA Experiment 20001557 PARAMETER Experiment Name: At_Drought_Soil_Dry_P Parameter: Organism Value: A. thaliana
  misc_feature: MA Experiment 20001557 PARAMETER Experiment Name: At_Drought_Soil_Dry_P Parameter: Plant Line Value: WS
  misc_feature: MA Experiment 20001557 PARAMETER Experiment Name: At_Drought_Soil_Dry_P Parameter: Post Timepoint (hr) Value: 3
  misc_feature: MA Experiment 20001557 PARAMETER Experiment Name: At_Drought_Soil_Dry_P Parameter: Post-Treatment Value: Re-Water vs. No Drought
  misc_feature: MA Experiment 20001557 PARAMETER Experiment Name: At_Drought_Soil_Dry_P Parameter: Timepoint (day) Value: 13
  misc_feature: MA Experiment 20001557 PARAMETER Experiment Name: At_Drought_Soil_Dry_P Parameter: Treatment Value: Drought vs. No Drought
  misc_feature: MA Experiment ID: 20001560 Result: Up-regulated in Transcription
  misc_feature: MA Experiment 20001560 PARAMETER Experiment Name: At_Drought_Soil_Dry_P Parameter: Age (day) Value: 28
  misc_feature: MA Experiment 20001560 PARAMETER Experiment Name: At_Drought_Soil_Dry_P Parameter: Organism Value: A. thaliana
  misc_feature: MA Experiment 20001560 PARAMETER Experiment Name: At_Drought_Soil_Dry_P Parameter: Plant Line Value: WS
  misc_feature: MA Experiment 20001560 PARAMETER Experiment Name: At_Drought_Soil_Dry_P Parameter: Post Timepoint (hr) Value: None
  misc_feature: MA Experiment 20001560 PARAMETER Experiment Name: At_Drought_Soil_Dry_P Parameter: Post-Treatment Value: None
  misc_feature: MA Experiment 20001560 PARAMETER Experiment Name: At_Drought_Soil_Dry_P Parameter: Timepoint (day) Value: 14
  misc_feature: MA Experiment 20001560 PARAMETER Experiment Name: At_Drought_Soil_Dry_P Parameter: Treatment Value: Drought vs. No Drought
aagattccacaaaaactctgtattgtctctttctctctcactatctctctctcttttgtgagctcagatctgaccagagagaaagaaacaaccggagaagaagaagatgactgaccgagtcttcccagcttccaaaccaccaaccgccactaatggagctccaccagttggttccataccacctcctccagctccggcgactgtaaccagcaacggaacaacaaacggaatggctaatcagaaacctcaagtctacattccagctaaccgtccggtttaccgtccacagccttacagtcgccgtcatcaccaccaatctcgaccaagctgccgacgaatttgctgttgttgctgtttctggtcgattctgataattctgatcttagctctcatgactgcaatcgccgccaccgcgatgtacgtgatctaccaccctcgtccgccgtcgttctccgtcccgtcaataagaatcagccgcgtgaacctaacaacctcctctgattcctccgtctctcatctctcttccttcttcaacttcactctaatctcagagaatccaaaccaacacctctctttctcttacgatcctttcaccgtcaccgttaattcagctaaatccggtacgatgctcggtaacggaactgttcctgctttcttcagcgataacggtaacaaaacttcgtttcacggcgtgatcgctacgtctacagcggcgcgtgagttagatccggatgaagctaagcatctgagatcagatctgacgcgcgcgcgtgtaggatatgagatcgagatgagaactaaagtgaagatgataatggggaagctgaagagtgaaggagtagagatcaaagtgacatgtgaaggatttgaaggaactataccaaaaggtaaaactccaattgtagctacttctaaaaaaactaagtgtaagtctgatcttagtgtcaaggtctggaaatggagtttctagagggaattttgataatttcacaattgaaattttct

SEQ ID NO: 104613 - protein, 287 aa, Arabidopsis thaliana
  peptide (1)..(287): Ceres Seq. ID no. 13615374
  misc_feature (1)..(287): Homolog of NCBI NO: 15239804 NR Description: expressed protein [Arabidopsis thaliana]
  misc_feature (1)..(287): Homolog of NCBI NO: 21536796 NR Description: unknown [Arabidopsis thaliana]
  misc_feature (26)..(287): Homolog of NCBI NO: 11762174 NR Description: At1g17620 [Arabidopsis thaliana]
  misc_feature (26)..(287): Homolog of NCBI NO: 18394509 NR Description: expressed protein [Arabidopsis thaliana] F1L3.32 [Arabidopsis thaliana] >gi|15450635|gb|AAK96589.1|
  misc_feature (7)..(279): Homolog of NCBI NO: 34903552 NR Description: P0001B06.28 [Oryza sativa (japonica
  misc_feature (1)..(287): Homolog of NCBI NO: 34914304 NR Description: B1151A10.19 [Oryza sativa (japonica
  misc_feature (1)..(283): Homolog of NCBI NO: 18401317 NR Description: expressed protein [Arabidopsis thaliana]
  misc_feature (20)..(251): Homolog of NCBI NO: 38344198 NR Description: OSJNBa0064G10.14 [Oryza sativa (japonica
  misc_feature (49)..(280): Homolog of NCBI NO: 15242167 NR Description: hypothetical protein [Arabidopsis thaliana]
  misc_feature (7)..(251): Homolog of NCBI NO: 34909192 NR Description: P0425G02.19 [Oryza sativa (japonica
MTDRVFPASKPPTATNGAPPVGSIPPPPAPATVTSNGTTNGMANQKPQVYIPANRPVYRPQPYSRRHHHQSRPSCRRICCCCCFWSILIILILALMTAIAATAMYVIYHPRPPSFSVPSIRISRVNLTTSSDSSVSHLSSFFNFTLISENPNQHLSFSYDPFTVTVNSAKSGTMLGNGTVPAFFSDNGNKTSFHGVIATSTAARELDPDEAKHLRSDLTRARVGYEIEMRTKVKMIMGKLKSEGVEIKVTCEGFEGTIPKGKTPIVATSKKTKCKSDLSVKVWKWSF

SEQ ID NO: 104614 - protein, 246 aa, Arabidopsis thaliana
  peptide (1)..(246): Ceres Seq. ID no. 13615375
  misc_feature (1)..(246): Homolog of NCBI NO: 15239804 NR Description: expressed protein [Arabidopsis thaliana]
  misc_feature (1)..(246): Homolog of NCBI NO: 21536796 NR Description: unknown [Arabidopsis thaliana]
  misc_feature (1)..(246): Homolog of NCBI NO: 11762174 NR Description: At1g17620 [Arabidopsis thaliana]
  misc_feature (1)..(246): Homolog of NCBI NO: 18394509 NR Description: expressed protein [Arabidopsis thaliana] F1L3.32 [Arabidopsis thaliana] >gi|15450635|gb|AAK96589.1|
  misc_feature (1)..(238): Homolog of NCBI NO: 34903552 NR Description: P0001B06.28 [Oryza sativa (japonica
  misc_feature (1)..(246): Homolog of NCBI NO: 34914304 NR Description: B1151A10.19 [Oryza sativa (japonica
  misc_feature (1)..(242): Homolog of NCBI NO: 18401317 NR Description: expressed protein [Arabidopsis thaliana]
  misc_feature (1)..(210): Homolog of NCBI NO: 38344198 NR Description: OSJNBa0064G10.14 [Oryza sativa (japonica
  misc_feature (8)..(239): Homolog of NCBI NO: 15242167 NR Description: hypothetical protein [Arabidopsis thaliana]
  misc_feature (1)..(210): Homolog of NCBI NO: 34909192 NR Description: P0425G02.19 [Oryza sativa (japonica
MANQKPQVYIPANRPVYRPQPYSRRHHHQSRPSCRRICCCCCFWSILIILILALMTAIAATAMYVIYHPRPPSFSVPSIRISRVNLTTSSDSSVSHLSSFFNFTLISENPNQHLSFSYDPFTVTVNSAKSGTMLGNGTVPAFFSDNGNKTSFHGVIATSTAARELDPDEAKHLRSDLTRARVGYEIEMRTKVKMIMGKLKSEGVEIKVTCEGFEGTIPKGKTPIVATSKKTKCKSDLSVKVWKWSF

SEQ ID NO: 104615 - protein, 192 aa, Arabidopsis thaliana
  peptide (1)..(192): Ceres Seq. ID no. 13615376
  misc_feature (1)..(192): Homolog of NCBI NO: 15239804 NR Description: expressed protein [Arabidopsis thaliana]
  misc_feature (1)..(192): Homolog of NCBI NO: 21536796 NR Description: unknown [Arabidopsis thaliana]
  misc_feature (1)..(192): Homolog of NCBI NO: 11762174 NR Description: At1g17620 [Arabidopsis thaliana]
  misc_feature (1)..(192): Homolog of NCBI NO: 18394509 NR Description: expressed protein [Arabidopsis thaliana] F1L3.32 [Arabidopsis thaliana] >gi|15450635|gb|AAK96589.1|
  misc_feature (1)..(184): Homolog of NCBI NO: 34903552 NR Description: P0001B06.28 [Oryza sativa (japonica
  misc_feature (1)..(192): Homolog of NCBI NO: 34914304 NR Description: B1151A10.19 [Oryza sativa (japonica
  misc_feature (1)..(188): Homolog of NCBI NO: 18401317 NR Description: expressed protein [Arabidopsis thaliana]
  misc_feature (1)..(156): Homolog of NCBI NO: 38344198 NR Description: OSJNBa0064G10.14 [Oryza sativa (japonica
  misc_feature (1)..(185): Homolog of NCBI NO: 15242167 NR Description: hypothetical protein [Arabidopsis thaliana]
  misc_feature (1)..(156): Homolog of NCBI NO: 34909192 NR Description: P0425G02.19 [Oryza sativa (japonica
MTAIAATAMYVIYHPRPPSFSVPSIRISRVNLTTSSDSSVSHLSSFFNFTLISENPNQHLSFSYDPFTVTVNSAKSGTMLGNGTVPAFFSDNGNKTSFHGVIATSTAARELDPDEAKHLRSDLTRARVGYEIEMRTKVKMIMGKLKSEGVEIKVTCEGFEGTIPKGKTPIVATSKKTKCKSDLSVKVWKWSF

SEQ ID NO: 104616 - DNA, 1148 bp, Arabidopsis thaliana
  misc_feature (1)..(1148): Ceres Seq. ID no. 13615377
  misc_feature: MA Experiment ID: 20000171 Result: Up-regulated in Transcription
  misc_feature: MA Experiment 20000171 PARAMETER Experiment Name: At_42deg_Heat_P Parameter: Age (day) Value: 14
  misc_feature: MA Experiment 20000171 PARAMETER Experiment Name: At_42deg_Heat_P Parameter: Organism Value: A. thaliana
  misc_feature: MA Experiment 20000171 PARAMETER Experiment Name: At_42deg_Heat_P Parameter: Plant Line Value: WS
  misc_feature: MA Experiment 20000171 PARAMETER Experiment Name: At_42deg_Heat_P Parameter: Temperature (deg C) Value: 42 vs. 22
  misc_feature: MA Experiment 20000171 PARAMETER Experiment Name: At_42deg_Heat_P Parameter: Timepoint (hr) Value: 1
  misc_feature: MA Experiment 20000171 PARAMETER Experiment Name: At_42deg_Heat_P Parameter: Tissue Value: Aerial
  misc_feature: MA Experiment ID: 20000173 Result: Up-regulated in Transcription
  misc_feature: MA Experiment 20000173 PARAMETER Experiment Name: At_42deg_Heat_P Parameter: Age (day) Value: 14
  misc_feature: MA Experiment 20000173 PARAMETER Experiment Name: At_42deg_Heat_P Parameter: Organism Value: A. thaliana
  misc_feature: MA Experiment 20000173 PARAMETER Experiment Name: At_42deg_Heat_P Parameter: Plant Line Value: WS
  misc_feature: MA Experiment 20000173 PARAMETER Experiment Name: At_42deg_Heat_P Parameter: Temperature (deg C) Value: 42 vs. 22
  misc_feature: MA Experiment 20000173 PARAMETER Experiment Name: At_42deg_Heat_P Parameter: Timepoint (hr) Value: 6
  misc_feature: MA Experiment 20000173 PARAMETER Experiment Name: At_42deg_Heat_P Parameter: Tissue Value: Aerial
aagcttttcgaggtatctcctccgcgcgacgatgtcagagactcgccggaatcagtctagcgatgaacaaatcgaaaaatcagagattcagcaccaaagagttgtaattgagaacagtcatggtgagaaactcgtaggagttttgcatgatactggttctacagagactgttgtcatctgccatggatttcgttcatcaaagaatcggattccaatgctgaccattgcaagtttctttgaaagagcaatgatcagttctttccggtttgactttgctggcaacggggaaagccaaggatcatttcagtatggtaactatcgccgtgaagttgaagatttgcgctctgttttgcaacacttgcgtggtgttaaccgtgtgatttctgcgattatcggacatagtaaaggtggaaatgtggtgcttttgtatgcagcaaagtacaatgatgtgcagactgttgtgaatatctcagggcggttttttcttgacagaggaatcgaatttcggcttggtaaggactacttcaagagaatcaaagataatggattcattgatgttagcaacagaaagggaaagtttgaatatcgggtaacagaagagagtctaatggaccgtctcacaaccaatgctcatgaagcatgtctctcaattcgtgaaaactgcagggtcttgacagtccatgggtcaaatgataggattgtgcatgtaacagaagcgtccgaatttgctaaacagataaagaatcataagctgtatgttattgaaggagctgatcatgagttcacttctcaccagcatcagcttgcttcaatcgttctctcattctttaaattggatcctaagaaagatgatgagtcaggtgatatcagtacaagtaaccaagactccatgagatcagttgttcctattacatcgcgaatttaaatcgctttgctgagttacttaatgtctcacggtctcgggggtgataataaacggtttgataaacacagttagaaaccaaaatgttcttatggataaaatcttgttggtagtatacagtctatttaaatatctcaacacaaaatcgatcataaaagtttcacttgttttcttaggctttgtttaggatcagttttcgaatctggctgtcctaaactattggctg

SEQ ID NO: 104617 - protein, 307 aa, Arabidopsis thaliana
  peptide (1)..(307): Ceres Seq. ID no. 13615378
  misc_feature (11)..(307): Homolog of NCBI NO: 18416707 NR Description: esterase/lipase/thioesterase family [Arabidopsis
  misc_feature (11)..(307): Homolog of NCBI NO: 21595418 NR Description: putative esterase-like protein [Arabidopsis
  misc_feature (27)..(292): Homolog of NCBI NO: 11358640 NR Description: probable esterase-like protein - Arabidopsis
  misc_feature (11)..(27): Homolog of NCBI NO: 11358640 NR Description: probable esterase-like protein - Arabidopsis
  misc_feature (17)..(277): Homolog of NCBI NO: 15228202 NR Description: esterase/lipase/thioesterase family [Arabidopsis
  misc_feature (32)..(286): Homolog of NCBI NO: 15232826 NR Description: esterase/lipase/thioesterase family [Arabidopsis
  misc_feature (27)..(277): Homolog of NCBI NO: 15220578 NR Description: esterase/lipase/thioesterase family [Arabidopsis
  misc_feature (32)..(286): Homolog of NCBI NO: 22135864 NR Description: putative protein [Arabidopsis thaliana]
  misc_feature (32)..(277): Homolog of NCBI NO: 21554728 NR Description: putative esterase [Arabidopsis thaliana]
  misc_feature (9)..(286): Homolog of NCBI NO: 34913064 NR Description: P0013G02.24 [Oryza sativa (japonica
SFSRYLLRATMSETRRNQSSDEQIEKSEIQHQRVVIENSHGEKLVGVLHDTGSTETVVICHGFRSSKNRIPMLTIASFFERAMISSFRFDFAGNGESQGSFQYGNYRREVEDLRSVLQHLRGVNRVISAIIGHSKGGNVVLLYAAKYNDVQTVVNISGRFFLDRGIEFRLGKDYFKRIKDNGFIDVSNRKGKFEYRVTEESLMDRLTTNAHEACLSIRENCRVLTVHGSNDRIVHVTEASEFAKQIKNHKLYVIEGADHEFTSHQHQLASIVLSFFKLDPKKDDESGDISTSNQDSMRSVVPITSRI

SEQ ID NO: 104618 - protein, 297 aa, Arabidopsis thaliana
  peptide (1)..(297): Ceres Seq. ID no. 13615379
  misc_feature (1)..(297): Homolog of NCBI NO: 18416707 NR Description: esterase/lipase/thioesterase family [Arabidopsis
  misc_feature (1)..(297): Homolog of NCBI NO: 21595418 NR Description: putative esterase-like protein [Arabidopsis
  misc_feature (17)..(282): Homolog of NCBI NO: 11358640 NR Description: probable esterase-like protein - Arabidopsis
  misc_feature (1)..(17): Homolog of NCBI NO: 11358640 NR Description: probable esterase-like protein - Arabidopsis
  misc_feature (7)..(267): Homolog of NCBI NO: 15228202 NR Description: esterase/lipase/thioesterase family [Arabidopsis
  misc_feature (22)..(276): Homolog of NCBI NO: 15232826 NR Description: esterase/lipase/thioesterase family [Arabidopsis
  misc_feature (17)..(267): Homolog of NCBI NO: 15220578 NR Description: esterase/lipase/thioesterase family [Arabidopsis
  misc_feature (22)..(276): Homolog of NCBI NO: 22135864 NR Description: putative protein [Arabidopsis thaliana]
  misc_feature (22)..(267): Homolog of NCBI NO: 21554728 NR Description: putative esterase [Arabidopsis thaliana]
  misc_feature (1)..(276): Homolog of NCBI NO: 34913064 NR Description: P0013G02.24 [Oryza sativa (japonica
MSETRRNQSSDEQIEKSEIQHQRVVIENSHGEKLVGVLHDTGSTETVVICHGFRSSKNRIPMLTIASFFERAMISSFRFDFAGNGESQGSFQYGNYRREVEDLRSVLQHLRGVNRVISAIIGHSKGGNVVLLYAAKYNDVQTVVNISGRFFLDRGIEFRLGKDYFKRIKDNGFIDVSNRKGKFEYRVTEESLMDRLTTNAHEACLSIRENCRVLTVHGSNDRIVHVTEASEFAKQIKNHKLYVIEGADHEFTSHQHQLASIVLSFFKLDPKKDDESGDISTSNQDSMRSVVPITSRI

SEQ ID NO: 104619 - protein, 236 aa, Arabidopsis thaliana
  peptide (1)..(236): Ceres Seq. ID no. 13615380
  misc_feature (1)..(236): Homolog of NCBI NO: 18416707 NR Description: esterase/lipase/thioesterase family [Arabidopsis
  misc_feature (1)..(236): Homolog of NCBI NO: 21595418 NR Description: putative esterase-like protein [Arabidopsis
  misc_feature (1)..(221): Homolog of NCBI NO: 11358640 NR Description: probable esterase-like protein - Arabidopsis
  misc_feature (1)..(206): Homolog of NCBI NO: 15228202 NR Description: esterase/lipase/thioesterase family [Arabidopsis
  misc_feature (1)..(215): Homolog of NCBI NO: 15232826 NR Description: esterase/lipase/thioesterase family [Arabidopsis
  misc_feature (1)..(206): Homolog of NCBI NO: 15220578 NR Description: esterase/lipase/thioesterase family [Arabidopsis
  misc_feature (1)..(215): Homolog of NCBI NO: 22135864 NR Description: putative protein [Arabidopsis thaliana]
  misc_feature (1)..(206): Homolog of NCBI NO: 21554728 NR Description: putative esterase [Arabidopsis thaliana]
  misc_feature (1)..(215): Homolog of NCBI NO: 34913064 NR Description: P0013G02.24 [Oryza sativa (japonica
  misc_feature (1)..(206): Homolog of NCBI NO: 15224799 NR Description: esterase/lipase/thioesterase family [Arabidopsis
MLTIASFFERAMISSFRFDFAGNGESQGSFQYGNYRREVEDLRSVLQHLRGVNRVISAIIGHSKGGNVVLLYAAKYNDVQTVVNISGRFFLDRGIEFRLGKDYFKRIKDNGFIDVSNRKGKFEYRVTEESLMDRLTTNAHEACLSIRENCRVLTVHGSNDRIVHVTEASEFAKQIKNHKLYVIEGADHEFTSHQHQLASIVLSFFKLDPKKDDESGDISTSNQDSMRSVVPITSRI

SEQ ID NO: 104620 - DNA, 657 bp, Arabidopsis thaliana
  misc_feature (1)..(657): Ceres Seq. ID no. 13615385
  misc_feature: MA Experiment ID: 108434 Result: Up-regulated in Transcription
  misc_feature: MA Experiment 108434 PARAMETER Experiment Name: At_Root_Tips_cDNA_P Parameter: Tissue Value: Root Tips
  misc_feature: MA Experiment ID: 108461 Result: Down-regulated in Transcription
  misc_feature: MA Experiment 108461 PARAMETER Experiment Name: At_Germinating_Seeds_cDNA_P Parameter: Age (day) Value: 1 vs. 0
  misc_feature: MA Experiment 108461 PARAMETER Experiment Name: At_Germinating_Seeds_cDNA_P Parameter: Tissue Value: Germinating Seeds
  misc_feature: MA Experiment ID: 108469 Result: Up-regulated in Transcription
  misc_feature: MA Experiment ID: 108489 Result: Down-regulated in Transcription
  misc_feature: MA Experiment ID: 108561 Result: Up-regulated in Transcription
  misc_feature: MA Experiment 108561 PARAMETER Experiment Name: At_100uM_ABA_cDNA_P Parameter: Timepoint (hr) Value: 6
  misc_feature: MA Experiment 108561 PARAMETER Experiment Name: At_100uM_ABA_cDNA_P Parameter: Tissue Value: Aerial
  misc_feature: MA Experiment 108561 PARAMETER Experiment Name: At_100uM_ABA_cDNA_P Parameter: Treatment Value: 100uM ABA vs. No Treatment
  misc_feature: MA Experiment ID: 108576 Result: Up-regulated in Transcription
  misc_feature: MA Experiment 108576 PARAMETER Experiment Name: At_42deg_Heat_cDNA_P Parameter: Temperature (deg C) Value: 42 vs. 22
  misc_feature: MA Experiment 108576 PARAMETER Experiment Name: At_42deg_Heat_cDNA_P Parameter: Timepoint (hr) Value: 1
  misc_feature: MA Experiment 108576 PARAMETER Experiment Name: At_42deg_Heat_cDNA_P Parameter: Tissue Value: Aerial
  misc_feature: MA Experiment ID: 108577 Result: Up-regulated in Transcription
  misc_feature: MA Experiment 108577 PARAMETER Experiment Name: At_42deg_Heat_cDNA_P Parameter: Temperature (deg C) Value: 42 vs. 22
  misc_feature: MA Experiment 108577 PARAMETER Experiment Name: At_42deg_Heat_cDNA_P Parameter: Timepoint (hr) Value: 6
  misc_feature: MA Experiment 108577 PARAMETER Experiment Name: At_42deg_Heat_cDNA_P Parameter: Tissue Value: Aerial
  misc_feature: MA Experiment ID: 108667 Result: Up-regulated in Transcription
  misc_feature: MA Experiment 108667 PARAMETER Experiment Name: At_2mM_SA_cDNA_P Parameter: Plant Line Value: WS
  misc_feature: MA Experiment 108667 PARAMETER Experiment Name: At_2mM_SA_cDNA_P Parameter: Timepoint (hr) Value: 1
  misc_feature: MA Experiment 108667 PARAMETER Experiment Name: At_2mM_SA_cDNA_P Parameter: Treatment Value: 2mM SA vs. No Treatment
  misc_feature: MA Experiment ID: 20000087 Result: Up-regulated in Transcription
  misc_feature: MA Experiment 20000087 PARAMETER Experiment Name: At_100uM_ABA_Mutants_cDNA_P Parameter: Plant Line Value: WS
  misc_feature: MA Experiment 20000087 PARAMETER Experiment Name: At_100uM_ABA_Mutants_cDNA_P Parameter: Timepoint (hr) Value: 6
  misc_feature: MA Experiment 20000087 PARAMETER Experiment Name: At_100uM_ABA_Mutants_cDNA_P Parameter: Tissue Value: Aerial
  misc_feature: MA Experiment 20000087 PARAMETER Experiment Name: At_100uM_ABA_Mutants_cDNA_P Parameter: Treatment Value: 100uM ABA vs. No Treatment
  misc_feature: MA Experiment ID: 20000090 Result: Up-regulated in Transcription
  misc_feature: MA Experiment ID: 20000093 Result: Up-regulated in Transcription
  misc_feature: MA Experiment 20000093 PARAMETER Experiment Name: At_42deg_Heat_cDNA_P Parameter: Temperature (deg C) Value: 42 vs. 22
  misc_feature: MA Experiment 20000093 PARAMETER Experiment Name: At_42deg_Heat_cDNA_P Parameter: Timepoint (hr) Value: 0.5
  misc_feature: MA Experiment 20000093 PARAMETER Experiment Name: At_42deg_Heat_cDNA_P Parameter: Tissue Value: Aerial
  misc_feature: MA Experiment ID: 20000112 Result: Up-regulated in Transcription
  misc_feature: MA Experiment 20000112 PARAMETER Experiment Name: At_42deg_Heat_cDNA_P Parameter: Temperature (deg C) Value: 42 vs. 22
  misc_feature: MA Experiment 20000112 PARAMETER Experiment Name: At_42deg_Heat_cDNA_P Parameter: Timepoint (hr) Value: 2
  misc_feature: MA Experiment 20000112 PARAMETER Experiment Name: At_42deg_Heat_cDNA_P Parameter: Tissue Value: Aerial
  misc_feature: MA Experiment ID: 20000113 Result: Up-regulated in Transcription
  misc_feature: MA Experiment 20000113 PARAMETER Experiment Name: At_42deg_Heat_cDNA_P Parameter: Temperature (deg C) Value: 42 vs. 22
  misc_feature: MA Experiment 20000113 PARAMETER Experiment Name: At_42deg_Heat_cDNA_P Parameter: Timepoint (hr) Value: 8
  misc_feature: MA Experiment 20000113 PARAMETER Experiment Name: At_42deg_Heat_cDNA_P Parameter: Tissue Value: Aerial
  misc_feature: MA Experiment ID: 20000171 Result: Up-regulated in Transcription
  misc_feature: MA Experiment 20000171 PARAMETER Experiment Name: At_42deg_Heat_P Parameter: Age (day) Value: 14
  misc_feature: MA Experiment 20000171 PARAMETER Experiment Name: At_42deg_Heat_P Parameter: Organism Value: A. thaliana
  misc_feature: MA Experiment 20000171 PARAMETER Experiment Name: At_42deg_Heat_P Parameter: Plant Line Value: WS
  misc_feature: MA Experiment 20000171 PARAMETER Experiment Name: At_42deg_Heat_P Parameter: Temperature (deg C) Value: 42 vs. 22
  misc_feature: MA Experiment 20000171 PARAMETER Experiment Name: At_42deg_Heat_P Parameter: Timepoint (hr) Value: 1
  misc_feature: MA Experiment 20000171 PARAMETER Experiment Name: At_42deg_Heat_P Parameter: Tissue Value: Aerial
  misc_feature: MA Experiment ID: 20000173 Result: Up-regulated in Transcription
  misc_feature: MA Experiment 20000173 PARAMETER Experiment Name: At_42deg_Heat_P Parameter: Age (day) Value: 14
  misc_feature: MA Experiment 20000173 PARAMETER Experiment Name: At_42deg_Heat_P Parameter: Organism Value: A. thaliana
  misc_feature: MA Experiment 20000173 PARAMETER Experiment Name: At_42deg_Heat_P Parameter: Plant Line Value: WS
  misc_feature: MA Experiment 20000173 PARAMETER Experiment Name: At_42deg_Heat_P Parameter: Temperature (deg C) Value: 42 vs. 22
  misc_feature: MA Experiment 20000173 PARAMETER Experiment Name: At_42deg_Heat_P Parameter: Timepoint (hr) Value: 6
  misc_feature: MA Experiment 20000173 PARAMETER Experiment Name: At_42deg_Heat_P Parameter: Tissue Value: Aerial
  misc_feature: MA Experiment ID: 20000182 Result: Up-regulated in Transcription
  misc_feature: MA Experiment 20000182 PARAMETER Experiment Name: At_2mM_SA_P Parameter: Age (day) Value: 14
  misc_feature: MA Experiment 20000182 PARAMETER Experiment Name: At_2mM_SA_P Parameter: Organism Value: A. thaliana
  misc_feature: MA Experiment 20000182 PARAMETER Experiment Name: At_2mM_SA_P Parameter: Plant Line Value: WS
  misc_feature: MA Experiment 20000182 PARAMETER Experiment Name: At_2mM_SA_P Parameter: Timepoint (hr) Value: 6
  misc_feature: MA Experiment 20000182 PARAMETER Experiment Name: At_2mM_SA_P Parameter: Tissue Value: Aerial
  misc_feature: MA Experiment 20000182 PARAMETER Experiment Name: At_2mM_SA_P Parameter: Treatment Value: 2mM SA vs. No Treatment
  misc_feature: MA Experiment ID: 20000443 Result: Up-regulated in Transcription
  misc_feature: MA Experiment 20000443 PARAMETER Experiment Name: At_1uM_BR-BRZ__P Parameter: Tissue Value: Shoot Apices
  misc_feature: MA Experiment 20000443 PARAMETER Experiment Name: At_1uM_BR-BRZ__P Parameter: Treatment Value: 1uM BRZ vs. No Treatment
  misc_feature: MA Experiment ID: 20000453 Result: Up-regulated in Transcription
  misc_feature: MA Experiment 20000453 PARAMETER Experiment Name: At_100uM_ABA_P Parameter: Age (day) Value: 15
  misc_feature: MA Experiment 20000453 PARAMETER Experiment Name: At_100uM_ABA_P Parameter: Organism Value: A. thaliana
  misc_feature: MA Experiment 20000453 PARAMETER Experiment Name: At_100uM_ABA_P Parameter: Plant Line Value: WS
  misc_feature: MA Experiment 20000453 PARAMETER Experiment Name: At_100uM_ABA_P Parameter: Timepoint (hr) Value: 24
  misc_feature: MA Experiment 20000453 PARAMETER Experiment Name: At_100uM_ABA_P Parameter: Tissue Value: Aerial
  misc_feature: MA Experiment 20000453 PARAMETER Experiment Name: At_100uM_ABA_P Parameter: Treatment Value: 100uM ABA vs. No Treatment
  misc_feature: MA Experiment ID: 20000456 Result: Up-regulated in Transcription
  misc_feature: MA Experiment 20000456 PARAMETER Experiment Name: At_100uM_BA_P Parameter: Age (day) Value: 14
  misc_feature: MA Experiment 20000456 PARAMETER Experiment Name: At_100uM_BA_P Parameter: Organism Value: A. thaliana
  misc_feature: MA Experiment 20000456 PARAMETER Experiment Name: At_100uM_BA_P Parameter: Plant Line Value: WS
  misc_feature: MA Experiment 20000456 PARAMETER Experiment Name: At_100uM_BA_P Parameter: Timepoint (hr) Value: 6
  misc_feature: MA Experiment 20000456 PARAMETER Experiment Name: At_100uM_BA_P Parameter: Tissue Value: Aerial
  misc_feature: MA Experiment 20000456 PARAMETER Experiment Name: At_100uM_BA_P Parameter: Treatment Value: 100uM BA vs. No Treatment
  misc_feature: MA Experiment ID: 20000709 Result: Up-regulated in Transcription
  misc_feature: MA Experiment 20000709 PARAMETER Experiment Name: At_15mM_NH4NO3_L-to-H_P Parameter: Age (hr) Value: 14
  misc_feature: MA Experiment 20000709 PARAMETER Experiment Name: At_15mM_NH4NO3_L-to-H_P Parameter: Organism Value: A. thaliana
  misc_feature: MA Experiment 20000709 PARAMETER Experiment Name: At_15mM_NH4NO3_L-to-H_P Parameter: Plant Line Value: WS
  misc_feature: MA Experiment 20000709 PARAMETER Experiment Name: At_15mM_NH4NO3_L-to-H_P Parameter: Timepoint (hr) Value: 4
  misc_feature: MA Experiment 20000709 PARAMETER Experiment Name: At_15mM_NH4NO3_L-to-H_P Parameter: Tissue Value: Aerial
  misc_feature: MA Experiment 20000709 PARAMETER Experiment Name: At_15mM_NH4NO3_L-to-H_P Parameter: Treatment Value: 15mM NH4NO3 vs. 30mM Mannitol
  misc_feature: MA Experiment ID: 20001248 Result: Down-regulated in Transcription
  misc_feature: MA Experiment 20001248 PARAMETER Experiment Name: At_Far-red-induction_P Parameter: Age (day) Value: 7
  misc_feature: MA Experiment 20001248 PARAMETER Experiment Name: At_Far-red-induction_P Parameter: Light Value: Far-red vs. White
  misc_feature: MA Experiment 20001248 PARAMETER Experiment Name: At_Far-red-induction_P Parameter: Organism Value: A. thaliana
  misc_feature: MA Experiment 20001248 PARAMETER Experiment Name: At_Far-red-induction_P Parameter: Plant Line Value: Columbia
  misc_feature: MA Experiment 20001248 PARAMETER Experiment Name: At_Far-red-induction_P Parameter: Timepoint (hr) Value: 4
  misc_feature: MA Experiment 20001248 PARAMETER Experiment Name: At_Far-red-induction_P Parameter: Tissue Value: Whole Plant
  misc_feature: MA Experiment ID: 20001768 Result: Up-regulated in Transcription
  misc_feature: MA Experiment 20001768 PARAMETER Experiment Name: At_Far-red-enriched-adult_P Parameter: Age (day) Value: 28
  misc_feature: MA Experiment 20001768 PARAMETER Experiment Name: At_Far-red-enriched-adult_P Parameter: Light Value: Far-red enriched vs. White
  misc_feature: MA Experiment 20001768 PARAMETER Experiment Name: At_Far-red-enriched-adult_P Parameter: Organism Value: A. thaliana
  misc_feature: MA Experiment 20001768 PARAMETER Experiment Name: At_Far-red-enriched-adult_P Parameter: Plant Line Value: Columbia
  misc_feature: MA Experiment 20001768 PARAMETER Experiment Name: At_Far-red-enriched-adult_P Parameter: Timepoint (hr) Value: 1
  misc_feature: MA Experiment 20001768 PARAMETER Experiment Name: At_Far-red-enriched-adult_P Parameter: Tissue Value: Aerial
  misc_feature: MA Experiment ID: 20001772 Result: Up-regulated in Transcription
  misc_feature: MA Experiment 20001772 PARAMETER Experiment Name: At_Far-red-enriched-adult_P Parameter: Age (day) Value: 29
  misc_feature: MA Experiment 20001772 PARAMETER Experiment Name: At_Far-red-enriched-adult_P Parameter: Light Value: Far-red enriched vs. White
  misc_feature: MA Experiment 20001772 PARAMETER Experiment Name: At_Far-red-enriched-adult_P Parameter: Organism Value: A. thaliana
  misc_feature: MA Experiment 20001772 PARAMETER Experiment Name: At_Far-red-enriched-adult_P Parameter: Plant Line Value: Columbia
  misc_feature: MA Experiment 20001772 PARAMETER Experiment Name: At_Far-red-enriched-adult_P Parameter: Timepoint (hr) Value: 24
  misc_feature: MA Experiment 20001772 PARAMETER Experiment Name: At_Far-red-enriched-adult_P Parameter: Tissue Value: Aerial
  misc_feature: MA Experiment ID: 20001773 Result: Up-regulated in Transcription
  misc_feature: MA Experiment 20001773 PARAMETER Experiment Name: At_Far-red-enriched-adult_P Parameter: Age (day) Value: 30
  misc_feature: MA Experiment 20001773 PARAMETER Experiment Name: At_Far-red-enriched-adult_P Parameter: Light Value: Far-red enriched vs. White
  misc_feature: MA Experiment 20001773 PARAMETER Experiment Name: At_Far-red-enriched-adult_P Parameter: Organism Value: A. thaliana
  misc_feature: MA Experiment 20001773 PARAMETER Experiment Name: At_Far-red-enriched-adult_P Parameter: Plant Line Value: Columbia
  misc_feature: MA Experiment 20001773 PARAMETER Experiment Name: At_Far-red-enriched-adult_P Parameter: Timepoint (hr) Value: 48
  misc_feature: MA Experiment 20001773 PARAMETER Experiment Name: At_Far-red-enriched-adult_P Parameter: Tissue Value: Aerial
atcaaagaaaacaaaaagccaagaatcaaagaatcaggaaagcaaacacaacacaactaacaatggatttaggaaggtttccaataatctcaatcctcgaagacatgcttgaagtccccgaagaccacaacaacgagaagacccgcaacaacccttcacgagtttacatgcgagacgctaaggcaatggctgctacacctgctgacgtcatcgagcaccctaacgcatatgcattcgtcgtggacatgcctggaatcaaaggagatgagatcaaggttcaggtcgagaacgacaatgtgcttgtggtgagtggagagaggcagagagagaacaaagaaaacgaaggtgtgaagtatgtgaggatggagagaagaatgggtaagttcatgaggaagtttcagttgcctgaaaatgcagatttggacaagatctctgctgtttgtcatgacggtgtgttgaaggttactgttcagaaacttcctcctccggaaccaaagaaaccaaagacaattcaagttcaagttgcttgagtttgttttgtgattgtgtgttggatttatctattttgttttgatttatggatttgatgaatgtaatcggaatgcgtgagggatatggtgttttgttctaagatgaaataaaagtttgttctgtttc

SEQ ID NO: 104621 - protein, 175 aa, Arabidopsis thaliana
  peptide (1)..(175): Ceres Seq. ID no. 13615386
  misc_feature (21)..(175): Homolog of NCBI NO: 15239846 NR Description: class II heat shock protein [Arabidopsis >gi|232274|sp|P29830|HS21_ARATH 17.6 kDa class II heat shock
  misc_feature (21)..(157): Homolog of NCBI NO: 26452718 NR Description: putative heat shock protein 17.6-II [Arabidopsis
  misc_feature (19)..(175): Homolog of NCBI NO: 15239849 NR Description: heat shock protein 17.6A [Arabidopsis thaliana]
  misc_feature (19)..(175): Homolog of NCBI NO: 2129610 NR Description: heat shock protein 17.7 - Arabidopsis thaliana
  misc_feature (23)..(175): Homolog of NCBI NO: 1170365 NR Description: 17.9 KD CLASS II HEAT SHOCK PROTEIN
  misc_feature (27)..(175): Homolog of NCBI NO: 7441328 NR Description: heat shock protein 17.6 - tomato
  misc_feature (27)..(175): Homolog of NCBI NO: 7441320 NR Description: heat shock protein, 17.9K - parsley
  misc_feature (27)..(175): Homolog of NCBI NO: 3336894 NR Description: Hsp20.2 protein [Lycopersicon peruvianum]
  misc_feature (21)..(175): Homolog of NCBI NO: 71498 NR Description: heat shock protein 17.7 - garden pea
  misc_feature (21)..(175): Homolog of NCBI NO: 123550 NR Description: 17.1 KD CLASS II HEAT SHOCK PROTEIN
QRKQKAKNQRIRKANTTQLTMDLGRFPIISILEDMLEVPEDHNNEKTRNNPSRVYMRDAKAMAATPADVIEHPNAYAFVVDMPGIKGDEIKVQVENDNVLVVSGERQRENKENEGVKYVRMERRMGKFMRKFQLPENADLDKISAVCHDGVLKVTVQKLPPPEPKKPKTIQVQVA

SEQ ID NO: 104622 - protein, 155 aa, Arabidopsis thaliana; identical to SEQ ID NO: 26255
  peptide (1)..(155): Ceres Seq. ID no. 13615387
  misc_feature (1)..(155): Homolog of NCBI NO: 15239846 NR Description: class II heat shock protein [Arabidopsis >gi|232274|sp|P29830|HS21_ARATH 17.6 kDa class II heat shock
  misc_feature (1)..(137): Homolog of NCBI NO: 26452718 NR Description: putative heat shock protein 17.6-II [Arabidopsis
  misc_feature (1)..(155): Homolog of NCBI NO: 15239849 NR Description: heat shock protein 17.6A [Arabidopsis thaliana]
  misc_feature (1)..(155): Homolog of NCBI NO: 2129610 NR Description: heat shock protein 17.7 - Arabidopsis thaliana
  misc_feature (3)..(155): Homolog of NCBI NO: 1170365 NR Description: 17.9 KD CLASS II HEAT SHOCK PROTEIN
  misc_feature (7)..(155): Homolog of NCBI NO: 7441328 NR Description: heat shock protein 17.6 - tomato
  misc_feature (7)..(155): Homolog of NCBI NO: 7441320 NR Description: heat shock protein, 17.9K - parsley
  misc_feature (7)..(155): Homolog of NCBI NO: 3336894 NR Description: Hsp20.2 protein [Lycopersicon peruvianum]
  misc_feature (1)..(155): Homolog of NCBI NO: 71498 NR Description: heat shock protein 17.7 - garden pea
  misc_feature (1)..(155): Homolog of NCBI NO: 123550 NR Description: 17.1 KD CLASS II HEAT SHOCK PROTEIN

SEQ ID NO: 104623 - protein, 141 aa, Arabidopsis thaliana; identical to SEQ ID NO: 26256
  peptide (1)..(141): Ceres Seq. ID no. 13615388
  misc_feature (1)..(141): Homolog of NCBI NO: 15239846 NR Description: class II heat shock protein [Arabidopsis >gi|232274|sp|P29830|HS21_ARATH 17.6 kDa class II heat shock
  misc_feature (1)..(123): Homolog of NCBI NO: 26452718 NR Description: putative heat shock protein 17.6-II [Arabidopsis
  misc_feature (1)..(141): Homolog of NCBI NO: 15239849 NR Description: heat shock protein 17.6A [Arabidopsis thaliana]
  misc_feature (1)..(141): Homolog of NCBI NO: 2129610 NR Description: heat shock protein 17.7 - Arabidopsis thaliana
  misc_feature (1)..(141): Homolog of NCBI NO: 1170365 NR Description: 17.9 KD CLASS II HEAT SHOCK PROTEIN
  misc_feature (1)..(141): Homolog of NCBI NO: 7441328 NR Description: heat shock protein 17.6 - tomato
  misc_feature (1)..(141): Homolog of NCBI NO: 7441320 NR Description: heat shock protein, 17.9K - parsley
  misc_feature (1)..(141): Homolog of NCBI NO: 3336894 NR Description: Hsp20.2 protein [Lycopersicon peruvianum]
  misc_feature (1)..(141): Homolog of NCBI NO: 71498 NR Description: heat shock protein 17.7 - garden pea
  misc_feature (1)..(141): Homolog of NCBI NO: 123550 NR Description: 17.1 KD CLASS II HEAT SHOCK PROTEIN

SEQ ID NO: 104624 - DNA, 668 bp, Arabidopsis thaliana
  misc_feature (1)..(668): Ceres Seq. ID no. 13615389
  misc_feature: MA Experiment ID: 20000171 Result: Up-regulated in Transcription
  misc_feature: MA Experiment 20000171 PARAMETER Experiment Name: At_42deg_Heat_P Parameter: Age (day) Value: 14
  misc_feature: MA Experiment 20000171 PARAMETER Experiment Name: At_42deg_Heat_P Parameter: Organism Value: A. thaliana
  misc_feature: MA Experiment 20000171 PARAMETER Experiment Name: At_42deg_Heat_P Parameter: Plant Line Value: WS
  misc_feature: MA Experiment 20000171 PARAMETER Experiment Name: At_42deg_Heat_P Parameter: Temperature (deg C) Value: 42 vs. 22
  misc_feature: MA Experiment 20000171 PARAMETER Experiment Name: At_42deg_Heat_P Parameter: Timepoint (hr) Value: 1
  misc_feature: MA Experiment 20000171 PARAMETER Experiment Name: At_42deg_Heat_P Parameter: Tissue Value: Aerial
  misc_feature: MA Experiment ID: 20000173 Result: Up-regulated in Transcription
  misc_feature: MA Experiment 20000173 PARAMETER Experiment Name: At_42deg_Heat_P Parameter: Age (day) Value: 14
  misc_feature: MA Experiment 20000173 PARAMETER Experiment Name: At_42deg_Heat_P Parameter: Organism Value: A. thaliana
  misc_feature: MA Experiment 20000173 PARAMETER Experiment Name: At_42deg_Heat_P Parameter: Plant Line Value: WS
  misc_feature: MA Experiment 20000173 PARAMETER Experiment Name: At_42deg_Heat_P Parameter: Temperature (deg C) Value: 42 vs. 22
  misc_feature: MA Experiment 20000173 PARAMETER Experiment Name: At_42deg_Heat_P Parameter: Timepoint (hr) Value: 6
  misc_feature: MA Experiment 20000173 PARAMETER Experiment Name: At_42deg_Heat_P Parameter: Tissue Value: Aerial
  misc_feature: MA Experiment ID: 20000182 Result: Up-regulated in Transcription
  misc_feature: MA Experiment 20000182 PARAMETER Experiment Name: At_2mM_SA_P Parameter: Age (day) Value: 14
  misc_feature: MA Experiment 20000182 PARAMETER Experiment Name: At_2mM_SA_P Parameter: Organism Value: A. thaliana
  misc_feature: MA Experiment 20000182 PARAMETER Experiment Name: At_2mM_SA_P Parameter: Plant Line Value: WS
  misc_feature: MA Experiment 20000182 PARAMETER Experiment Name: At_2mM_SA_P Parameter: Timepoint (hr) Value: 6
  misc_feature: MA Experiment 20000182 PARAMETER Experiment Name: At_2mM_SA_P Parameter: Tissue Value: Aerial
  misc_feature: MA Experiment 20000182 PARAMETER Experiment Name: At_2mM_SA_P Parameter: Treatment Value: 2mM SA vs. No Treatment
  misc_feature: MA Experiment ID: 20000437 Result: Up-regulated in Transcription
  misc_feature: MA Experiment 20000437 PARAMETER Experiment Name: At_Drought_P Parameter: Age (day) Value: 8
  misc_feature: MA Experiment 20000437 PARAMETER Experiment Name: At_Drought_P Parameter: Organism Value: A. thaliana
  misc_feature: MA Experiment 20000437 PARAMETER Experiment Name: At_Drought_P Parameter: Plant Line Value: WS
  misc_feature: MA Experiment 20000437 PARAMETER Experiment Name: At_Drought_P Parameter: Timepoint (hr) Value: 24
  misc_feature: MA Experiment 20000437 PARAMETER Experiment Name: At_Drought_P Parameter: Tissue Value: Whole Plant
  misc_feature: MA Experiment 20000437 PARAMETER Experiment Name: At_Drought_P Parameter: Treatment Value: Drought vs. No Drought
  misc_feature: MA Experiment ID: 20000443 Result: Up-regulated in Transcription
  misc_feature: MA Experiment 20000443 PARAMETER Experiment Name: At_1uM_BR-BRZ__P Parameter: Tissue Value: Shoot Apices
  misc_feature: MA Experiment 20000443 PARAMETER Experiment Name: At_1uM_BR-BRZ__P Parameter: Treatment Value: 1uM BRZ vs. No Treatment
  misc_feature: MA Experiment ID: 20000453 Result: Up-regulated in Transcription
  misc_feature: MA Experiment 20000453 PARAMETER Experiment Name: At_100uM_ABA_P Parameter: Age (day) Value: 15
  misc_feature: MA Experiment 20000453 PARAMETER Experiment Name: At_100uM_ABA_P Parameter: Organism Value: A. thaliana
  misc_feature: MA Experiment 20000453 PARAMETER Experiment Name: At_100uM_ABA_P Parameter: Plant Line Value: WS
  misc_feature: MA Experiment 20000453 PARAMETER Experiment Name: At_100uM_ABA_P Parameter: Timepoint (hr) Value: 24
  misc_feature: MA Experiment 20000453 PARAMETER Experiment Name: At_100uM_ABA_P Parameter: Tissue Value: Aerial
  misc_feature: MA Experiment 20000453 PARAMETER Experiment Name: At_100uM_ABA_P Parameter: Treatment Value: 100uM ABA vs. No Treatment
  misc_feature: MA Experiment ID: 20000456 Result: Up-regulated in Transcription
  misc_feature: MA Experiment 20000456 PARAMETER Experiment Name: At_100uM_BA_P Parameter: Age (day) Value: 14
  misc_feature: MA Experiment 20000456 PARAMETER Experiment Name: At_100uM_BA_P Parameter: Organism Value: A. thaliana
  misc_feature: MA Experiment 20000456 PARAMETER Experiment Name: At_100uM_BA_P Parameter: Plant Line Value: WS
  misc_feature: MA Experiment 20000456 PARAMETER Experiment Name: At_100uM_BA_P Parameter: Timepoint (hr) Value: 6
  misc_feature: MA Experiment 20000456 PARAMETER Experiment Name: At_100uM_BA_P Parameter: Tissue Value: Aerial
  misc_feature: MA Experiment 20000456 PARAMETER Experiment Name: At_100uM_BA_P Parameter: Treatment Value: 100uM BA vs. No Treatment
  misc_feature: MA Experiment ID: 20000709 Result: Up-regulated in Transcription
  misc_feature: MA Experiment 20000709 PARAMETER Experiment Name: At_15mM_NH4NO3_L-to-H_P Parameter: Age (hr) Value: 14
  misc_feature: MA Experiment 20000709 PARAMETER Experiment Name: At_15mM_NH4NO3_L-to-H_P Parameter: Organism Value: A. thaliana
  misc_feature: MA Experiment 20000709 PARAMETER Experiment Name: At_15mM_NH4NO3_L-to-H_P Parameter: Plant Line Value: WS
  misc_feature: MA Experiment 20000709 PARAMETER Experiment Name: At_15mM_NH4NO3_L-to-H_P Parameter: Timepoint (hr) Value: 4
  misc_feature: MA Experiment 20000709 PARAMETER Experiment Name: At_15mM_NH4NO3_L-to-H_P Parameter: Tissue Value: Aerial
  misc_feature: MA Experiment 20000709 PARAMETER Experiment Name: At_15mM_NH4NO3_L-to-H_P Parameter: Treatment Value: 15mM NH4NO3 vs. 30mM Mannitol
  misc_feature: MA Experiment ID: 20001555 Result: Up-regulated in Transcription
  misc_feature: MA Experiment 20001555 PARAMETER Experiment Name: At_Drought_Soil_Dry_P Parameter: Age (day) Value: 24
  misc_feature: MA Experiment 20001555 PARAMETER Experiment Name: At_Drought_Soil_Dry_P Parameter: Organism Value: A. thaliana
  misc_feature: MA Experiment 20001555 PARAMETER Experiment Name: At_Drought_Soil_Dry_P Parameter: Plant Line Value: WS
  misc_feature: MA Experiment 20001555 PARAMETER Experiment Name: At_Drought_Soil_Dry_P Parameter: Post Timepoint (hr) Value: None
  misc_feature: MA Experiment 20001555 PARAMETER Experiment Name: At_Drought_Soil_Dry_P Parameter: Post-Treatment Value: None
  misc_feature: MA Experiment 20001555 PARAMETER Experiment Name: At_Drought_Soil_Dry_P Parameter: Timepoint (day) Value: 10
  misc_feature: MA Experiment 20001555 PARAMETER Experiment Name: At_Drought_Soil_Dry_P Parameter: Treatment Value: Drought vs. No Drought
  misc_feature: MA Experiment ID: 20001556 Result: Up-regulated in Transcription
  misc_feature: MA Experiment 20001556 PARAMETER Experiment Name: At_Drought_Soil_Dry_P Parameter: Age (day) Value: 26
  misc_feature: MA Experiment 20001556 PARAMETER Experiment Name: At_Drought_Soil_Dry_P Parameter: Organism Value: A. thaliana
  misc_feature: MA Experiment 20001556 PARAMETER Experiment Name: At_Drought_Soil_Dry_P Parameter: Plant Line Value: WS
  misc_feature: MA Experiment 20001556 PARAMETER Experiment Name: At_Drought_Soil_Dry_P Parameter: Post Timepoint (hr) Value: None
  misc_feature: MA Experiment 20001556 PARAMETER Experiment Name: At_Drought_Soil_Dry_P Parameter: Post-Treatment Value: None
  misc_feature: MA Experiment 20001556 PARAMETER Experiment Name: At_Drought_Soil_Dry_P Parameter: Timepoint (day) Value: 12
  misc_feature: MA Experiment 20001556 PARAMETER Experiment Name: At_Drought_Soil_Dry_P Parameter: Treatment Value: Drought vs. No Drought
  misc_feature: MA Experiment ID: 20001557 Result: Up-regulated in Transcription
  misc_feature: MA Experiment 20001557 PARAMETER Experiment Name: At_Drought_Soil_Dry_P Parameter: Age (day) Value: 27
  misc_feature: MA Experiment 20001557 PARAMETER Experiment Name: At_Drought_Soil_Dry_P Parameter: Organism Value: A. thaliana
  misc_feature: MA Experiment 20001557 PARAMETER Experiment Name: At_Drought_Soil_Dry_P Parameter: Plant Line Value: WS
  misc_feature: MA Experiment 20001557 PARAMETER Experiment Name: At_Drought_Soil_Dry_P Parameter: Post Timepoint (hr) Value: 3
  misc_feature: MA Experiment 20001557 PARAMETER Experiment Name: At_Drought_Soil_Dry_P Parameter: Post-Treatment Value: Re-Water vs. No Drought
  misc_feature: MA Experiment 20001557 PARAMETER Experiment Name: At_Drought_Soil_Dry_P Parameter: Timepoint (day) Value: 13
  misc_feature: MA Experiment 20001557 PARAMETER Experiment Name: At_Drought_Soil_Dry_P Parameter: Treatment Value: Drought vs. No Drought
  misc_feature: MA Experiment ID: 20001558 Result: Up-regulated in Transcription
  misc_feature: MA Experiment 20001558 PARAMETER Experiment Name: At_Drought_Soil_Dry_P Parameter: Age (day) Value: 27
  misc_feature: MA Experiment 20001558 PARAMETER Experiment Name: At_Drought_Soil_Dry_P Parameter: Organism Value: A. thaliana
  misc_feature: MA Experiment 20001558 PARAMETER Experiment Name: At_Drought_Soil_Dry_P Parameter: Plant Line Value: WS
  misc_feature: MA Experiment 20001558 PARAMETER Experiment Name: At_Drought_Soil_Dry_P Parameter: Post Timepoint (hr) Value: 6
  misc_feature: MA Experiment 20001558 PARAMETER Experiment Name: At_Drought_Soil_Dry_P Parameter: Post-Treatment Value: Re-Water vs. No Drought
  misc_feature: MA Experiment 20001558 PARAMETER Experiment Name: At_Drought_Soil_Dry_P Parameter: Timepoint (day) Value: 13
  misc_feature: MA Experiment 20001558 PARAMETER Experiment Name: At_Drought_Soil_Dry_P Parameter: Treatment Value: Drought vs. No Drought
  misc_feature: MA Experiment ID: 20001560 Result: Up-regulated in Transcription
  misc_feature: MA Experiment 20001560 PARAMETER Experiment Name: At_Drought_Soil_Dry_P Parameter: Age (day) Value: 28
  misc_feature: MA Experiment 20001560 PARAMETER Experiment Name: At_Drought_Soil_Dry_P Parameter: Organism Value: A. thaliana
  misc_feature: MA Experiment 20001560 PARAMETER Experiment Name: At_Drought_Soil_Dry_P Parameter: Plant Line Value: WS
  misc_feature: MA Experiment 20001560 PARAMETER Experiment Name: At_Drought_Soil_Dry_P Parameter: Post Timepoint (hr) Value: None
  misc_feature: MA Experiment 20001560 PARAMETER Experiment Name: At_Drought_Soil_Dry_P Parameter: Post-Treatment Value: None
  misc_feature: MA Experiment 20001560 PARAMETER Experiment Name: At_Drought_Soil_Dry_P Parameter: Timepoint (day) Value: 14
  misc_feature: MA Experiment 20001560 PARAMETER Experiment Name: At_Drought_Soil_Dry_P Parameter: Treatment Value: Drought vs. No Drought
  misc_feature: MA Experiment ID: 20001773 Result: Up-regulated in Transcription
  misc_feature: MA Experiment 20001773 PARAMETER Experiment Name: At_Far-red-enriched-adult_P Parameter: Age (day) Value: 30
  misc_feature: MA Experiment 20001773 PARAMETER Experiment Name: At_Far-red-enriched-adult_P Parameter: Light Value: Far-red enriched vs. White
  misc_feature: MA Experiment 20001773 PARAMETER Experiment Name: At_Far-red-enriched-adult_P Parameter: Organism Value: A. thaliana
  misc_feature: MA Experiment 20001773 PARAMETER Experiment Name: At_Far-red-enriched-adult_P Parameter: Plant Line Value: Columbia
  misc_feature: MA Experiment 20001773 PARAMETER Experiment Name: At_Far-red-enriched-adult_P Parameter: Timepoint (hr) Value: 48
  misc_feature: MA Experiment 20001773 PARAMETER Experiment Name: At_Far-red-enriched-adult_P Parameter: Tissue Value: Aerial
  misc_feature: MA Experiment ID: 20001905 Result: Up-regulated in Transcription
  misc_feature: MA Experiment 20001905 PARAMETER Experiment Name: At_Drought_Reproduction_P Parameter: Age (day) Value: 40
  misc_feature: MA Experiment 20001905 PARAMETER Experiment Name: At_Drought_Reproduction_P Parameter: Organism Value: A. thaliana
  misc_feature: MA Experiment 20001905 PARAMETER Experiment Name: At_Drought_Reproduction_P Parameter: Plant Line Value: WS
  misc_feature: MA Experiment 20001905 PARAMETER Experiment Name: At_Drought_Reproduction_P Parameter: Timepoint (day) Value: 10
  misc_feature: MA Experiment 20001905 PARAMETER Experiment Name: At_Drought_Reproduction_P Parameter: Tissue Value: Rosettes
  misc_feature: MA Experiment 20001905 PARAMETER Experiment Name: At_Drought_Reproduction_P Parameter: Treatment Value: Drought vs. No Drought
  misc_feature: MA Experiment ID: 20001910 Result: Up-regulated in Transcription
  misc_feature: MA Experiment 20001910 PARAMETER Experiment Name: At_Drought_Reproduction_P Parameter: Age (day) Value: 37
  misc_feature: MA Experiment 20001910 PARAMETER Experiment Name: At_Drought_Reproduction_P Parameter: Organism Value: A. thaliana
  misc_feature: MA Experiment 20001910 PARAMETER Experiment Name: At_Drought_Reproduction_P Parameter: Plant Line Value: WS
  misc_feature: MA Experiment 20001910 PARAMETER Experiment Name: At_Drought_Reproduction_P Parameter: Timepoint (day) Value: 7
  misc_feature: MA Experiment 20001910 PARAMETER Experiment Name: At_Drought_Reproduction_P Parameter: Tissue Value: Flowers
  misc_feature: MA Experiment 20001910 PARAMETER Experiment Name: At_Drought_Reproduction_P Parameter: Treatment Value: Drought vs. No Drought
  misc_feature: MA Experiment ID: 20001911 Result: Up-regulated in Transcription
  misc_feature: MA Experiment 20001911 PARAMETER Experiment Name: At_Drought_Reproduction_P Parameter: Age (day) Value: 40
  misc_feature: MA Experiment 20001911 PARAMETER Experiment Name: At_Drought_Reproduction_P Parameter: Organism Value: A. thaliana
  misc_feature: MA Experiment 20001911 PARAMETER Experiment Name: At_Drought_Reproduction_P Parameter: Plant Line Value: WS
  misc_feature: MA Experiment 20001911 PARAMETER Experiment Name: At_Drought_Reproduction_P Parameter: Timepoint (day) Value: 10
  misc_feature: MA Experiment 20001911 PARAMETER Experiment Name: At_Drought_Reproduction_P Parameter: Tissue Value: Flowers
  misc_feature: MA Experiment 20001911 PARAMETER Experiment Name: At_Drought_Reproduction_P Parameter: Treatment Value: Drought vs. No Drought
aatcaaaccaaagaaaaagccaagaagcaagaaagttaacacaacagctaagaatggatttggagtttggaaggtttccaatattttcaatcctcgaagacatgcttgaagcccctgaagaacaaaccgagaagactcgtaacaacccttcaagagcttacatgcgagacgcaaaggcaatggctgctacaccagctgacgttatcgagcacccggatgcgtacgttttcgccgtggacatgcctggaatcaaaggagatgagattcaggtccagatagagaacgagaacgtgcttgtggtgagtggcaaaagacagagggacaacaaggagaatgaaggtgtgaagtttgtgaggatggagaggaggatggggaagtttatgaggaagtttcagttacctgataatgcagatttggagaagatctctgcggcttgtaatgacggtgtgttgaaagtgactattccgaaacttcctcctcctgagccaaagaaaccaaagactatacaagttcaagtcgcttgagtttgtttgtgatcgtgtttttgtgttttaatgaatgtaatcgataagcaactacctcttggtgttcgttgtaaaatgaaataaaaatagttttctctgttcatatttgtctttgtgttcaatcttcaaatcaatgaagttttt

SEQ ID NO: 104625 - protein, 173 aa, Arabidopsis thaliana
  peptide (1)..(173): Ceres Seq. ID no. 13615390
  misc_feature (18)..(173): Homolog of NCBI NO: 15239849 NR Description: heat shock protein 17.6A [Arabidopsis thaliana]
  misc_feature (18)..(173): Homolog of NCBI NO: 2129610 NR Description: heat shock protein 17.7 - Arabidopsis thaliana
  misc_feature (20)..(173): Homolog of NCBI NO: 15239846 NR Description: class II heat shock protein [Arabidopsis >gi|232274|sp|P29830|HS21_ARATH 17.6 kDa class II heat shock
  misc_feature (20)..(154): Homolog of NCBI NO: 26452718 NR Description: putative heat shock protein 17.6-II [Arabidopsis
  misc_feature (16)..(173): Homolog of NCBI NO: 7441328 NR Description: heat shock protein 17.6 - tomato
  misc_feature (18)..(173): Homolog of NCBI NO: 1170365 NR Description: 17.9 KD CLASS II HEAT SHOCK PROTEIN
  misc_feature (18)..(173): Homolog of NCBI NO: 71498 NR Description: heat shock protein 17.7 - garden pea
  misc_feature (18)..(173): Homolog of NCBI NO: 123550 NR Description: 17.1 KD CLASS II HEAT SHOCK PROTEIN
  misc_feature (16)..(173): Homolog of NCBI NO: 3336894 NR Description: Hsp20.2 protein [Lycopersicon peruvianum]
  misc_feature (26)..(173): Homolog of NCBI NO: 5257560 NR Description: cytosolic class II low molecular weight heat
SNQRKSQEARKLTQQLRMDLEFGRFPIFSILEDMLEAPEEQTEKTRNNPSRAYMRDAKAMAATPADVIEHPDAYVFAVDMPGIKGDEIQVQIENENVLVVSGKRQRDNKENEGVKFVRMERRMGKFMRKFQLPDNADLEKISAACNDGVLKVTIPKLPPPEPKKPKTIQVQVA

SEQ ID NO: 104626 - protein, 156 aa, Arabidopsis thaliana; identical to SEQ ID NO: 42333
  peptide (1)..(156): Ceres Seq. ID no. 13615391
  misc_feature (1)..(156): Homolog of NCBI NO: 15239849 NR Description: heat shock protein 17.6A [Arabidopsis thaliana]
  misc_feature (1)..(156): Homolog of NCBI NO: 2129610 NR Description: heat shock protein 17.7 - Arabidopsis thaliana
  misc_feature (3)..(156): Homolog of NCBI NO: 15239846 NR Description: class II heat shock protein [Arabidopsis >gi|232274|sp|P29830|HS21_ARATH 17.6 kDa class II heat shock
  misc_feature (3)..(137): Homolog of NCBI NO: 26452718 NR Description: putative heat shock protein 17.6-II [Arabidopsis
  misc_feature (1)..(156): Homolog of NCBI NO: 7441328 NR Description: heat shock protein 17.6 - tomato
  misc_feature (1)..(156): Homolog of NCBI NO: 1170365 NR Description: 17.9 KD CLASS II HEAT SHOCK PROTEIN
  misc_feature (1)..(156): Homolog of NCBI NO: 71498 NR Description: heat shock protein 17.7 - garden pea
  misc_feature (1)..(156): Homolog of NCBI NO: 123550 NR Description: 17.1 KD CLASS II HEAT SHOCK PROTEIN
  misc_feature (1)..(156): Homolog of NCBI NO: 3336894 NR Description: Hsp20.2 protein [Lycopersicon peruvianum]
  misc_feature (9)..(156): Homolog of NCBI NO: 5257560 NR Description: cytosolic class II low molecular weight heat

SEQ ID NO: 104627 - protein, 140 aa, Arabidopsis thaliana; identical to SEQ ID NO: 42334
  peptide (1)..(140): Ceres Seq. ID no. 13615392
  misc_feature (1)..(140): Homolog of NCBI NO: 15239849 NR Description: heat shock protein 17.6A [Arabidopsis thaliana]
  misc_feature (1)..(140): Homolog of NCBI NO: 2129610 NR Description: heat shock protein 17.7 - Arabidopsis thaliana
  misc_feature (1)..(140): Homolog of NCBI NO: 15239846 NR Description: class II heat shock protein [Arabidopsis >gi|232274|sp|P29830|HS21_ARATH 17.6 kDa class II heat shock
  misc_feature (1)..(121): Homolog of NCBI NO: 26452718 NR Description: putative heat shock protein 17.6-II [Arabidopsis
  misc_feature (1)..(140): Homolog of NCBI NO: 7441328 NR Description: heat shock protein 17.6 - tomato
  misc_feature (1)..(140): Homolog of NCBI NO: 1170365 NR Description: 17.9 KD CLASS II HEAT SHOCK PROTEIN
  misc_feature (1)..(140): Homolog of NCBI NO: 71498 NR Description: heat shock protein 17.7 - garden pea
  misc_feature (1)..(140): Homolog of NCBI NO: 123550 NR Description: 17.1 KD CLASS II HEAT SHOCK PROTEIN
  misc_feature (1)..(140): Homolog of NCBI NO: 3336894 NR Description: Hsp20.2 protein [Lycopersicon peruvianum]
  misc_feature (1)..(140): Homolog of NCBI NO: 5257560 NR Description: cytosolic class II low molecular weight heat

SEQ ID NO: 104628 - DNA, 1316 bp, Arabidopsis thaliana
  misc_feature (1)..(1316): Ceres Seq. ID no. 13615434
  misc_feature: MA Experiment ID: 20000307 Result: Down-regulated in Transcription
  misc_feature: MA Experiment 20000307 PARAMETER Experiment Name: At_Germinating_Seeds_Sub_P Parameter: Age (hr) Value: 24 vs. 0
  misc_feature: MA Experiment 20000307 PARAMETER Experiment Name: At_Germinating_Seeds_Sub_P Parameter: Organism Value: A. thaliana
  misc_feature: MA Experiment 20000307 PARAMETER Experiment Name: At_Germinating_Seeds_Sub_P Parameter: Plant Line Value: WS
  misc_feature: MA Experiment 20000307 PARAMETER Experiment Name: At_Germinating_Seeds_Sub_P Parameter: Tissue Value: Germinating Seeds
  misc_feature: MA Experiment ID: 20000315 Result: Down-regulated in Transcription
  misc_feature: MA Experiment 20000315 PARAMETER Experiment Name: At_14day_Shoots-Roots_Sub_P Parameter: Age (day) Value: 14
  misc_feature: MA Experiment 20000315 PARAMETER Experiment Name: At_14day_Shoots-Roots_Sub_P Parameter: Organism Value: A. thaliana
  misc_feature: MA Experiment 20000315 PARAMETER Experiment Name: At_14day_Shoots-Roots_Sub_P Parameter: Plant Line Value: WS
  misc_feature: MA Experiment 20000315 PARAMETER Experiment Name: At_14day_Shoots-Roots_Sub_P Parameter: Tissue Value: Shoots vs. Whole Plant
  misc_feature: MA Experiment ID: 20000348 Result: Up-regulated in Transcription
  misc_feature: MA Experiment 20000348 PARAMETER Experiment Name: At_100uM_ABA_Sub_P Parameter: Age (day) Value: 14
  misc_feature: MA Experiment 20000348 PARAMETER Experiment Name: At_100uM_ABA_Sub_P Parameter: Organism Value: A. thaliana
  misc_feature: MA Experiment 20000348 PARAMETER Experiment Name: At_100uM_ABA_Sub_P Parameter: Plant Line Value: WS
  misc_feature: MA Experiment 20000348 PARAMETER Experiment Name: At_100uM_ABA_Sub_P Parameter: Timepoint (hr) Value: 1
  misc_feature: MA Experiment 20000348 PARAMETER Experiment Name: At_100uM_ABA_Sub_P Parameter: Tissue Value: Aerial
  misc_feature: MA Experiment 20000348 PARAMETER Experiment Name: At_100uM_ABA_Sub_P Parameter: Treatment Value: 100uM ABA vs. No Treatment
  misc_feature: MA Experiment ID: 20000440 Result: Up-regulated in Transcription
  misc_feature: MA Experiment 20000440 PARAMETER Experiment Name: At_Closed-Flower__Sub_P Parameter: Tissue Value: Closed Flower vs. Whole Plant
aataaaaaacaaaacgctctccagaatttcgaaacttctaagatattttgttttctctcttaacgatggcgaagagtgttttggttaccggcggcgctggctatatcggaagtcatactgttcttcaactgcttgaaggtggttactccgccgtcgttgttgacaattacgacaattcctctgctgcttcgcttcagcgcgtgaagaaactcgccggcgaaaacggaaaccgcctctccttccaccaggtggatctccgagacaggcctgcgcttgagaagatattctcagaaacaaagtttgatgcagtgatacactttgctggacttaaagcagtaggtgagagtgtggagaagcctttgctctattataataataacattgttggcactgttactcttttggaggttatggctcaatacggctgcaaaaatcttgtattttcatcatcagctactgtctatggctggcctaaggaggttccttgcactgaggagtcaccaatttctgccactaacccatatggccgtacaaagctttttatcgaagagatttgccgggatgtacatcgttctgactcggaatggaagatcatattgcttagatacttcaaccctgttggtgcacatcctagtggttacattggtgaagatcctcttggagttcccaacaatctcatgccttatgtccaacaagttgcagttggccggagacctcaccttactgtctttggaaccgactacaagacaaaggatggtacaggggttagagattacattcatgtcatggatttagcagatggacacatagctgctctgcgtaagctagatgatctcaaaatcagttgtgaggtatacaatcttggaacgggtaatggaacatcggtcctagaaatggtcgctgcctttgaaaaagcatccggaaagaaaatccctttggtgatggctggacgacgtcctggagacgctgaagttgtttacgcctcaacggaaaaagcagagcgcgaactaaattggaaggctaagaatgggatagaggagatgtgtagggatctatggaattgggcaagcaataacccctacggctacaattcctcctccaatggctcctcttcataattctccttttttaatttttattttgccttttttgcttacttatattcatataaacaaacacataaaaaaaaagaagagaaaggctgacaagtacccaaactttagaagaaattgaggaaaattcttgtactatcaatttatcatagaaactatatttattaaatcgttagttttcaatcgttgggagttttttttctt

SEQ ID NO: 104629 - protein, 350 aa, Arabidopsis thaliana; identical to SEQ ID NO: 28659
  peptide (1)..(350): Ceres Seq. ID no. 13615435
  misc_feature (5)..(338): Pfam Name: NAD dependent epimerase/dehydratase family Pfam Description: NAD dependent epimerase/dehydratase family
  misc_feature (1)..(350): Homolog of NCBI NO: 15236663 NR Description: UDP-glucose 4-epimerase (UDP-galactose
  misc_feature (1)..(350): Homolog of NCBI NO: 21536846 NR Description: UDPglucose 4-epimerase-like protein [Arabidopsis
  misc_feature (1)..(349): Homolog of NCBI NO: 12643850 NR Description: Probable UDP-glucose 4-epimerase At4g10960
  misc_feature (1)..(349): Homolog of NCBI NO: 15236988 NR Description: UDP-glucose 4-epimerase (UDP-galactose (Galactowaldenase), putative [Arabidopsis thaliana]
  misc_feature (1)..(346): Homolog of NCBI NO: 21553659 NR Description: UDP-galactose 4-epimerase-like protein
  misc_feature (1)..(348): Homolog of NCBI NO: 15217653 NR Description: UDP-glucose 4-epimerase (UDP-galactose
  misc_feature (2)..(349): Homolog of NCBI NO: 11386775 NR Description: UDP-glucose 4-epimerase GEPI48 (Galactowaldenase)
  misc_feature (3)..(348): Homolog of NCBI NO: 32130594 NR Description: UDP-glucose-4-epimerase [Zea mays]
  misc_feature (62)..(235): Homolog of NCBI NO: 6633809 NR Description: F1N19.2 [Arabidopsis thaliana]
  misc_feature (234)..(348): Homolog of NCBI NO: 6633809 NR Description: F1N19.2 [Arabidopsis thaliana]

SEQ ID NO: 104630 - protein, 235 aa, Arabidopsis thaliana; identical to SEQ ID NO: 28660
  peptide (1)..(235): Ceres Seq. ID no. 13615436
  misc_feature (1)..(223): Pfam Name: NAD dependent epimerase/dehydratase family Pfam Description: NAD dependent epimerase/dehydratase family
  misc_feature (1)..(235): Homolog of NCBI NO: 15236663 NR Description: UDP-glucose 4-epimerase (UDP-galactose
  misc_feature (1)..(235): Homolog of NCBI NO: 21536846 NR Description: UDPglucose 4-epimerase-like protein [Arabidopsis
  misc_feature (1)..(234): Homolog of NCBI NO: 12643850 NR Description: Probable UDP-glucose 4-epimerase At4g10960
  misc_feature (1)..(234): Homolog of NCBI NO: 15236988 NR Description: UDP-glucose 4-epimerase (UDP-galactose (Galactowaldenase), putative [Arabidopsis thaliana]
  misc_feature (1)..(231): Homolog of NCBI NO: 21553659 NR Description: UDP-galactose 4-epimerase-like protein
  misc_feature (1)..(233): Homolog of NCBI NO: 15217653 NR Description: UDP-glucose 4-epimerase (UDP-galactose
  misc_feature (1)..(234): Homolog of NCBI NO: 11386775 NR Description: UDP-glucose 4-epimerase GEPI48 (Galactowaldenase)
  misc_feature (1)..(233): Homolog of NCBI NO: 32130594 NR Description: UDP-glucose-4-epimerase [Zea mays]
  misc_feature (1)..(120): Homolog of NCBI NO: 6633809 NR Description: F1N19.2 [Arabidopsis thaliana]
  misc_feature (119)..(233): Homolog of NCBI NO: 6633809 NR Description: F1N19.2 [Arabidopsis thaliana]

SEQ ID NO: 104631 - DNA, 911 bp, Arabidopsis thaliana
  misc_feature (1)..(911): Ceres Seq. ID no. 13615441
  misc_feature: MA Experiment ID: 20000794 Result: Up-regulated in Transcription
  misc_feature: MA Experiment 20000794 PARAMETER Experiment Name: At_Petals_P Parameter: Age (day) Value: 23-25 days
  misc_feature: MA Experiment 20000794 PARAMETER Experiment Name: At_Petals_P Parameter: Plant Line Value: WS
  misc_feature: MA Experiment 20000794 PARAMETER Experiment Name: At_Petals_P Parameter: Tissue Value: Petals vs. Whole plant
aatcttcttttcaattcaatacttttttttctcaatctctcctctcaaatcaaacaactttgattgatcttcgcaatcgattccacatgaagcgcagtactaccgactctgatttggccggtgatgctcacaacgagacaaacaagaagatgaagagtacagaggaagaagaaatcggattctccaatttagacgagaatctagtgtacgaggtgttgaaacacgtcgacgcaaagaccttagctatgtcatcttgcgtgagcaagatctggcacaaaacggcacaagacgagcggctttgggagctgatctgtactcgtcactggactaacatcggctgcgggcagaaccagctcagatctgttgtgttggcgcttggtggcttccgaagactccactctctttacctctggcctctctctaaacccaatccgcgtgctaggttcggtaaggacgagcttaaactcactctttctcttctctcaattcgatactacgagaagatgagtttcactaagagacctcttccagaatccaaataattgactacaaattattagagtttggttttggagtttgtgtatttggagtttgttgattggtaagtcagatgtgatgttcaatgctggcaataaaatttgttggtatccataagccagactgttagcaacagttgtgttctgtaataatagagggtgatgagaatttttaattactgtaatcggagctgattaaaagtagatttaatatcaaatgtgattcgattttgttgtaatggttctgtcgtgaagttaagttggtccgtagttggacaatgattgtaacaaaatcgattcgtgatccagtttggtaagattaagaactgttagtgacgattctgttttattattcaatgaaaaacaatgttcacc

SEQ ID NO: 104632 - protein, 179 aa, Arabidopsis thaliana
  peptide (1)..(179): Ceres Seq. ID no. 13615442
  misc_feature (29)..(179): Homolog of NCBI NO: 15233744 NR Description: F-box protein family [Arabidopsis thaliana]
  misc_feature (29)..(179): Homolog of NCBI NO: 21593260 NR Description: unknown [Arabidopsis thaliana]
  misc_feature (54)..(173): Homolog of NCBI NO: 33411641 NR Description: GID2 [Oryza sativa (japonica cultivar-group)]
  misc_feature (45)..(168): Homolog of NCBI NO: 15238908 NR Description: F-box protein family [Arabidopsis thaliana] gene_id:MIF21.6~pir||T09884~similar to unknown protein
SSFQFNTFFSQSLLSNQTTLIDLRNRFHMKRSTTDSDLAGDAHNETNKKMKSTEEEEIGFSNLDENLVYEVLKHVDAKTLAMSSCVSKIWHKTAQDERLWELICTRHWTNIGCGQNQLRSVVLALGGFRRLHSLYLWPLSKPNPRARFGKDELKLTLSLLSIRYYEKMSFTKRPLPESK

SEQ ID NO: 104633 - protein, 151 aa, Arabidopsis thaliana; identical to SEQ ID NO: 24048
  peptide (1)..(151): Ceres Seq. ID no. 13615443
  misc_feature (1)..(151): Homolog of NCBI NO: 15233744 NR Description: F-box protein family [Arabidopsis thaliana]
  misc_feature (1)..(151): Homolog of NCBI NO: 21593260 NR Description: unknown [Arabidopsis thaliana]
  misc_feature (26)..(145): Homolog of NCBI NO: 33411641 NR Description: GID2 [Oryza sativa (japonica cultivar-group)]
  misc_feature (17)..(140): Homolog of NCBI NO: 15238908 NR Description: F-box protein family [Arabidopsis thaliana] gene_id:MIF21.6~pir||T09884~similar to unknown protein

SEQ ID NO: 104634 - protein, 130 aa, Arabidopsis thaliana; identical to SEQ ID NO: 24049
  peptide (1)..(130): Ceres Seq. ID no. 13615444
  misc_feature (1)..(130): Homolog of NCBI NO: 15233744 NR Description: F-box protein family [Arabidopsis thaliana]
  misc_feature (1)..(130): Homolog of NCBI NO: 21593260 NR Description: unknown [Arabidopsis thaliana]
  misc_feature (5)..(124): Homolog of NCBI NO: 33411641 NR Description: GID2 [Oryza sativa (japonica cultivar-group)]
  misc_feature (1)..(119): Homolog of NCBI NO: 15238908 NR Description: F-box protein family [Arabidopsis thaliana] gene_id:MIF21.6~pir||T09884~similar to unknown protein

SEQ ID NO: 104635 - DNA, 1489 bp, Arabidopsis thaliana
  misc_feature (1)..(1489): Ceres Seq. ID no. 13615449
  misc_feature: MA Experiment ID: 108572 Result: Down-regulated in Transcription
  misc_feature: MA Experiment 108572 PARAMETER Experiment Name: At_Drought_cDNA_P Parameter: Timepoint (hr) Value: 1
  misc_feature: MA Experiment 108572 PARAMETER Experiment Name: At_Drought_cDNA_P Parameter: Tissue Value: Aerial
  misc_feature: MA Experiment 108572 PARAMETER Experiment Name: At_Drought_cDNA_P Parameter: Treatment Value: Drought vs. No Drought
  misc_feature: MA Experiment ID: 108576 Result: Up-regulated in Transcription
  misc_feature: MA Experiment 108576 PARAMETER Experiment Name: At_42deg_Heat_cDNA_P Parameter: Temperature (deg C) Value: 42 vs. 22
  misc_feature: MA Experiment 108576 PARAMETER Experiment Name: At_42deg_Heat_cDNA_P Parameter: Timepoint (hr) Value: 1
  misc_feature: MA Experiment 108576 PARAMETER Experiment Name: At_42deg_Heat_cDNA_P Parameter: Tissue Value: Aerial
  misc_feature: MA Experiment ID: 108579 Result: Up-regulated in Transcription
  misc_feature: MA Experiment 108579 PARAMETER Experiment Name: At_4deg_Cold_cDNA_P Parameter: Temperature (deg C) Value: 4 vs. 22
  misc_feature: MA Experiment 108579 PARAMETER Experiment Name: At_4deg_Cold_cDNA_P Parameter: Timepoint (hr) Value: 6
  misc_feature: MA Experiment 108579 PARAMETER Experiment Name: At_4deg_Cold_cDNA_P Parameter: Tissue Value: Aerial
  misc_feature: MA Experiment ID: 20000093 Result: Up-regulated in Transcription
  misc_feature: MA Experiment 20000093 PARAMETER Experiment Name: At_42deg_Heat_cDNA_P Parameter: Temperature (deg C) Value: 42 vs. 22
  misc_feature: MA Experiment 20000093 PARAMETER Experiment Name: At_42deg_Heat_cDNA_P Parameter: Timepoint (hr) Value: 0.5
  misc_feature: MA Experiment 20000093 PARAMETER Experiment Name: At_42deg_Heat_cDNA_P Parameter: Tissue Value: Aerial
  misc_feature: MA Experiment ID: 20000112 Result: Up-regulated in Transcription
  misc_feature: MA Experiment 20000112 PARAMETER Experiment Name: At_42deg_Heat_cDNA_P Parameter: Temperature (deg C) Value: 42 vs. 22
  misc_feature: MA Experiment 20000112 PARAMETER Experiment Name: At_42deg_Heat_cDNA_P Parameter: Timepoint (hr) Value: 2
  misc_feature: MA Experiment 20000112 PARAMETER Experiment Name: At_42deg_Heat_cDNA_P Parameter: Tissue Value: Aerial
  misc_feature: MA Experiment ID: 20000171 Result: Up-regulated in Transcription
  misc_feature: MA Experiment 20000171 PARAMETER Experiment Name: At_42deg_Heat_P Parameter: Age (day) Value: 14
  misc_feature: MA Experiment 20000171 PARAMETER Experiment Name: At_42deg_Heat_P Parameter: Organism Value: A. thaliana
  misc_feature: MA Experiment 20000171 PARAMETER Experiment Name: At_42deg_Heat_P Parameter: Plant Line Value: WS
  misc_feature: MA Experiment 20000171 PARAMETER Experiment Name: At_42deg_Heat_P Parameter: Temperature (deg C) Value: 42 vs. 22
  misc_feature: MA Experiment 20000171 PARAMETER Experiment Name: At_42deg_Heat_P Parameter: Timepoint (hr) Value: 1
  misc_feature: MA Experiment 20000171 PARAMETER Experiment Name: At_42deg_Heat_P Parameter: Tissue Value: Aerial
  misc_feature: MA Experiment ID: 20000213 Result: Up-regulated in Transcription
  misc_feature: MA Experiment 20000213 PARAMETER Experiment Name: At_4deg_Cold_P Parameter: Timepoint (hr) Value: 2
  misc_feature: MA Experiment ID: 20000224 Result: Down-regulated in Transcription
  misc_feature: MA Experiment ID: 20000227 Result: Down-regulated in Transcription
  misc_feature: MA Experiment 20000227 PARAMETER Experiment Name: At_Root-Tips-vs-Tops_P Parameter: Tissue Value: Root Tips vs. Root Tops
  misc_feature: MA Experiment ID: 20000234 Result: Down-regulated in Transcription
  misc_feature: MA Experiment 20000234 PARAMETER Experiment Name: At_Siliques_P Parameter: Age (day) Value: 21
  misc_feature: MA Experiment 20000234 PARAMETER Experiment Name: At_Siliques_P Parameter: Organism Value: A. thaliana
  misc_feature: MA Experiment 20000234 PARAMETER Experiment Name: At_Siliques_P Parameter: Plant Line Value: WS
  misc_feature: MA Experiment 20000234 PARAMETER Experiment Name: At_Siliques_P Parameter: Tissue Value: Less Than 5mm Siliques vs. Whole Plant
  misc_feature: MA Experiment ID: 20000235 Result: Down-regulated in Transcription
  misc_feature: MA Experiment 20000235 PARAMETER Experiment Name: At_Siliques_P Parameter: Age (day) Value: 21
  misc_feature: MA Experiment 20000235 PARAMETER Experiment Name: At_Siliques_P Parameter: Organism Value: A. thaliana
  misc_feature: MA Experiment 20000235 PARAMETER Experiment Name: At_Siliques_P Parameter: Plant Line Value: WS
  misc_feature: MA Experiment 20000235 PARAMETER Experiment Name: At_Siliques_P Parameter: Tissue Value: 5-10mm Siliques vs. Whole Plant
  misc_feature: MA Experiment ID: 20000265 Result: Down-regulated in Transcription
  misc_feature: MA Experiment 20000265 PARAMETER Experiment Name: At_Open_Flower_P Parameter: Age (day) Value: 21
  misc_feature: MA Experiment 20000265 PARAMETER Experiment Name: At_Open_Flower_P Parameter: Plant Line Value: WS
  misc_feature: MA Experiment 20000265 PARAMETER Experiment Name: At_Open_Flower_P Parameter: Tissue Value: Closed Flower vs. Whole Plant
  misc_feature: MA Experiment ID: 20000496 Result: Up-regulated in Transcription
  misc_feature: MA Experiment 20000496 PARAMETER Experiment Name: At_Guard_Cells_P Parameter: Harvest Date Value: 7/19/2002
  misc_feature: MA Experiment 20000496 PARAMETER Experiment Name: At_Guard_Cells_P Parameter: Organism Value: Canola
  misc_feature: MA Experiment 20000496 PARAMETER Experiment Name: At_Guard_Cells_P Parameter: Tissue Value: Guard Cells vs. Leaves
  misc_feature: MA Experiment ID: 20001451 Result: Up-regulated in Transcription
  misc_feature: MA Experiment 20001451 PARAMETER Experiment Name: At_Far-red-induction_P Parameter: Age (day) Value: 7
  misc_feature: MA Experiment 20001451 PARAMETER Experiment Name: At_Far-red-induction_P Parameter: Light Value: Far-red vs. White
  misc_feature: MA Experiment 20001451 PARAMETER Experiment Name: At_Far-red-induction_P Parameter: Organism Value: A. thaliana
  misc_feature: MA Experiment 20001451 PARAMETER Experiment Name: At_Far-red-induction_P Parameter: Plant Line Value: Columbia
  misc_feature: MA Experiment 20001451 PARAMETER Experiment Name: At_Far-red-induction_P Parameter: Timepoint (hr) Value: 24
  misc_feature: MA Experiment 20001451 PARAMETER Experiment Name: At_Far-red-induction_P Parameter: Tissue Value: Whole Plant
  misc_feature: MA Experiment ID: 20001555 Result: Down-regulated in Transcription
  misc_feature: MA Experiment 20001555 PARAMETER Experiment Name: At_Drought_Soil_Dry_P Parameter: Age (day) Value: 24
  misc_feature: MA Experiment 20001555 PARAMETER Experiment Name: At_Drought_Soil_Dry_P Parameter: Organism Value: A. thaliana
  misc_feature: MA Experiment 20001555 PARAMETER Experiment Name: At_Drought_Soil_Dry_P Parameter: Plant Line Value: WS
  misc_feature: MA Experiment 20001555 PARAMETER Experiment Name: At_Drought_Soil_Dry_P Parameter: Post Timepoint (hr) Value: None
  misc_feature: MA Experiment 20001555 PARAMETER Experiment Name: At_Drought_Soil_Dry_P Parameter: Post-Treatment Value: None
  misc_feature: MA Experiment 20001555 PARAMETER Experiment Name: At_Drought_Soil_Dry_P Parameter: Timepoint (day) Value: 10
  misc_feature: MA Experiment 20001555 PARAMETER Experiment Name: At_Drought_Soil_Dry_P Parameter: Treatment Value: Drought vs. No Drought
  misc_feature: MA Experiment ID: 20001556 Result: Down-regulated in Transcription
  misc_feature: MA Experiment 20001556 PARAMETER Experiment Name: At_Drought_Soil_Dry_P Parameter: Age (day) Value: 26
  misc_feature: MA Experiment 20001556 PARAMETER Experiment Name: At_Drought_Soil_Dry_P Parameter: Organism Value: A. thaliana
  misc_feature: MA Experiment 20001556 PARAMETER Experiment Name: At_Drought_Soil_Dry_P Parameter: Plant Line Value: WS
  misc_feature: MA Experiment 20001556 PARAMETER Experiment Name: At_Drought_Soil_Dry_P Parameter: Post Timepoint (hr) Value: None
  misc_feature: MA Experiment 20001556 PARAMETER Experiment Name: At_Drought_Soil_Dry_P Parameter: Post-Treatment Value: None
  misc_feature: MA Experiment 20001556 PARAMETER Experiment Name: At_Drought_Soil_Dry_P Parameter: Timepoint (day) Value: 12
  misc_feature: MA Experiment 20001556 PARAMETER Experiment Name: At_Drought_Soil_Dry_P Parameter: Treatment Value: Drought vs. No Drought
  misc_feature: MA Experiment ID: 20001557 Result: Up-regulated in Transcription
  misc_feature: MA Experiment 20001557 PARAMETER Experiment Name: At_Drought_Soil_Dry_P Parameter: Age (day) Value: 27
  misc_feature: MA Experiment 20001557 PARAMETER Experiment Name: At_Drought_Soil_Dry_P Parameter: Organism Value: A. thaliana
  misc_feature: MA Experiment 20001557 PARAMETER Experiment Name: At_Drought_Soil_Dry_P Parameter: Plant Line Value: WS
  misc_feature: MA Experiment 20001557 PARAMETER Experiment Name: At_Drought_Soil_Dry_P Parameter: Post Timepoint (hr) Value: 3
  misc_feature: MA Experiment 20001557 PARAMETER Experiment Name: At_Drought_Soil_Dry_P Parameter: Post-Treatment Value: Re-Water vs. No Drought
  misc_feature: MA Experiment 20001557 PARAMETER Experiment Name: At_Drought_Soil_Dry_P Parameter: Timepoint (day) Value: 13
  misc_feature: MA Experiment 20001557 PARAMETER Experiment Name: At_Drought_Soil_Dry_P Parameter: Treatment Value: Drought vs. No Drought
  misc_feature: MA Experiment ID: 20001904 Result: Down-regulated in Transcription
  misc_feature: MA Experiment 20001904 PARAMETER Experiment Name: At_Drought_Reproduction_P Parameter: Age (day) Value: 37
  misc_feature: MA Experiment 20001904 PARAMETER Experiment Name: At_Drought_Reproduction_P Parameter: Organism Value: A. thaliana
  misc_feature: MA Experiment 20001904 PARAMETER Experiment Name: At_Drought_Reproduction_P Parameter: Plant Line Value: WS
  misc_feature: MA Experiment 20001904 PARAMETER Experiment Name: At_Drought_Reproduction_P Parameter: Timepoint (day) Value: 7
  misc_feature: MA Experiment 20001904 PARAMETER Experiment Name: At_Drought_Reproduction_P Parameter: Tissue Value: Rosettes
  misc_feature: MA Experiment 20001904 PARAMETER Experiment Name: At_Drought_Reproduction_P Parameter: Treatment Value: Drought vs. No Drought
  misc_feature: MA Experiment ID: 20001905 Result: Down-regulated in Transcription
  misc_feature: MA Experiment 20001905 PARAMETER Experiment Name: At_Drought_Reproduction_P Parameter: Age (day) Value: 40
  misc_feature: MA Experiment 20001905 PARAMETER Experiment Name: At_Drought_Reproduction_P Parameter: Organism Value: A. thaliana
  misc_feature: MA Experiment 20001905 PARAMETER Experiment Name: At_Drought_Reproduction_P Parameter: Plant Line Value: WS
  misc_feature: MA Experiment 20001905 PARAMETER Experiment Name: At_Drought_Reproduction_P Parameter: Timepoint (day) Value: 10
  misc_feature: MA Experiment 20001905 PARAMETER Experiment Name: At_Drought_Reproduction_P Parameter: Tissue Value: Rosettes
  misc_feature: MA Experiment 20001905 PARAMETER Experiment Name: At_Drought_Reproduction_P Parameter: Treatment Value: Drought vs. No Drought
ccccctttttcactctcttcatttattcttcccctcatcatcatcatcatcttcttctttaaccaaaaacacaacttacaagaaaactgttgaatctttgtatttatttacatctcctttgacctttaataagaatctgagtggttggtctctgatttgatgagatgactgttgagctgatgatgagcagctacagcggcggcggaggaggaggtgatggttttcctgcaatcgccgcggcggcgaaaatggaagataccgctttgagagaagctgcttctgcagggattcacggtgtggaggagtttcttaaactgatcggtcaaagtcaacaaccaacggagaagagtcagacggagataaccgcggtgactgacgtcgccgttaacagcttcaagaaggtcatttctctactcggtagatctagaaccggacacgctagattcagacgagctcccgcgtcaacgcaaacgccgtttaagcaaacgccggtggttgaggaggaggtggaggtggaggagaagaagccagaaacaagctccgtgttaacaaaacagaaaacagagcaatatcacggtggtggatctgcgtttagagtttattgtccaacaccaattcatcgtcgtcctcctctatcacacaataacaacaacaatcagaatcaaacaaagaacggttcgtcttcttcatctcctccgatgctcgcaaacggagcaccgtcaacgataaactttgcgccgtcaccaccagtctcagcgacgaactcattcatgtcttctcatagatgtgacaccgatagtactcacatgtcatcaggattcgagttcactaacccatctcagctctctggttcgagaggtaaacctcctttatcatcagcttcgttgaagagaagatgtaattcatctccctcaagccgttgccattgctccaagaaaaggaaatcaagagtaaaaagagtgattagagttccagcagtaagtagcaaaatggctgatataccatcagatgagttttcatggagaaaatatggtcaaaaaccaatcaaaggctctcctcatcctcggggatattacaagtgcagcagtgtaagaggttgtccggcgcgtaagcatgtggagcgtgcactagatgatgcgatgatgctaatcgtgacgtacgaaggagaccacaaccatgctttggttctcgagacgacgacgatgaatcatgacaaaactctttagtttctcgagtttgaggggaactgtctgtgtgtgaccactatccagattagtcaacgacagagtgggcccgcactgcacttttttattcttttctttttgaaaagcttttgctttatctttctttttgattggaggaaatagagggaggggagataaagacgagagaggaacgttgtggatcttgatggaagttgaatcatgtgaatgtccttttctgtttatttatttctaggataatatatatttagtgcactatttttgtc

SEQ ID NO: 104636 - protein, 353 aa, Arabidopsis thaliana; identical to SEQ ID NO: 40099
  peptide (1)..(353): Ceres Seq. ID no. 13615450
  misc_feature (280)..(340): Pfam Name: WRKY DNA -binding domain Pfam Description: WRKY DNA -binding domain
  misc_feature (1)..(353): Homolog of NCBI NO: 15233752 NR Description: WRKY family transcription factor [Arabidopsis >gi|20978794|sp|Q9STX0|WRK7_ARATH Probable WRKY transcription
  misc_feature (1)..(339): Homolog of NCBI NO: 10798760 NR Description: WRKY transcription factor Nt-SubD48 [Nicotiana
  misc_feature (27)..(349): Homolog of NCBI NO: 7488950 NR Description: DNA-binding protein WRKY3 - parsley
  misc_feature (27)..(324): Homolog of NCBI NO: 4680251 NR Description: transcription factor; sequence specific
  misc_feature (177)..(340): Homolog of NCBI NO: 15227812 NR Description: WRKY family transcription factor [Arabidopsis >gi|20978770|sp|O22176|WR15_ARATH Probable WRKY transcription
  misc_feature (1)..(104): Homolog of NCBI NO: 15227812 NR Description: WRKY family transcription factor [Arabidopsis >gi|20978770|sp|O22176|WR15_ARATH Probable WRKY transcription
  misc_feature (27)..(340): Homolog of NCBI NO: 4760596 NR Description: DNA-binding protein NtWRKY3 [Nicotiana tabacum]
  misc_feature (29)..(344): Homolog of NCBI NO: 18396971 NR Description: WRKY family transcription factor [Arabidopsis >gi|20978793|sp|Q9SR07|WR39_ARATH Probable WRKY transcription
  misc_feature (49)..(338): Homolog of NCBI NO: 4894963 NR Description: DNA-binding protein WRKY3 [Avena sativa]
  misc_feature (148)..(338): Homolog of NCBI NO: 18400580 NR Description: WRKY family transcription factor [Arabidopsis >gi|29839677|sp|Q9SJA8|WR17_ARATH Probable WRKY transcription

SEQ ID NO: 104637 - protein, 348 aa, Arabidopsis thaliana; identical to SEQ ID NO: 40100
  peptide (1)..(348): Ceres Seq. ID no. 13615451
  misc_feature (275)..(335): Pfam Name: WRKY DNA -binding domain Pfam Description: WRKY DNA -binding domain
  misc_feature (1)..(348): Homolog of NCBI NO: 15233752 NR Description: WRKY family transcription factor [Arabidopsis >gi|20978794|sp|Q9STX0|WRK7_ARATH Probable WRKY transcription
  misc_feature (1)..(334): Homolog of NCBI NO: 10798760 NR Description: WRKY transcription factor Nt-SubD48 [Nicotiana
  misc_feature (22)..(344): Homolog of NCBI NO: 7488950 NR Description: DNA-binding protein WRKY3 - parsley
  misc_feature (22)..(319): Homolog of NCBI NO: 4680251 NR Description: transcription factor; sequence specific
  misc_feature (172)..(335): Homolog of NCBI NO: 15227812 NR Description: WRKY family transcription factor [Arabidopsis >gi|20978770|sp|O22176|WR15_ARATH Probable WRKY transcription
  misc_feature (1)..(99): Homolog of NCBI NO: 15227812 NR Description: WRKY family transcription factor [Arabidopsis >gi|20978770|sp|O22176|WR15_ARATH Probable WRKY transcription
  misc_feature (22)..(335): Homolog of NCBI NO: 4760596 NR Description: DNA-binding protein NtWRKY3 [Nicotiana tabacum]
  misc_feature (24)..(339): Homolog of NCBI NO: 18396971 NR Description: WRKY family transcription factor [Arabidopsis >gi|20978793|sp|Q9SR07|WR39_ARATH Probable WRKY transcription
  misc_feature (44)..(333): Homolog of NCBI NO: 4894963 NR Description: DNA-binding protein WRKY3 [Avena sativa]
  misc_feature (143)..(333): Homolog of NCBI NO: 18400580 NR Description: WRKY family transcription factor [Arabidopsis >gi|29839677|sp|Q9SJA8|WR17_ARATH Probable WRKY transcription

SEQ ID NO: 104638 - protein, 347 aa, Arabidopsis thaliana; identical to SEQ ID NO: 40101
  peptide (1)..(347): Ceres Seq. ID no. 13615452
  misc_feature (274)..(334): Pfam Name: WRKY DNA -binding domain Pfam Description: WRKY DNA -binding domain
  misc_feature (1)..(347): Homolog of NCBI NO: 15233752 NR Description: WRKY family transcription factor [Arabidopsis >gi|20978794|sp|Q9STX0|WRK7_ARATH Probable WRKY transcription
  misc_feature (1)..(333): Homolog of NCBI NO: 10798760 NR Description: WRKY transcription factor Nt-SubD48 [Nicotiana
  misc_feature (21)..(343): Homolog of NCBI NO: 7488950 NR Description: DNA-binding protein WRKY3 - parsley
  misc_feature (21)..(318): Homolog of NCBI NO: 4680251 NR Description: transcription factor; sequence specific
  misc_feature (171)..(334): Homolog of NCBI NO: 15227812 NR Description: WRKY family transcription factor [Arabidopsis >gi|20978770|sp|O22176|WR15_ARATH Probable WRKY transcription
  misc_feature (1)..(98): Homolog of NCBI NO: 15227812 NR Description: WRKY family transcription factor [Arabidopsis >gi|20978770|sp|O22176|WR15_ARATH Probable WRKY transcription
  misc_feature (21)..(334): Homolog of NCBI NO: 4760596 NR Description: DNA-binding protein NtWRKY3 [Nicotiana tabacum]
  misc_feature (23)..(338): Homolog of NCBI NO: 18396971 NR Description: WRKY family transcription factor [Arabidopsis >gi|20978793|sp|Q9SR07|WR39_ARATH Probable WRKY transcription
  misc_feature (43)..(332): Homolog of NCBI NO: 4894963 NR Description: DNA-binding protein WRKY3 [Avena sativa]
  misc_feature (142)..(332): Homolog of NCBI NO: 18400580 NR Description: WRKY family transcription factor [Arabidopsis >gi|29839677|sp|Q9SJA8|WR17_ARATH Probable WRKY transcription

SEQ ID NO: 104639 - DNA, 1258 bp, Arabidopsis thaliana
  misc_feature (1)..(1258): Ceres Seq. ID no. 13615453
  misc_feature: MA Experiment ID: 108434 Result: Down-regulated in Transcription
  misc_feature: MA Experiment 108434 PARAMETER Experiment Name: At_Root_Tips_cDNA_P Parameter: Tissue Value: Root Tips
  misc_feature: MA Experiment ID: 108435 Result: Down-regulated in Transcription
  misc_feature: MA Experiment 108435 PARAMETER Experiment Name: At_stm_Mutants_cDNA_P Parameter: Plant Line Value: wt Landsburg vs stm
  misc_feature: MA Experiment 108435 PARAMETER Experiment Name: At_stm_Mutants_cDNA_P Parameter: Tissue Value: Shoot Apical Meristem Region
  misc_feature: MA Experiment ID: 108461 Result: Up-regulated in Transcription
  misc_feature: MA Experiment 108461 PARAMETER Experiment Name: At_Germinating_Seeds_cDNA_P Parameter: Age (day) Value: 1 vs. 0
  misc_feature: MA Experiment 108461 PARAMETER Experiment Name: At_Germinating_Seeds_cDNA_P Parameter: Tissue Value: Germinating Seeds
  misc_feature: MA Experiment ID: 108462 Result: Up-regulated in Transcription
  misc_feature: MA Experiment 108462 PARAMETER Experiment Name: At_Germinating_Seeds_cDNA_P Parameter: Age (day) Value: 2 vs. 0
  misc_feature: MA Experiment 108462 PARAMETER Experiment Name: At_Germinating_Seeds_cDNA_P Parameter: Tissue Value: Germinating Seeds
  misc_feature: MA Experiment ID: 108463 Result: Up-regulated in Transcription
  misc_feature: MA Experiment 108463 PARAMETER Experiment Name: At_Germinating_Seeds_cDNA_P Parameter: Age (day) Value: 3 vs. 0
  misc_feature: MA Experiment 108463 PARAMETER Experiment Name: At_Germinating_Seeds_cDNA_P Parameter: Tissue Value: Germinating Seeds
  misc_feature: MA Experiment ID: 108464 Result: Up-regulated in Transcription
  misc_feature: MA Experiment 108464 PARAMETER Experiment Name: At_Germinating_Seeds_cDNA_P Parameter: Age (day) Value: 4 vs. 0
  misc_feature: MA Experiment 108464 PARAMETER Experiment Name: At_Germinating_Seeds_cDNA_P Parameter: Tissue Value: Germinating Seeds
  misc_feature: MA Experiment ID: 108469 Result: Down-regulated in Transcription
  misc_feature: MA Experiment ID: 108501 Result: Down-regulated in Transcription
  misc_feature: MA Experiment 108501 PARAMETER Experiment Name: At_ap2_floral_buds_cDNA_P Parameter: Plant Line Value: ap2 (Ler.)
  misc_feature: MA Experiment 108501 PARAMETER Experiment Name: At_ap2_floral_buds_cDNA_P Parameter: Tissue Value: Closed Flower
  misc_feature: MA Experiment ID: 108561 Result: Down-regulated in Transcription
  misc_feature: MA Experiment 108561 PARAMETER Experiment Name: At_100uM_ABA_cDNA_P Parameter: Timepoint (hr) Value: 6
  misc_feature: MA Experiment 108561 PARAMETER Experiment Name: At_100uM_ABA_cDNA_P Parameter: Tissue Value: Aerial
  misc_feature: MA Experiment 108561 PARAMETER Experiment Name: At_100uM_ABA_cDNA_P Parameter: Treatment Value: 100uM ABA vs. No Treatment
  misc_feature: MA Experiment ID: 108573 Result: Down-regulated in Transcription
  misc_feature: MA Experiment 108573 PARAMETER Experiment Name: At_Drought_cDNA_P Parameter: Timepoint (hr) Value: 6
  misc_feature: MA Experiment 108573 PARAMETER Experiment Name: At_Drought_cDNA_P Parameter: Tissue Value: Aerial
  misc_feature: MA Experiment 108573 PARAMETER Experiment Name: At_Drought_cDNA_P Parameter: Treatment Value: Drought vs. No Drought
  misc_feature: MA Experiment ID: 108574 Result: Up-regulated in Transcription
  misc_feature: MA Experiment 108574 PARAMETER Experiment Name: At_Wounding__cDNA_P Parameter: Timepoint (hr) Value: 1
  misc_feature: MA Experiment 108574 PARAMETER Experiment Name: At_Wounding__cDNA_P Parameter: Tissue Value: Aerial
  misc_feature: MA Experiment 108574 PARAMETER Experiment Name: At_Wounding__cDNA_P Parameter: Treatment Value: Wounding vs. No Wounding
  misc_feature: MA Experiment ID: 108576 Result: Down-regulated in Transcription
  misc_feature: MA Experiment 108576 PARAMETER Experiment Name: At_42deg_Heat_cDNA_P Parameter: Temperature (deg C) Value: 42 vs. 22
  misc_feature: MA Experiment 108576 PARAMETER Experiment Name: At_42deg_Heat_cDNA_P Parameter: Timepoint (hr) Value: 1
  misc_feature: MA Experiment 108576 PARAMETER Experiment Name: At_42deg_Heat_cDNA_P Parameter: Tissue Value: Aerial
  misc_feature: MA Experiment ID: 108577 Result: Down-regulated in Transcription
  misc_feature: MA Experiment 108577 PARAMETER Experiment Name: At_42deg_Heat_cDNA_P Parameter: Temperature (deg C) Value: 42 vs. 22
  misc_feature: MA Experiment 108577 PARAMETER Experiment Name: At_42deg_Heat_cDNA_P Parameter: Timepoint (hr) Value: 6
  misc_feature: MA Experiment 108577 PARAMETER Experiment Name: At_42deg_Heat_cDNA_P Parameter: Tissue Value: Aerial
  misc_feature: MA Experiment ID: 108595 Result: Down-regulated in Transcription
  misc_feature: MA Experiment 108595 PARAMETER Experiment Name: At_Ler-pi_Ovule_cDNA_P Parameter: Plant Line Value: null
  misc_feature: MA Experiment ID: 108605 Result: Down-regulated in Transcription
  misc_feature: MA Experiment 108605 PARAMETER Experiment Name: At_100uM_ABA_cDNA_P Parameter: Timepoint (hr) Value: 6
  misc_feature: MA Experiment 108605 PARAMETER Experiment Name: At_100uM_ABA_cDNA_P Parameter: Tissue Value: Aerial
  misc_feature: MA Experiment 108605 PARAMETER Experiment Name: At_100uM_ABA_cDNA_P Parameter: Treatment Value: 100uM ABA vs. No Treatment
  misc_feature: MA Experiment ID: 108607 Result: Down-regulated in Transcription
  misc_feature: MA Experiment 108607 PARAMETER Experiment Name: At_100uM_ABA_cDNA_P Parameter: Timepoint (hr) Value: 4
  misc_feature: MA Experiment 108607 PARAMETER Experiment Name: At_100uM_ABA_cDNA_P Parameter: Tissue Value: Aerial
  misc_feature: MA Experiment 108607 PARAMETER Experiment Name: At_100uM_ABA_cDNA_P Parameter: Treatment Value: 100uM ABA vs. No Treatment
  misc_feature: MA Experiment ID: 108608 Result: Down-regulated in Transcription
  misc_feature: MA Experiment 108608 PARAMETER Experiment Name: At_100uM_ABA_cDNA_P Parameter: Timepoint (hr) Value: 1
  misc_feature: MA Experiment 108608 PARAMETER Experiment Name: At_100uM_ABA_cDNA_P Parameter: Tissue Value: Aerial
  misc_feature: MA Experiment 108608 PARAMETER Experiment Name: At_100uM_ABA_cDNA_P Parameter: Treatment Value: 100uM ABA vs. No Treatment
  misc_feature: MA Experiment ID: 108668 Result: Down-regulated in Transcription
  misc_feature: MA Experiment 108668 PARAMETER Experiment Name: At_2mM_SA_cDNA_P Parameter: Plant Line Value: WS
  misc_feature: MA Experiment 108668 PARAMETER Experiment Name: At_2mM_SA_cDNA_P Parameter: Timepoint (hr) Value: 6
  misc_feature: MA Experiment 108668 PARAMETER Experiment Name: At_2mM_SA_cDNA_P Parameter: Treatment Value: 2mM SA vs. No Treatment
  misc_feature: MA Experiment ID: 20000090 Result: Down-regulated in Transcription
  misc_feature: MA Experiment ID: 20000112 Result: Down-regulated in Transcription
  misc_feature: MA Experiment 20000112 PARAMETER Experiment Name: At_42deg_Heat_cDNA_P Parameter: Temperature (deg C) Value: 42 vs. 22
  misc_feature: MA Experiment 20000112 PARAMETER Experiment Name: At_42deg_Heat_cDNA_P Parameter: Timepoint (hr) Value: 2
  misc_feature: MA Experiment 20000112 PARAMETER Experiment Name: At_42deg_Heat_cDNA_P Parameter: Tissue Value: Aerial
  misc_feature: MA Experiment ID: 20000113 Result: Down-regulated in Transcription
  misc_feature: MA Experiment 20000113 PARAMETER Experiment Name: At_42deg_Heat_cDNA_P Parameter: Temperature (deg C) Value: 42 vs. 22
  misc_feature: MA Experiment 20000113 PARAMETER Experiment Name: At_42deg_Heat_cDNA_P Parameter: Timepoint (hr) Value: 8
  misc_feature: MA Experiment 20000113 PARAMETER Experiment Name: At_42deg_Heat_cDNA_P Parameter: Tissue Value: Aerial
  misc_feature: MA Experiment ID: 20000166 Result: Down-regulated in Transcription
  misc_feature: MA Experiment 20000166 PARAMETER Experiment Name: At_100uM_ABA_P Parameter: Age (day) Value: 14
  misc_feature: MA Experiment 20000166 PARAMETER Experiment Name: At_100uM_ABA_P Parameter: Organism Value: A. thaliana
  misc_feature: MA Experiment 20000166 PARAMETER Experiment Name: At_100uM_ABA_P Parameter: Plant Line Value: WS
  misc_feature: MA Experiment 20000166 PARAMETER Experiment Name: At_100uM_ABA_P Parameter: Timepoint (hr) Value: 1
  misc_feature: MA Experiment 20000166 PARAMETER Experiment Name: At_100uM_ABA_P Parameter: Tissue Value: Aerial
  misc_feature: MA Experiment 20000166 PARAMETER Experiment Name: At_100uM_ABA_P Parameter: Treatment Value: 100uM ABA vs. No Treatment
  misc_feature: MA Experiment ID: 20000171 Result: Down-regulated in Transcription
  misc_feature: MA Experiment 20000171 PARAMETER Experiment Name: At_42deg_Heat_P Parameter: Age (day) Value: 14
  misc_feature: MA Experiment 20000171 PARAMETER Experiment Name: At_42deg_Heat_P Parameter: Organism Value: A. thaliana
  misc_feature: MA Experiment 20000171 PARAMETER Experiment Name: At_42deg_Heat_P Parameter: Plant Line Value: WS
  misc_feature: MA Experiment 20000171 PARAMETER Experiment Name: At_42deg_Heat_P Parameter: Temperature (deg C) Value: 42 vs. 22
  misc_feature: MA Experiment 20000171 PARAMETER Experiment Name: At_42deg_Heat_P Parameter: Timepoint (hr) Value: 1
  misc_feature: MA Experiment 20000171 PARAMETER Experiment Name: At_42deg_Heat_P Parameter: Tissue Value: Aerial
  misc_feature: MA Experiment ID: 20000173 Result: Down-regulated in Transcription
  misc_feature: MA Experiment 20000173 PARAMETER Experiment Name: At_42deg_Heat_P Parameter: Age (day) Value: 14
  misc_feature: MA Experiment 20000173 PARAMETER Experiment Name: At_42deg_Heat_P Parameter: Organism Value: A. thaliana
  misc_feature: MA Experiment 20000173 PARAMETER Experiment Name: At_42deg_Heat_P Parameter: Plant Line Value: WS
  misc_feature: MA Experiment 20000173 PARAMETER Experiment Name: At_42deg_Heat_P Parameter: Temperature (deg C) Value: 42 vs. 22
  misc_feature: MA Experiment 20000173 PARAMETER Experiment Name: At_42deg_Heat_P Parameter: Timepoint (hr) Value: 6
  misc_feature: MA Experiment 20000173 PARAMETER Experiment Name: At_42deg_Heat_P Parameter: Tissue Value: Aerial
  misc_feature: MA Experiment ID: 20000180 Result: Up-regulated in Transcription
  misc_feature: MA Experiment 20000180 PARAMETER Experiment Name: At_Germinating_Seeds_P Parameter: Age (hr) Value: 24 vs. 0
  misc_feature: MA Experiment 20000180 PARAMETER Experiment Name: At_Germinating_Seeds_P Parameter: Tissue Value: Germinating Seeds
  misc_feature: MA Experiment ID: 20000182 Result: Down-regulated in Transcription
  misc_feature: MA Experiment 20000182 PARAMETER Experiment Name: At_2mM_SA_P Parameter: Age (day) Value: 14
  misc_feature: MA Experiment 20000182 PARAMETER Experiment Name: At_2mM_SA_P Parameter: Organism Value: A. thaliana
  misc_feature: MA Experiment 20000182 PARAMETER Experiment Name: At_2mM_SA_P Parameter: Plant Line Value: WS
  misc_feature: MA Experiment 20000182 PARAMETER Experiment Name: At_2mM_SA_P Parameter: Timepoint (hr) Value: 6
  misc_feature: MA Experiment 20000182 PARAMETER Experiment Name: At_2mM_SA_P Parameter: Tissue Value: Aerial
  misc_feature: MA Experiment 20000182 PARAMETER Experiment Name: At_2mM_SA_P Parameter: Treatment Value: 2mM SA vs. No Treatment
  misc_feature: MA Experiment ID: 20000185 Result: Down-regulated in Transcription
  misc_feature: MA Experiment 20000185 PARAMETER Experiment Name: At_Roots__P Parameter: Age (day) Value: 7 vs. 21
  misc_feature: MA Experiment 20000185 PARAMETER Experiment Name: At_Roots__P Parameter: Organism Value: A. thaliana
  misc_feature: MA Experiment 20000185 PARAMETER Experiment Name: At_Roots__P Parameter: Tissue Value: Roots vs. Whole Plant
  misc_feature: MA Experiment ID: 20000211 Result: Up-regulated in Transcription
  misc_feature: MA Experiment 20000211 PARAMETER Experiment Name: At_0.001percent_MeJA__P Parameter: Age (day) Value: 14
  misc_feature: MA Experiment 20000211 PARAMETER Experiment Name: At_0.001percent_MeJA__P Parameter: Organism Value: A. thaliana
  misc_feature: MA Experiment 20000211 PARAMETER Experiment Name: At_0.001percent_MeJA__P Parameter: Plant Line Value: WS
  misc_feature: MA Experiment 20000211 PARAMETER Experiment Name: At_0.001percent_MeJA__P Parameter: Timepoint (hr) Value: 1
  misc_feature: MA Experiment 20000211 PARAMETER Experiment Name: At_0.001percent_MeJA__P Parameter: Tissue Value: Aerial
  misc_feature: MA Experiment 20000211 PARAMETER Experiment Name: At_0.001percent_MeJA__P Parameter: Treatment Value: 0.001percent MeJA vs. No Treatment
  misc_feature: MA Experiment ID: 20000224 Result: Up-regulated in Transcription
  misc_feature: MA Experiment ID: 20000227 Result: Down-regulated in Transcription
  misc_feature: MA Experiment 20000227 PARAMETER Experiment Name: At_Root-Tips-vs-Tops_P Parameter: Tissue Value: Root Tips vs. Root Tops
  misc_feature: MA Experiment ID: 20000436 Result: Down-regulated in Transcription
  misc_feature: MA Experiment 20000436 PARAMETER Experiment Name: At_Drought_P Parameter: Age (day) Value: 7
  misc_feature: MA Experiment 20000436 PARAMETER Experiment Name: At_Drought_P Parameter: Organism Value: A. thaliana
  misc_feature: MA Experiment 20000436 PARAMETER Experiment Name: At_Drought_P Parameter: Plant Line Value: WS
  misc_feature: MA Experiment 20000436 PARAMETER Experiment Name: At_Drought_P Parameter: Timepoint (hr) Value: 12
  misc_feature: MA Experiment 20000436 PARAMETER Experiment Name: At_Drought_P Parameter: Tissue Value: Whole Plant
  misc_feature: MA Experiment 20000436 PARAMETER Experiment Name: At_Drought_P Parameter: Treatment Value: Drought vs. No Drought
  misc_feature: MA Experiment ID: 20000437 Result: Down-regulated in Transcription
  misc_feature: MA Experiment 20000437 PARAMETER Experiment Name: At_Drought_P Parameter: Age (day) Value: 8
  misc_feature: MA Experiment 20000437 PARAMETER Experiment Name: At_Drought_P Parameter: Organism Value: A. thaliana
  misc_feature: MA Experiment 20000437 PARAMETER Experiment Name: At_Drought_P Parameter: Plant Line Value: WS
  misc_feature: MA Experiment 20000437 PARAMETER Experiment Name: At_Drought_P Parameter: Timepoint (hr) Value: 24
  misc_feature: MA Experiment 20000437 PARAMETER Experiment Name: At_Drought_P Parameter: Tissue Value: Whole Plant
  misc_feature: MA Experiment 20000437 PARAMETER Experiment Name: At_Drought_P Parameter: Treatment Value: Drought vs. No Drought
  misc_feature: MA Experiment ID: 20000438 Result: Up-regulated in Transcription
  misc_feature: MA Experiment 20000438 PARAMETER Experiment Name: At_Shoots__P Parameter: Age (day) Value: 14
  misc_feature: MA Experiment 20000438 PARAMETER Experiment Name: At_Shoots__P Parameter: Tissue Value: Shoots vs. Whole Plant
  misc_feature: MA Experiment ID: 20000439 Result: Down-regulated in Transcription
  misc_feature: MA Experiment 20000439 PARAMETER Experiment Name: At_Roots__P Parameter: Age (day) Value: 14 vs. 21
  misc_feature: MA Experiment 20000439 PARAMETER Experiment Name: At_Roots__P Parameter: Organism Value: A. thaliana
  misc_feature: MA Experiment 20000439 PARAMETER Experiment Name: At_Roots__P Parameter: Tissue Value: Roots vs. Whole Plant
  misc_feature: MA Experiment ID: 20000451 Result: Down-regulated in Transcription
  misc_feature: MA Experiment 20000451 PARAMETER Experiment Name: At_CS6879_Shoots-Roots_P Parameter: Age (day) Value: 14
  misc_feature: MA Experiment 20000451 PARAMETER Experiment Name: At_CS6879_Shoots-Roots_P Parameter: Organism Value: A. thaliana
  misc_feature: MA Experiment 20000451 PARAMETER Experiment Name: At_CS6879_Shoots-Roots_P Parameter: Plant Line Value: CS6879 vs. WS
  misc_feature: MA Experiment 20000451 PARAMETER Experiment Name: At_CS6879_Shoots-Roots_P Parameter: Tissue Value: Roots
  misc_feature: MA Experiment ID: 20001247 Result: Down-regulated in Transcription
  misc_feature: MA Experiment 20001247 PARAMETER Experiment Name: At_Far-red-induction_P Parameter: Age (day) Value: 7
  misc_feature: MA Experiment 20001247 PARAMETER Experiment Name: At_Far-red-induction_P Parameter: Light Value: Far-red vs. White
  misc_feature: MA Experiment 20001247 PARAMETER Experiment Name: At_Far-red-induction_P Parameter: Organism Value: A. thaliana
  misc_feature: MA Experiment 20001247 PARAMETER Experiment Name: At_Far-red-induction_P Parameter: Plant Line Value: Columbia
  misc_feature: MA Experiment 20001247 PARAMETER Experiment Name: At_Far-red-induction_P Parameter: Timepoint (hr) Value: 1
  misc_feature: MA Experiment 20001247 PARAMETER Experiment Name: At_Far-red-induction_P Parameter: Tissue Value: Whole Plant
  misc_feature: MA Experiment ID: 20001248 Result: Down-regulated in Transcription
  misc_feature: MA Experiment 20001248 PARAMETER Experiment Name: At_Far-red-induction_P Parameter: Age (day) Value: 7
  misc_feature: MA Experiment 20001248 PARAMETER Experiment Name: At_Far-red-induction_P Parameter: Light Value: Far-red vs. White
  misc_feature: MA Experiment 20001248 PARAMETER Experiment Name: At_Far-red-induction_P Parameter: Organism Value: A. thaliana
  misc_feature: MA Experiment 20001248 PARAMETER Experiment Name: At_Far-red-induction_P Parameter: Plant Line Value: Columbia
  misc_feature: MA Experiment 20001248 PARAMETER Experiment Name: At_Far-red-induction_P Parameter: Timepoint (hr) Value: 4
  misc_feature: MA Experiment 20001248 PARAMETER Experiment Name: At_Far-red-induction_P Parameter: Tissue Value: Whole Plant
  misc_feature: MA Experiment ID: 20001450 Result: Down-regulated in Transcription
  misc_feature: MA Experiment 20001450 PARAMETER Experiment Name: At_Far-red-induction_P Parameter: Age (day) Value: 7
  misc_feature: MA Experiment 20001450 PARAMETER Experiment Name: At_Far-red-induction_P Parameter: Light Value: Far-red vs. White
  misc_feature: MA Experiment 20001450 PARAMETER Experiment Name: At_Far-red-induction_P Parameter: Organism Value: A. thaliana
  misc_feature: MA Experiment 20001450 PARAMETER Experiment Name: At_Far-red-induction_P Parameter: Plant Line Value: Columbia
  misc_feature: MA Experiment 20001450 PARAMETER Experiment Name: At_Far-red-induction_P Parameter: Timepoint (hr) Value: 8
  misc_feature: MA Experiment 20001450 PARAMETER Experiment Name: At_Far-red-induction_P Parameter: Tissue Value: Whole Plant
  misc_feature: MA Experiment ID: 20001451 Result: Down-regulated in Transcription
  misc_feature: MA Experiment 20001451 PARAMETER Experiment Name: At_Far-red-induction_P Parameter: Age (day) Value: 7
  misc_feature: MA Experiment 20001451 PARAMETER Experiment Name: At_Far-red-induction_P Parameter: Light Value: Far-red vs. White
  misc_feature: MA Experiment 20001451 PARAMETER Experiment Name: At_Far-red-induction_P Parameter: Organism Value: A. thaliana
  misc_feature: MA Experiment 20001451 PARAMETER Experiment Name: At_Far-red-induction_P Parameter: Plant Line Value: Columbia
  misc_feature: MA Experiment 20001451 PARAMETER Experiment Name: At_Far-red-induction_P Parameter: Timepoint (hr) Value: 24
  misc_feature: MA Experiment 20001451 PARAMETER Experiment Name: At_Far-red-induction_P Parameter: Tissue Value: Whole Plant
  misc_feature: MA Experiment ID: 20001554 Result: Down-regulated in Transcription
  misc_feature: MA Experiment 20001554 PARAMETER Experiment Name: At_Drought_Soil_Dry_P Parameter: Age (day) Value: 21
  misc_feature: MA Experiment 20001554 PARAMETER Experiment Name: At_Drought_Soil_Dry_P Parameter: Organism Value: A. thaliana
  misc_feature: MA Experiment 20001554 PARAMETER Experiment Name: At_Drought_Soil_Dry_P Parameter: Plant Line Value: WS
  misc_feature: MA Experiment 20001554 PARAMETER Experiment Name: At_Drought_Soil_Dry_P Parameter: Post Timepoint (hr) Value: None
  misc_feature: MA Experiment 20001554 PARAMETER Experiment Name: At_Drought_Soil_Dry_P Parameter: Post-Treatment Value: None
  misc_feature: MA Experiment 20001554 PARAMETER Experiment Name: At_Drought_Soil_Dry_P Parameter: Timepoint (day) Value: 7
  misc_feature: MA Experiment 20001554 PARAMETER Experiment Name: At_Drought_Soil_Dry_P Parameter: Treatment Value: Drought vs. No Drought
  misc_feature: MA Experiment ID: 20001555 Result: Down-regulated in Transcription
  misc_feature: MA Experiment 20001555 PARAMETER Experiment Name: At_Drought_Soil_Dry_P Parameter: Age (day) Value: 24
  misc_feature: MA Experiment 20001555 PARAMETER Experiment Name: At_Drought_Soil_Dry_P Parameter: Organism Value: A. thaliana
  misc_feature: MA Experiment 20001555 PARAMETER Experiment Name: At_Drought_Soil_Dry_P Parameter: Plant Line Value: WS
  misc_feature: MA Experiment 20001555 PARAMETER Experiment Name: At_Drought_Soil_Dry_P Parameter: Post Timepoint (hr) Value: None
  misc_feature: MA Experiment 20001555 PARAMETER Experiment Name: At_Drought_Soil_Dry_P Parameter: Post-Treatment Value: None
  misc_feature: MA Experiment 20001555 PARAMETER Experiment Name: At_Drought_Soil_Dry_P Parameter: Timepoint (day) Value: 10
  misc_feature: MA Experiment 20001555 PARAMETER Experiment Name: At_Drought_Soil_Dry_P Parameter: Treatment Value: Drought vs. No Drought
  misc_feature: MA Experiment ID: 20001556 Result: Down-regulated in Transcription
  misc_feature: MA Experiment 20001556 PARAMETER Experiment Name: At_Drought_Soil_Dry_P Parameter: Age (day) Value: 26
  misc_feature: MA Experiment 20001556 PARAMETER Experiment Name: At_Drought_Soil_Dry_P Parameter: Organism Value: A. thaliana
  misc_feature: MA Experiment 20001556 PARAMETER Experiment Name: At_Drought_Soil_Dry_P Parameter: Plant Line Value: WS
  misc_feature: MA Experiment 20001556 PARAMETER Experiment Name: At_Drought_Soil_Dry_P Parameter: Post Timepoint (hr) Value: None
  misc_feature: MA Experiment 20001556 PARAMETER Experiment Name: At_Drought_Soil_Dry_P Parameter: Post-Treatment Value: None
  misc_feature: MA Experiment 20001556 PARAMETER Experiment Name: At_Drought_Soil_Dry_P Parameter: Timepoint (day) Value: 12
  misc_feature: MA Experiment 20001556 PARAMETER Experiment Name: At_Drought_Soil_Dry_P Parameter: Treatment Value: Drought vs. No Drought
  misc_feature: MA Experiment ID: 20001559 Result: Down-regulated in Transcription
  misc_feature: MA Experiment 20001559 PARAMETER Experiment Name: At_Drought_Soil_Dry_P Parameter: Age (day) Value: 28
  misc_feature: MA Experiment 20001559 PARAMETER Experiment Name: At_Drought_Soil_Dry_P Parameter: Organism Value: A. thaliana
  misc_feature: MA Experiment 20001559 PARAMETER Experiment Name: At_Drought_Soil_Dry_P Parameter: Plant Line Value: WS
  misc_feature: MA Experiment 20001559 PARAMETER Experiment Name: At_Drought_Soil_Dry_P Parameter: Post Timepoint (hr) Value: 29
  misc_feature: MA Experiment 20001559 PARAMETER Experiment Name: At_Drought_Soil_Dry_P Parameter: Post-Treatment Value: Re-Water vs. No Drought
  misc_feature: MA Experiment 20001559 PARAMETER Experiment Name: At_Drought_Soil_Dry_P Parameter: Timepoint (day) Value: 14
  misc_feature: MA Experiment 20001559 PARAMETER Experiment Name: At_Drought_Soil_Dry_P Parameter: Treatment Value: Drought vs. No Drought
  misc_feature: MA Experiment ID: 20001904 Result: Down-regulated in Transcription
  misc_feature: MA Experiment 20001904 PARAMETER Experiment Name: At_Drought_Reproduction_P Parameter: Age (day) Value: 37
  misc_feature: MA Experiment 20001904 PARAMETER Experiment Name: At_Drought_Reproduction_P Parameter: Organism Value: A. thaliana
  misc_feature: MA Experiment 20001904 PARAMETER Experiment Name: At_Drought_Reproduction_P Parameter: Plant Line Value: WS
  misc_feature: MA Experiment 20001904 PARAMETER Experiment Name: At_Drought_Reproduction_P Parameter: Timepoint (day) Value: 7
  misc_feature: MA Experiment 20001904 PARAMETER Experiment Name: At_Drought_Reproduction_P Parameter: Tissue Value: Rosettes
  misc_feature: MA Experiment 20001904 PARAMETER Experiment Name: At_Drought_Reproduction_P Parameter: Treatment Value: Drought vs. No Drought
  misc_feature: MA Experiment ID: 20001905 Result: Down-regulated in Transcription
  misc_feature: MA Experiment 20001905 PARAMETER Experiment Name: At_Drought_Reproduction_P Parameter: Age (day) Value: 40
  misc_feature: MA Experiment 20001905 PARAMETER Experiment Name: At_Drought_Reproduction_P Parameter: Organism Value: A. thaliana
  misc_feature: MA Experiment 20001905 PARAMETER Experiment Name: At_Drought_Reproduction_P Parameter: Plant Line Value: WS
  misc_feature: MA Experiment 20001905 PARAMETER Experiment Name: At_Drought_Reproduction_P Parameter: Timepoint (day) Value: 10
  misc_feature: MA Experiment 20001905 PARAMETER Experiment Name: At_Drought_Reproduction_P Parameter: Tissue Value: Rosettes
  misc_feature: MA Experiment 20001905 PARAMETER Experiment Name: At_Drought_Reproduction_P Parameter: Treatment Value: Drought vs. No Drought
  misc_feature: MA Experiment ID: 20001907 Result: Down-regulated in Transcription
  misc_feature: MA Experiment 20001907 PARAMETER Experiment Name: At_Drought_Reproduction_P Parameter: Age (day) Value: 37
  misc_feature: MA Experiment 20001907 PARAMETER Experiment Name: At_Drought_Reproduction_P Parameter: Organism Value: A. thaliana
  misc_feature: MA Experiment 20001907 PARAMETER Experiment Name: At_Drought_Reproduction_P Parameter: Plant Line Value: WS
  misc_feature: MA Experiment 20001907 PARAMETER Experiment Name: At_Drought_Reproduction_P Parameter: Timepoint (day) Value: 7
  misc_feature: MA Experiment 20001907 PARAMETER Experiment Name: At_Drought_Reproduction_P Parameter: Tissue Value: Siliques
  misc_feature: MA Experiment 20001907 PARAMETER Experiment Name: At_Drought_Reproduction_P Parameter: Treatment Value: Drought vs. No Drought
agtctagagacgagaagcacgtggaaagaagaaactatcaagttggacttggatgatatatatatatatgcagctgtggatttgaatcgtaaaccaaccaaccaatcagatggaccacactctttctcttcttccatttctcttcatcataatcatttcttccttccatgttttgcctgtttcacccacaccttcacacaaactaaaatccgccactaccatcagaaaactcaaccgcggaggaccttacatcggtctcgtgacggtcattgcgaccgaagaaaatgcttttctccgcagtgtcgatttcagacctgaccctactcatcccttcttggatctctctgggagacgttttcgaatagggaagattcatggaaagaaggttgtgtatgttagatgtgggagaggaatggtgaatggagcagcagcaacacaacagatgatagatgtgttcaatgtgaaagggatagtgcattttgggattgctggaaatatgaacaactcaatgtccataggagatgtgagcatccctaagcaaattacgaatgctggcttgtgggattggctgaatccagacaaagtaaagggagttgaggatatagcgtacttagatgtcggaaactataatgttccaaaaggagatggcgacaatgagttagggagtattggatataattacgagcaactatattcagtcactggtcacatcaatgcacctcagaatgtgttttggatcaacacaactcaagagtggcttcatcttgcagctgatctagagaagatggagctatcgcagtgtgtaaatgcaagtttgtgtcttccaaagaaaccaaaattggtagttggattgaaagcagccactgcttacatatttgtggataatgcagcctatagaaatttcttatacgatacttttggagtctcctcctctgatatggagagttctgcagtagccatgacatgcgcatcaaatgggtatccgataattgtgataaggggtttatcagatttagctggagaaggaggagataacactgttcataagtttggatctttggctgccactaacactgccaaagctgttttagagttcattaggaagctcccaccgtactaattcctctagtgtaacctatttatcatgaatgtttgaatctagttctctagttcatatcaacgaacccgtgacaacaaatgatttggattgttatcaaattccattttccatgatcgtaacaatgacaacacttttatc

SEQ ID NO: 104640 - protein, 336 aa, Arabidopsis thaliana; identical to SEQ ID NO: 25408
  peptide (1)..(336): Ceres Seq. ID no. 13615454
  misc_feature (47)..(330): Pfam Name: Phosphorylase family Pfam Description: Phosphorylase family
  misc_feature (1)..(336): Homolog of NCBI NO: 30686500 NR Description: expressed protein [Arabidopsis thaliana] unknown protein [Arabidopsis thaliana]
  misc_feature (1)..(336): Homolog of NCBI NO: 21593613 NR Description: unknown [Arabidopsis thaliana]
  misc_feature (1)..(335): Homolog of NCBI NO: 18416327 NR Description: expressed protein [Arabidopsis thaliana] unknown protein [Arabidopsis thaliana]
  misc_feature (1)..(334): Homolog of NCBI NO: 21617914 NR Description: unknown [Arabidopsis thaliana]
  misc_feature (1)..(335): Homolog of NCBI NO: 7487317 NR Description: hypothetical protein T22A6.170 - Arabidopsis >gi|5051776|emb|CAB45069.1| putative protein [Arabidopsis >gi|7269284|emb|CAB79344.1| putative protein [Arabidopsis
  misc_feature (1)..(224): Homolog of NCBI NO: 7487318 NR Description: hypothetical protein T22A6.180 - Arabidopsis >gi|5051777|emb|CAB45070.1| putative protein [Arabidopsis >gi|7269285|emb|CAB79345.1| putative protein [Arabidopsis
  misc_feature (226)..(336): Homolog of NCBI NO: 7487319 NR Description: hypothetical protein T22A6.190 - Arabidopsis >gi|5051778|emb|CAB45071.1| putative protein [Arabidopsis >gi|7269286|emb|CAB79346.1| putative protein [Arabidopsis
  misc_feature (48)..(334): Homolog of NCBI NO: 481815 NR Description: vegetative storage protein win4.5 - western poplar x cottonwood (fragment) >gi|309839|gb|AAA16342.1| storage protein [Populus balsamifera subsp. trichocarpa x Populus
  misc_feature (100)..(330): Homolog of NCBI NO: 34897886 NR Description: ESTs AU032452(S10068),C23571(S10068) correspond a region of the predicted gene.~Similar to P.trichocarpa x P.
  misc_feature (48)..(334): Homolog of NCBI NO: 421813 NR Description: storage protein, bark - cottonwood

SEQ ID NO: 104641 - protein, 235 aa, Arabidopsis thaliana; identical to SEQ ID NO: 25409
  peptide (1)..(235): Ceres Seq. ID no. 13615455
  misc_feature (1)..(229): Pfam Name: Phosphorylase family Pfam Description: Phosphorylase family
  misc_feature (1)..(235): Homolog of NCBI NO: 30686500 NR Description: expressed protein [Arabidopsis thaliana] unknown protein [Arabidopsis thaliana]
  misc_feature (1)..(235): Homolog of NCBI NO: 21593613 NR Description: unknown [Arabidopsis thaliana]
  misc_feature (1)..(234): Homolog of NCBI NO: 18416327 NR Description: expressed protein [Arabidopsis thaliana] unknown protein [Arabidopsis thaliana]
  misc_feature (1)..(233): Homolog of NCBI NO: 21617914 NR Description: unknown [Arabidopsis thaliana]
  misc_feature (1)..(234): Homolog of NCBI NO: 7487317 NR Description: hypothetical protein T22A6.170 - Arabidopsis >gi|5051776|emb|CAB45069.1| putative protein [Arabidopsis >gi|7269284|emb|CAB79344.1| putative protein [Arabidopsis
  misc_feature (1)..(123): Homolog of NCBI NO: 7487318 NR Description: hypothetical protein T22A6.180 - Arabidopsis >gi|5051777|emb|CAB45070.1| putative protein [Arabidopsis >gi|7269285|emb|CAB79345.1| putative protein [Arabidopsis
  misc_feature (125)..(235): Homolog of NCBI NO: 7487319 NR Description: hypothetical protein T22A6.190 - Arabidopsis >gi|5051778|emb|CAB45071.1| putative protein [Arabidopsis >gi|7269286|emb|CAB79346.1| putative protein [Arabidopsis
  misc_feature (1)..(233): Homolog of NCBI NO: 481815 NR Description: vegetative storage protein win4.5 - western poplar x cottonwood (fragment) >gi|309839|gb|AAA16342.1| storage protein [Populus balsamifera subsp. trichocarpa x Populus
  misc_feature (1)..(229): Homolog of NCBI NO: 34897886 NR Description: ESTs AU032452(S10068),C23571(S10068) correspond a region of the predicted gene.~Similar to P.trichocarpa x P.
  misc_feature (1)..(233): Homolog of NCBI NO: 421813 NR Description: storage protein, bark - cottonwood

SEQ ID NO: 104642 - protein, 225 aa, Arabidopsis thaliana; identical to SEQ ID NO: 25410
  peptide (1)..(225): Ceres Seq. ID no. 13615456
  misc_feature (1)..(219): Pfam Name: Phosphorylase family Pfam Description: Phosphorylase family
  misc_feature (1)..(225): Homolog of NCBI NO: 30686500 NR Description: expressed protein [Arabidopsis thaliana] unknown protein [Arabidopsis thaliana]
  misc_feature (1)..(225): Homolog of NCBI NO: 21593613 NR Description: unknown [Arabidopsis thaliana]
  misc_feature (1)..(224): Homolog of NCBI NO: 18416327 NR Description: expressed protein [Arabidopsis thaliana] unknown protein [Arabidopsis thaliana]
  misc_feature (1)..(223): Homolog of NCBI NO: 21617914 NR Description: unknown [Arabidopsis thaliana]
  misc_feature (1)..(224): Homolog of NCBI NO: 7487317 NR Description: hypothetical protein T22A6.170 - Arabidopsis >gi|5051776|emb|CAB45069.1| putative protein [Arabidopsis >gi|7269284|emb|CAB79344.1| putative protein [Arabidopsis
  misc_feature (1)..(113): Homolog of NCBI NO: 7487318 NR Description: hypothetical protein T22A6.180 - Arabidopsis >gi|5051777|emb|CAB45070.1| putative protein [Arabidopsis >gi|7269285|emb|CAB79345.1| putative protein [Arabidopsis
  misc_feature (115)..(225): Homolog of NCBI NO: 7487319 NR Description: hypothetical protein T22A6.190 - Arabidopsis >gi|5051778|emb|CAB45071.1| putative protein [Arabidopsis >gi|7269286|emb|CAB79346.1| putative protein [Arabidopsis
  misc_feature (1)..(223): Homolog of NCBI NO: 481815 NR Description: vegetative storage protein win4.5 - western poplar x cottonwood (fragment) >gi|309839|gb|AAA16342.1| storage protein [Populus balsamifera subsp. trichocarpa x Populus
  misc_feature (1)..(219): Homolog of NCBI NO: 34897886 NR Description: ESTs AU032452(S10068),C23571(S10068) correspond a region of the predicted gene.~Similar to P.trichocarpa x P.
  misc_feature (1)..(223): Homolog of NCBI NO: 421813 NR Description: storage protein, bark - cottonwood

SEQ ID NO: 104643 - DNA, 5365 bp, Arabidopsis thaliana
  misc_feature (1)..(5365): Ceres Seq. ID no. 13615465
  misc_feature: MA Experiment ID: 108573 Result: Up-regulated in Transcription
  misc_feature: MA Experiment 108573 PARAMETER Experiment Name: At_Drought_cDNA_P Parameter: Timepoint (hr) Value: 6
  misc_feature: MA Experiment 108573 PARAMETER Experiment Name: At_Drought_cDNA_P Parameter: Tissue Value: Aerial
  misc_feature: MA Experiment 108573 PARAMETER Experiment Name: At_Drought_cDNA_P Parameter: Treatment Value: Drought vs. No Drought
  misc_feature: MA Experiment ID: 108595 Result: Down-regulated in Transcription
  misc_feature: MA Experiment 108595 PARAMETER Experiment Name: At_Ler-pi_Ovule_cDNA_P Parameter: Plant Line Value: null
  misc_feature: MA Experiment ID: 20000111 Result: Down-regulated in Transcription
  misc_feature: MA Experiment 20000111 PARAMETER Experiment Name: At_42deg_Heat_cDNA_P Parameter: Temperature (deg C) Value: 42 vs. 22
  misc_feature: MA Experiment 20000111 PARAMETER Experiment Name: At_42deg_Heat_cDNA_P Parameter: Timepoint (hr) Value: 6
  misc_feature: MA Experiment 20000111 PARAMETER Experiment Name: At_42deg_Heat_cDNA_P Parameter: Tissue Value: Aerial
  misc_feature: MA Experiment ID: 20000113 Result: Down-regulated in Transcription
  misc_feature: MA Experiment 20000113 PARAMETER Experiment Name: At_42deg_Heat_cDNA_P Parameter: Temperature (deg C) Value: 42 vs. 22
  misc_feature: MA Experiment 20000113 PARAMETER Experiment Name: At_42deg_Heat_cDNA_P Parameter: Timepoint (hr) Value: 8
  misc_feature: MA Experiment 20000113 PARAMETER Experiment Name: At_42deg_Heat_cDNA_P Parameter: Tissue Value: Aerial
atgccttacttaaccaacgcagaagagaataggattcctgcaagattgtttctcatagcggttgatgtcccttttttctctcctctgtttcaaagccacacggcacttttggcacctttatcctctgccatggcaacctctaaatcccaacaattccagctaattgaagggatggagcttcagatcaccgtcactggattgccgaatgggagcagtgtaagagctgagtttcacctgaagaactgcactcgcgcatggattcttcattggggttgtatttaccaaggaaataaccattggtatatcccatctgaacattcctcgaagcaaggtgcattgcagactacctttgtgaagagtggggatgcatatgtagtgatccttgagttgcgggatccaagggtacgcgcaattgaatttgttttgaaagatggtagccataacagatgggatgaacgggaatgcaccttgttgcctaatggaaattttaggttgagacagcataatggaaacttccgtgttgagattccctggaatgatctgcatgctcatcatcggataccgaagactctgatagaaagaagagcacataagatatgggaccggaagggacgaccacaaagctctgcacgtgaacaacagatagactatgacaatgcagtaagagagctccacgccgagctcgctagaggaatatctttagacgaacttcaggctaactctacagtaccagtggagaaagaagaaaccagtgagccacatcacacaatgatccaatcatatcgccggaagcatgatgttcagaaatggttacagaaatatacggaaccaatcaacagaagtggaagtgtgaaaagttcagcccttgcagaactctccaagagatctgtgggccaagaaaatctagtttcacagaaaagctttcatgtcagaaactacgagatcacggtcctccaaagggatgttaagggagattgtcgcttatggattgccacgaacatggcaggtccaacagttctccattggggagtcgcaaagtcatctgcaggagagtggttgataccaccacctgacgtgttacctgagaaatcaaaatttgttcacggagcatgtcaaacacaatttaccgatatgtcgagcagagaacactcttatcagtttattgatataaatttaaaacgaggtggttttgttggtatccaatttgtaatatggtcgggaggctactgggtgaacaataacggagccaacttcgttgtaaacctgaagtcagcagacagtaccagtggtaagcttgacgtggatgaaaagtatgttctcaaatggttacttgatgaaatatctgagcgagagaaagaggctgagagatcattgatgcacaggttcaacattgcaacagagttgaccgagcgttgtaaggatgaaggagaaggtggatgtattggtataatggtgtggatgagattcatggccaccagacatctcacctggaataagaactataacgtgaaacctcgggaaattagtgaagcactagaaagattcaccaatttgatggagaaaatatatttgcagcaaccaaataagagagaaattgtgagactaactatggcacttgtgggtcgtggaggtcaaggtgatgttgggcagagaatccgtgacgaaatccttgttattcagagaaataaccactgcaaatccggcatgatggaagagtggcaccaaaagttgcacaacaacagtagcgcagatgatgtgataatttgtgaggctctcttgaactatgtgagatctgacttcaggatcgatgcatactggcaaacactacagaccaatggtctcacaaaagaaaggcttgcaagttatgaccgccccatagtatcagagcctcgtttcagaagtgattctaaagaaggactcatccgtgaccttacaatgtacttgaaaacattaaaggcagttcattcaggtgcagaccttgagtctgctattgatacgttcctttctccatctaagggtcatcatgtctttgctgtcaatggtttatcaccaaaattgcaggatctactgaatttagttaagaggcttgttcgcgaagagaacactgagcccctaatagagaagttagttgatgctcgcattcagttacaccctgcactacgagcacctcgcacgagggcaaaagatttactatttttggacattgcgttggagtcatgttttaaaacaacaatagagaagagactcatctctttaaacttcaataacccaccggaaattatatatgtcatctgcgtggtgcttgagaatctgtgcttatctatagttaacaatgaagaaatcatattctgtacaaagtgggcattgcaaacaaaagcggtccttgaccgtttacaactagtacttgctgatagatgtcagcattattttacaataatacagcctactgcaaaatatcttggtcaactgttacgtgttgacaagcatgggattgatgttttcactgaagaggttataagagcagggccaggagccgttttatcaactcttgtaaacagatttgatccttctctaaggaaaatcgcgaatttaggctgttggcaggttatcagctcggctgatgcatatgggtttgtggtttgtgtgaatgagttaattgttgttcagaacaaattctactcgaagccaactgtaattattgcaagtaaagtcacaggagaagaggagatccctgctggtgttgtagccgtgctgactcctagtatgattgatgtcttgtctcatatatgctttgctacatgcttcgatcagaatgttctcagcaatctgaagtcgaaggaagggagagcaatatctattcatacaaagtctactggtttagttatcagtgatggcaacaactctgatgtctctgttcgtcatatttttatttcctctgttccacggggagtgatctctaaggggaagaagttttgtggccactatgtgatttcatctaaggaattcactgatgaaagggttggctcaaaatcatacaatataaaatttctacgtgaaagagttccatcatggatcaagatacctacctcagctgctcttccattcggaacatttgagaatatactctcagatgattccaataaggatgtagcacgcaggatttctgtccttaaagattctcttaacagaggagacctgacaaaacttaagtccattcaagaagctatcttacaaatgagtgctccaatggctctgagaaatgaactgatcacaaaattgagaagtgaaagaatgccttatcttggtgatgaatcaggctggaaccgctcctgggtggcaattaagaaggtctgggcttcaaagtggaacgagagagcttatgtcagttgcaaaaaaaataagcttgatcatgatgcggtctgcatggctgtgctgattcaagaagtcatttgtggcgattatgctttcgtcattcacacaaacaatccggtctctggtgactcttcagaaatatacacagagattgtgaagggtttgggagagaccttggttggagcatatccaggacgagcaatgagcttcatcaccaagaaaacaaacctcaagtctccaaccgtgatcagttacccaagtaagaggataggtctgtattctaaaccctcaatcatattcagatcagattcaaacaacgaggatctcgaaggcaacgcaggcgctggactttacgacagtgtgataatggatgaagcagaggaagtagtggtggattactcaagggagccactaataatggacaaatcctttcgagtgcgtctattctcagcgattgcagaagctggaaatgtgatagagtcaatctatggttgtcctcaagacattgaaggtgttgtcaaaggtggacatatctacatcgtccaagctagaccccaatcgccgagaaagtctcccgctatggataccgttctcatggctacaacaccaccaatcagatgtcttcatgcttcaattcctacggtgttccgttcgccggcgatttatcaggtcagctgccggagctcccaactgttttcctaccgttcgacgactatgatgagcatgtgttttctcagacggtccgatttgagatctcgctttcttagtactccgaaaaccacttctccgatgagacgacctcgcttttccgtcggtgcttctacggaggagtcttcaattccttctaatcggaaccttatcgtggctaactccgtcgtaatcgtagctttagctgtagctaatcgcgtgctctacaaactcgctttggttcccatgaaacagtacccttttttcatggctcagctcaccactttcggctacgtcttgatttatttcaccattctgtatacgaggcgccgtctaggcattgtgacgaatgaaatgatggatgtacccaaatggagattcgcaatcattggttttctcgaagctcttggtgttgccactggcatggctgcagcagcaatgcttcctggaccagttatacccattttgaatcagacatatttggtgtggcagctgctttttgctcttcttattttaggcaggaggtttttgcttaaccaaattgctggttgtctccttgtggctgtgggggttgtggtggctgtttcaagtggatctggtgcagatactacgctatctggaatcggtttcttatggcctgctgtattggtagcatccgctgcttttcaagctggtgcatctatcataaaggaatttgttttcaatgatgctgcaaagcgtcttgagggaaagtcactggatatatttgtggtaaattcatttggatctggatttcaggctctttttgtgttcctgttgttgccttttctctcaaacttgaaaggcattccattcgccagccttccttcatatctaaaagatggtgccggatgcttcttcaacactggagctaagatttctggctgtgatggtgcccctatactcccactgctctatatatccaccaatctcgctttcaacatctcattgctccatctggtgaaaatatcttcagcaatcgtttcctctcttaccatgatgctctcagtgccattagcggtgtacataatgtcaaaaccattgccgtatctaccgggaggatcaagcttgagctcaaattttacgatggggtgtatagttcttgtcctaggtcttcttctctacaacattcccactactccaactaaacaacacaccaagacctcctaacacactcactcaccattcatcctttttgtgcattacttttttttttgttgataaaccaaattcgtgtaatttcccaattttttttcctttgaccatcaaagatacatagaatattctc

SEQ ID NO: 104644 - protein, 1748 aa, Arabidopsis thaliana
  peptide (1)..(1748): Ceres Seq. ID no. 13615466
  misc_feature (1007)..(1184): Pfam Name: Pyruvate phosphate dikinase, PEP/pyruvate Pfam Description: Pyruvate phosphate dikinase, PEP/pyruvate
  misc_feature (245)..(787): Homolog of NCBI NO: 18391200 NR Description: SEX1 protein; nuclear gene for chloroplast [Arabidopsis thaliana] >gi|12044358|gb|AAG47821.1|AF312027_1 SEX1
  misc_feature (787)..(1310): Homolog of NCBI NO: 18391200 NR Description: SEX1 protein; nuclear gene for chloroplast [Arabidopsis thaliana] >gi|12044358|gb|AAG47821.1|AF312027_1 SEX1
  misc_feature (43)..(282): Homolog of NCBI NO: 18391200 NR Description: SEX1 protein; nuclear gene for chloroplast [Arabidopsis thaliana] >gi|12044358|gb|AAG47821.1|AF312027_1 SEX1
  misc_feature (162)..(788): Homolog of NCBI NO: 20384925 NR Description: R1 [Citrus reticulata]
  misc_feature (750)..(1310): Homolog of NCBI NO: 20384925 NR Description: R1 [Citrus reticulata]
  misc_feature (162)..(787): Homolog of NCBI NO: 13124867 NR Description: starch associated protein R1 [Solanum tuberosum]
  misc_feature (750)..(1310): Homolog of NCBI NO: 13124867 NR Description: starch associated protein R1 [Solanum tuberosum]
  misc_feature (162)..(787): Homolog of NCBI NO: 7489244 NR Description: hypothetical protein R1 - potato
  misc_feature (750)..(1310): Homolog of NCBI NO: 7489244 NR Description: hypothetical protein R1 - potato
  misc_feature (786)..(1310): Homolog of NCBI NO: 28393438 NR Description: unknown protein [Arabidopsis thaliana]
MPYLTNAEENRIPARLFLIAVDVPFFSPLFQSHTALLAPLSSAMATSKSQQFQLIEGMELQITVTGLPNGSSVRAEFHLKNCTRAWILHWGCIYQGNNHWYIPSEHSSKQGALQTTFVKSGDAYVVILELRDPRVRAIEFVLKDGSHNRWDERECTLLPNGNFRLRQHNGNFRVEIPWNDLHAHHRIPKTLIERRAHKIWDRKGRPQSSAREQQIDYDNAVRELHAELARGISLDELQANSTVPVEKEETSEPHHTMIQSYRRKHDVQKWLQKYTEPINRSGSVKSSALAELSKRSVGQENLVSQKSFHVRNYEITVLQRDVKGDCRLWIATNMAGPTVLHWGVAKSSAGEWLIPPPDVLPEKSKFVHGACQTQFTDMSSREHSYQFIDINLKRGGFVGIQFVIWSGGYWVNNNGANFVVNLKSADSTSGKLDVDEKYVLKWLLDEISEREKEAERSLMHRFNIATELTERCKDEGEGGCIGIMVWMRFMATRHLTWNKNYNVKPREISEALERFTNLMEKIYLQQPNKREIVRLTMALVGRGGQGDVGQRIRDEILVIQRNNHCKSGMMEEWHQKLHNNSSADDVIICEALLNYVRSDFRIDAYWQTLQTNGLTKERLASYDRPIVSEPRFRSDSKEGLIRDLTMYLKTLKAVHSGADLESAIDTFLSPSKGHHVFAVNGLSPKLQDLLNLVKRLVREENTEPLIEKLVDARIQLHPALRAPRTRAKDLLFLDIALESCFKTTIEKRLISLNFNNPPEIIYVICVVLENLCLSIVNNEEIIFCTKWALQTKAVLDRLQLVLADRCQHYFTIIQPTAKYLGQLLRVDKHGIDVFTEEVIRAGPGAVLSTLVNRFDPSLRKIANLGCWQVISSADAYGFVVCVNELIVVQNKFYSKPTVIIASKVTGEEEIPAGVVAVLTPSMIDVLSHICFATCFDQNVLSNLKSKEGRAISIHTKSTGLVISDGNNSDVSVRHIFISSVPRGVISKGKKFCGHYVISSKEFTDERVGSKSYNIKFLRERVPSWIKIPTSAALPFGTFENILSDDSNKDVARRISVLKDSLNRGDLTKLKSIQEAILQMSAPMALRNELITKLRSERMPYLGDESGWNRSWVAIKKVWASKWNERAYVSCKKNKLDHDAVCMAVLIQEVICGDYAFVIHTNNPVSGDSSEIYTEIVKGLGETLVGAYPGRAMSFITKKTNLKSPTVISYPSKRIGLYSKPSIIFRSDSNNEDLEGNAGAGLYDSVIMDEAEEVVVDYSREPLIMDKSFRVRLFSAIAEAGNVIESIYGCPQDIEGVVKGGHIYIVQARPQSPRKSPAMDTVLMATTPPIRCLHASIPTVFRSPAIYQVSCRSSQLFSYRSTTMMSMCFLRRSDLRSRFLSTPKTTSPMRRPRFSVGASTEESSIPSNRNLIVANSVVIVALAVANRVLYKLALVPMKQYPFFMAQLTTFGYVLIYFTILYTRRRLGIVTNEMMDVPKWRFAIIGFLEALGVATGMAAAAMLPGPVIPILNQTYLVWQLLFALLILGRRFLLNQIAGCLLVAVGVVVAVSSGSGADTTLSGIGFLWPAVLVASAAFQAGASIIKEFVFNDAAKRLEGKSLDIFVVNSFGSGFQALFVFLLLPFLSNLKGIPFASLPSYLKDGAGCFFNTGAKISGCDGAPILPLLYISTNLAFNISLLHLVKISSAIVSSLTMMLSVPLAVYIMSKPLPYLPGGSSLSSNFTMGCIVLVLGLLLYNIPTTPTKQHTKTS

SEQ ID NO: 104645 - protein, 1705 aa, Arabidopsis thaliana
  peptide (1)..(1705): Ceres Seq. ID no. 13615467
  misc_feature (964)..(1141): Pfam Name: Pyruvate phosphate dikinase, PEP/pyruvate Pfam Description: Pyruvate phosphate dikinase, PEP/pyruvate
  misc_feature (202)..(744): Homolog of NCBI NO: 18391200 NR Description: SEX1 protein; nuclear gene for chloroplast [Arabidopsis thaliana] >gi|12044358|gb|AAG47821.1|AF312027_1 SEX1
  misc_feature (744)..(1267): Homolog of NCBI NO: 18391200 NR Description: SEX1 protein; nuclear gene for chloroplast [Arabidopsis thaliana] >gi|12044358|gb|AAG47821.1|AF312027_1 SEX1
  misc_feature (1)..(239): Homolog of NCBI NO: 18391200 NR Description: SEX1 protein; nuclear gene for chloroplast [Arabidopsis thaliana] >gi|12044358|gb|AAG47821.1|AF312027_1 SEX1
  misc_feature (119)..(745): Homolog of NCBI NO: 20384925 NR Description: R1 [Citrus reticulata]
  misc_feature (707)..(1267): Homolog of NCBI NO: 20384925 NR Description: R1 [Citrus reticulata]
  misc_feature (119)..(744): Homolog of NCBI NO: 13124867 NR Description: starch associated protein R1 [Solanum tuberosum]
  misc_feature (707)..(1267): Homolog of NCBI NO: 13124867 NR Description: starch associated protein R1 [Solanum tuberosum]
  misc_feature (119)..(744): Homolog of NCBI NO: 7489244 NR Description: hypothetical protein R1 - potato
  misc_feature (707)..(1267): Homolog of NCBI NO: 7489244 NR Description: hypothetical protein R1 - potato
  misc_feature (743)..(1267): Homolog of NCBI NO: 28393438 NR Description: unknown protein [Arabidopsis thaliana]
MATSKSQQFQLIEGMELQITVTGLPNGSSVRAEFHLKNCTRAWILHWGCIYQGNNHWYIPSEHSSKQGALQTTFVKSGDAYVVILELRDPRVRAIEFVLKDGSHNRWDERECTLLPNGNFRLRQHNGNFRVEIPWNDLHAHHRIPKTLIERRAHKIWDRKGRPQSSAREQQIDYDNAVRELHAELARGISLDELQANSTVPVEKEETSEPHHTMIQSYRRKHDVQKWLQKYTEPINRSGSVKSSALAELSKRSVGQENLVSQKSFHVRNYEITVLQRDVKGDCRLWIATNMAGPTVLHWGVAKSSAGEWLIPPPDVLPEKSKFVHGACQTQFTDMSSREHSYQFIDINLKRGGFVGIQFVIWSGGYWVNNNGANFVVNLKSADSTSGKLDVDEKYVLKWLLDEISEREKEAERSLMHRFNIATELTERCKDEGEGGCIGIMVWMRFMATRHLTWNKNYNVKPREISEALERFTNLMEKIYLQQPNKREIVRLTMALVGRGGQGDVGQRIRDEILVIQRNNHCKSGMMEEWHQKLHNNSSADDVIICEALLNYVRSDFRIDAYWQTLQTNGLTKERLASYDRPIVSEPRFRSDSKEGLIRDLTMYLKTLKAVHSGADLESAIDTFLSPSKGHHVFAVNGLSPKLQDLLNLVKRLVREENTEPLIEKLVDARIQLHPALRAPRTRAKDLLFLDIALESCFKTTIEKRLISLNFNNPPEIIYVICVVLENLCLSIVNNEEIIFCTKWALQTKAVLDRLQLVLADRCQHYFTIIQPTAKYLGQLLRVDKHGIDVFTEEVIRAGPGAVLSTLVNRFDPSLRKIANLGCWQVISSADAYGFVVCVNELIVVQNKFYSKPTVIIASKVTGEEEIPAGVVAVLTPSMIDVLSHICFATCFDQNVLSNLKSKEGRAISIHTKSTGLVISDGNNSDVSVRHIFISSVPRGVISKGKKFCGHYVISSKEFTDERVGSKSYNIKFLRERVPSWIKIPTSAALPFGTFENILSDDSNKDVARRISVLKDSLNRGDLTKLKSIQEAILQMSAPMALRNELITKLRSERMPYLGDESGWNRSWVAIKKVWASKWNERAYVSCKKNKLDHDAVCMAVLIQEVICGDYAFVIHTNNPVSGDSSEIYTEIVKGLGETLVGAYPGRAMSFITKKTNLKSPTVISYPSKRIGLYSKPSIIFRSDSNNEDLEGNAGAGLYDSVIMDEAEEVVVDYSREPLIMDKSFRVRLFSAIAEAGNVIESIYGCPQDIEGVVKGGHIYIVQARPQSPRKSPAMDTVLMATTPPIRCLHASIPTVFRSPAIYQVSCRSSQLFSYRSTTMMSMCFLRRSDLRSRFLSTPKTTSPMRRPRFSVGASTEESSIPSNRNLIVANSVVIVALAVANRVLYKLALVPMKQYPFFMAQLTTFGYVLIYFTILYTRRRLGIVTNEMMDVPKWRFAIIGFLEALGVATGMAAAAMLPGPVIPILNQTYLVWQLLFALLILGRRFLLNQIAGCLLVAVGVVVAVSSGSGADTTLSGIGFLWPAVLVASAAFQAGASIIKEFVFNDAAKRLEGKSLDIFVVNSFGSGFQALFVFLLLPFLSNLKGIPFASLPSYLKDGAGCFFNTGAKISGCDGAPILPLLYISTNLAFNISLLHLVKISSAIVSSLTMMLSVPLAVYIMSKPLPYLPGGSSLSSNFTMGCIVLVLGLLLYNIPTTPTKQHTKTS

SEQ ID NO: 104646 - protein, 1691 aa, Arabidopsis thaliana
  peptide (1)..(1691): Ceres Seq. ID no. 13615468
  misc_feature (950)..(1127): Pfam Name: Pyruvate phosphate dikinase, PEP/pyruvate Pfam Description: Pyruvate phosphate dikinase, PEP/pyruvate
  misc_feature (188)..(730): Homolog of NCBI NO: 18391200 NR Description: SEX1 protein; nuclear gene for chloroplast [Arabidopsis thaliana] >gi|12044358|gb|AAG47821.1|AF312027_1 SEX1
  misc_feature (730)..(1253): Homolog of NCBI NO: 18391200 NR Description: SEX1 protein; nuclear gene for chloroplast [Arabidopsis thaliana] >gi|12044358|gb|AAG47821.1|AF312027_1 SEX1
  misc_feature (1)..(225): Homolog of NCBI NO: 18391200 NR Description: SEX1 protein; nuclear gene for chloroplast [Arabidopsis thaliana] >gi|12044358|gb|AAG47821.1|AF312027_1 SEX1
  misc_feature (105)..(731): Homolog of NCBI NO: 20384925 NR Description: R1 [Citrus reticulata]
  misc_feature (693)..(1253): Homolog of NCBI NO: 20384925 NR Description: R1 [Citrus reticulata]
  misc_feature (105)..(730): Homolog of NCBI NO: 13124867 NR Description: starch associated protein R1 [Solanum tuberosum]
  misc_feature (693)..(1253): Homolog of NCBI NO: 13124867 NR Description: starch associated protein R1 [Solanum tuberosum]
  misc_feature (105)..(730): Homolog of NCBI NO: 7489244 NR Description: hypothetical protein R1 - potato
  misc_feature (693)..(1253): Homolog of NCBI NO: 7489244 NR Description: hypothetical protein R1 - potato
  misc_feature (729)..(1253): Homolog of NCBI NO: 28393438 NR Description: unknown protein [Arabidopsis thaliana]
MELQITVTGLPNGSSVRAEFHLKNCTRAWILHWGCIYQGNNHWYIPSEHSSKQGALQTTFVKSGDAYVVILELRDPRVRAIEFVLKDGSHNRWDERECTLLPNGNFRLRQHNGNFRVEIPWNDLHAHHRIPKTLIERRAHKIWDRKGRPQSSAREQQIDYDNAVRELHAELARGISLDELQANSTVPVEKEETSEPHHTMIQSYRRKHDVQKWLQKYTEPINRSGSVKSSALAELSKRSVGQENLVSQKSFHVRNYEITVLQRDVKGDCRLWIATNMAGPTVLHWGVAKSSAGEWLIPPPDVLPEKSKFVHGACQTQFTDMSSREHSYQFIDINLKRGGFVGIQFVIWSGGYWVNNNGANFVVNLKSADSTSGKLDVDEKYVLKWLLDEISEREKEAERSLMHRFNIATELTERCKDEGEGGCIGIMVWMRFMATRHLTWNKNYNVKPREISEALERFTNLMEKIYLQQPNKREIVRLTMALVGRGGQGDVGQRIRDEILVIQRNNHCKSGMMEEWHQKLHNNSSADDVIICEALLNYVRSDFRIDAYWQTLQTNGLTKERLASYDRPIVSEPRFRSDSKEGLIRDLTMYLKTLKAVHSGADLESAIDTFLSPSKGHHVFAVNGLSPKLQDLLNLVKRLVREENTEPLIEKLVDARIQLHPALRAPRTRAKDLLFLDIALESCFKTTIEKRLISLNFNNPPEIIYVICVVLENLCLSIVNNEEIIFCTKWALQTKAVLDRLQLVLADRCQHYFTIIQPTAKYLGQLLRVDKHGIDVFTEEVIRAGPGAVLSTLVNRFDPSLRKIANLGCWQVISSADAYGFVVCVNELIVVQNKFYSKPTVIIASKVTGEEEIPAGVVAVLTPSMIDVLSHICFATCFDQNVLSNLKSKEGRAISIHTKSTGLVISDGNNSDVSVRHIFISSVPRGVISKGKKFCGHYVISSKEFTDERVGSKSYNIKFLRERVPSWIKIPTSAALPFGTFENILSDDSNKDVARRISVLKDSLNRGDLTKLKSIQEAILQMSAPMALRNELITKLRSERMPYLGDESGWNRSWVAIKKVWASKWNERAYVSCKKNKLDHDAVCMAVLIQEVICGDYAFVIHTNNPVSGDSSEIYTEIVKGLGETLVGAYPGRAMSFITKKTNLKSPTVISYPSKRIGLYSKPSIIFRSDSNNEDLEGNAGAGLYDSVIMDEAEEVVVDYSREPLIMDKSFRVRLFSAIAEAGNVIESIYGCPQDIEGVVKGGHIYIVQARPQSPRKSPAMDTVLMATTPPIRCLHASIPTVFRSPAIYQVSCRSSQLFSYRSTTMMSMCFLRRSDLRSRFLSTPKTTSPMRRPRFSVGASTEESSIPSNRNLIVANSVVIVALAVANRVLYKLALVPMKQYPFFMAQLTTFGYVLIYFTILYTRRRLGIVTNEMMDVPKWRFAIIGFLEALGVATGMAAAAMLPGPVIPILNQTYLVWQLLFALLILGRRFLLNQIAGCLLVAVGVVVAVSSGSGADTTLSGIGFLWPAVLVASAAFQAGASIIKEFVFNDAAKRLEGKSLDIFVVNSFGSGFQALFVFLLLPFLSNLKGIPFASLPSYLKDGAGCFFNTGAKISGCDGAPILPLLYISTNLAFNISLLHLVKISSAIVSSLTMMLSVPLAVYIMSKPLPYLPGGSSLSSNFTMGCIVLVLGLLLYNIPTTPTKQHTKTS

SEQ ID NO: 104647 - DNA, 1032 bp, Arabidopsis thaliana
  misc_feature (1)..(1032): Ceres Seq. ID no. 13615473
  misc_feature: MA Experiment ID: 108461 Result: Up-regulated in Transcription
  misc_feature: MA Experiment 108461 PARAMETER Experiment Name: At_Germinating_Seeds_cDNA_P Parameter: Age (day) Value: 1 vs. 0
  misc_feature: MA Experiment 108461 PARAMETER Experiment Name: At_Germinating_Seeds_cDNA_P Parameter: Tissue Value: Germinating Seeds
  misc_feature: MA Experiment ID: 108577 Result: Down-regulated in Transcription
  misc_feature: MA Experiment 108577 PARAMETER Experiment Name: At_42deg_Heat_cDNA_P Parameter: Temperature (deg C) Value: 42 vs. 22
  misc_feature: MA Experiment 108577 PARAMETER Experiment Name: At_42deg_Heat_cDNA_P Parameter: Timepoint (hr) Value: 6
  misc_feature: MA Experiment 108577 PARAMETER Experiment Name: At_42deg_Heat_cDNA_P Parameter: Tissue Value: Aerial
  misc_feature: MA Experiment ID: 108595 Result: Down-regulated in Transcription
  misc_feature: MA Experiment 108595 PARAMETER Experiment Name: At_Ler-pi_Ovule_cDNA_P Parameter: Plant Line Value: null
  misc_feature: MA Experiment ID: 20000069 Result: Up-regulated in Transcription
  misc_feature: MA Experiment 20000069 PARAMETER Experiment Name: At_100uM_ABA_Mutants_cDNA_P Parameter: Plant Line Value: CS23
  misc_feature: MA Experiment 20000069 PARAMETER Experiment Name: At_100uM_ABA_Mutants_cDNA_P Parameter: Timepoint (hr) Value: 6
  misc_feature: MA Experiment 20000069 PARAMETER Experiment Name: At_100uM_ABA_Mutants_cDNA_P Parameter: Tissue Value: Aerial
  misc_feature: MA Experiment 20000069 PARAMETER Experiment Name: At_100uM_ABA_Mutants_cDNA_P Parameter: Treatment Value: 100uM ABA vs. No Treatment
  misc_feature: MA Experiment ID: 20000111 Result: Down-regulated in Transcription
  misc_feature: MA Experiment 20000111 PARAMETER Experiment Name: At_42deg_Heat_cDNA_P Parameter: Temperature (deg C) Value: 42 vs. 22
  misc_feature: MA Experiment 20000111 PARAMETER Experiment Name: At_42deg_Heat_cDNA_P Parameter: Timepoint (hr) Value: 6
  misc_feature: MA Experiment 20000111 PARAMETER Experiment Name: At_42deg_Heat_cDNA_P Parameter: Tissue Value: Aerial
  misc_feature: MA Experiment ID: 20000173 Result: Down-regulated in Transcription
  misc_feature: MA Experiment 20000173 PARAMETER Experiment Name: At_42deg_Heat_P Parameter: Age (day) Value: 14
  misc_feature: MA Experiment 20000173 PARAMETER Experiment Name: At_42deg_Heat_P Parameter: Organism Value: A. thaliana
  misc_feature: MA Experiment 20000173 PARAMETER Experiment Name: At_42deg_Heat_P Parameter: Plant Line Value: WS
  misc_feature: MA Experiment 20000173 PARAMETER Experiment Name: At_42deg_Heat_P Parameter: Temperature (deg C) Value: 42 vs. 22
  misc_feature: MA Experiment 20000173 PARAMETER Experiment Name: At_42deg_Heat_P Parameter: Timepoint (hr) Value: 6
  misc_feature: MA Experiment 20000173 PARAMETER Experiment Name: At_42deg_Heat_P Parameter: Tissue Value: Aerial
  misc_feature: MA Experiment ID: 20000179 Result: Up-regulated in Transcription
  misc_feature: MA Experiment 20000179 PARAMETER Experiment Name: At_Germinating_Seeds_P Parameter: Age (hr) Value: 6 vs. 0
  misc_feature: MA Experiment 20000179 PARAMETER Experiment Name: At_Germinating_Seeds_P Parameter: Tissue Value: Germinating Seeds
  misc_feature: MA Experiment ID: 20000180 Result: Up-regulated in Transcription
  misc_feature: MA Experiment 20000180 PARAMETER Experiment Name: At_Germinating_Seeds_P Parameter: Age (hr) Value: 24 vs. 0
  misc_feature: MA Experiment 20000180 PARAMETER Experiment Name: At_Germinating_Seeds_P Parameter: Tissue Value: Germinating Seeds
  misc_feature: MA Experiment ID: 20000184 Result: Down-regulated in Transcription
  misc_feature: MA Experiment 20000184 PARAMETER Experiment Name: At_Shoots__P Parameter: Age (day) Value: 7
  misc_feature: MA Experiment 20000184 PARAMETER Experiment Name: At_Shoots__P Parameter: Tissue Value: Shoots vs. Whole Plant
  misc_feature: MA Experiment ID: 20000224 Result: Down-regulated in Transcription
  misc_feature: MA Experiment ID: 20000496 Result: Down-regulated in Transcription
  misc_feature: MA Experiment 20000496 PARAMETER Experiment Name: At_Guard_Cells_P Parameter: Harvest Date Value: 7/19/2002
  misc_feature: MA Experiment 20000496 PARAMETER Experiment Name: At_Guard_Cells_P Parameter: Organism Value: Canola
  misc_feature: MA Experiment 20000496 PARAMETER Experiment Name: At_Guard_Cells_P Parameter: Tissue Value: Guard Cells vs. Leaves
  misc_feature: MA Experiment ID: 20001451 Result: Down-regulated in Transcription
  misc_feature: MA Experiment 20001451 PARAMETER Experiment Name: At_Far-red-induction_P Parameter: Age (day) Value: 7
  misc_feature: MA Experiment 20001451 PARAMETER Experiment Name: At_Far-red-induction_P Parameter: Light Value: Far-red vs. White
  misc_feature: MA Experiment 20001451 PARAMETER Experiment Name: At_Far-red-induction_P Parameter: Organism Value: A. thaliana
  misc_feature: MA Experiment 20001451 PARAMETER Experiment Name: At_Far-red-induction_P Parameter: Plant Line Value: Columbia
  misc_feature: MA Experiment 20001451 PARAMETER Experiment Name: At_Far-red-induction_P Parameter: Timepoint (hr) Value: 24
  misc_feature: MA Experiment 20001451 PARAMETER Experiment Name: At_Far-red-induction_P Parameter: Tissue Value: Whole Plant
  misc_feature: MA Experiment ID: 20001558 Result: Down-regulated in Transcription
  misc_feature: MA Experiment 20001558 PARAMETER Experiment Name: At_Drought_Soil_Dry_P Parameter: Age (day) Value: 27
  misc_feature: MA Experiment 20001558 PARAMETER Experiment Name: At_Drought_Soil_Dry_P Parameter: Organism Value: A. thaliana
  misc_feature: MA Experiment 20001558 PARAMETER Experiment Name: At_Drought_Soil_Dry_P Parameter: Plant Line Value: WS
  misc_feature: MA Experiment 20001558 PARAMETER Experiment Name: At_Drought_Soil_Dry_P Parameter: Post Timepoint (hr) Value: 6
  misc_feature: MA Experiment 20001558 PARAMETER Experiment Name: At_Drought_Soil_Dry_P Parameter: Post-Treatment Value: Re-Water vs. No Drought
  misc_feature: MA Experiment 20001558 PARAMETER Experiment Name: At_Drought_Soil_Dry_P Parameter: Timepoint (day) Value: 13
  misc_feature: MA Experiment 20001558 PARAMETER Experiment Name: At_Drought_Soil_Dry_P Parameter: Treatment Value: Drought vs. No Drought
tctctatattgccgatcgatctccaagtttgctaaatcgccgggaactttactgaaatttggagctagtcatgtcttcggatcctgacaaaatgatgtccaaagccgacaaaatgacaaagctcacgcttactagatggagtgctgattggagaggtgctactgagttgtatgagcaagcagcaaatgggtttagagcatcaaacaaatatgagaaagctaaagtggctctcgagaaagcttcaaaaggacaagagatgcaagcttctccttgggatgctgcaaagcatatggagtctgctgctgccttagcacagaagctaagtatttggaatgaagttgctgatttttatagaaaggcgtcggagctgtatgttgagtgtggaagggcacaacccgcatcagatgctcttggaaaggctgcccgtgctttggaagatgtcaaaccagatgacgccatccaactatacactgatgcttgtgaaattcttgaagaggatgggagggaccaaatggcctttgatctgtaccgtgcttgtgctaatgtctacattaagcttgagaagttcacagatgctgcaacctttttcttaagattgggtgtagctgctgataagtgtgatgcgacaaatagccagtgtaaggcctatctcagtgcaatcatcttatatctgtatgctcacgacctgcagcaggcagaaaaatgctacaatgactgttctcagattgatgcctttctgaagagtgatcagagccgaagtgctagtagacttctcaccgcctataatgaaggtgacattgaagaaatcaagaaggtggcgagtgcaagcactgtctcgaatttggatcatatgattatcaagttggctaggaagctacccactggagatgttactgcaattcagatgaacactaatgacgatctagacgaggatgatctcacttaaagtttctcctctttgtacatattcatatttacacttggcttcttttcagtccaaagattcaaaaaaaacatattatcgtttgtccc

SEQ ID NO: 104648 - protein, 291 aa, Arabidopsis thaliana
  peptide (1)..(291): Ceres Seq. ID no. 13615474
  misc_feature (1)..(291): Homolog of NCBI NO: 18415496 NR Description: gamma-soluble NSF attachment protein (gamma-SNAP)
  misc_feature (1)..(265): Homolog of NCBI NO: 7486759 NR Description: hypothetical protein F9F13.60 - Arabidopsis >gi|5262164|emb|CAB45807.1| putative protein [Arabidopsis >gi|7268837|emb|CAB79041.1| putative protein [Arabidopsis
  misc_feature (261)..(291): Homolog of NCBI NO: 7486759 NR Description: hypothetical protein F9F13.60 - Arabidopsis >gi|5262164|emb|CAB45807.1| putative protein [Arabidopsis >gi|7268837|emb|CAB79041.1| putative protein [Arabidopsis
  misc_feature (1)..(291): Homolog of NCBI NO: 21554919 NR Description: unknown [Arabidopsis thaliana]
  misc_feature (2)..(291): Homolog of NCBI NO: 38344323 NR Description: OSJNBa0058K23.5 [Oryza sativa (japonica
  misc_feature (67)..(291): Homolog of NCBI NO: 5852090 NR Description: zwh13.1 [Oryza sativa (indica cultivar-group)]
  misc_feature (6)..(269): Homolog of NCBI NO: 5639862 NR Description: soluble NSF attachment protein gamma isoform
  misc_feature (9)..(274): Homolog of NCBI NO: 12804881 NR Description: N-ethylmaleimide-sensitive factor attachment
  misc_feature (9)..(274): Homolog of NCBI NO: 34932055 NR Description: similar to Gamma-soluble NSF attachment protein
  misc_feature (9)..(274): Homolog of NCBI NO: 26355647 NR Description: unnamed protein product [Mus musculus]
MSSDPDKMMSKADKMTKLTLTRWSADWRGATELYEQAANGFRASNKYEKAKVALEKASKGQEMQASPWDAAKHMESAAALAQKLSIWNEVADFYRKASELYVECGRAQPASDALGKAARALEDVKPDDAIQLYTDACEILEEDGRDQMAFDLYRACANVYIKLEKFTDAATFFLRLGVAADKCDATNSQCKAYLSAIILYLYAHDLQQAEKCYNDCSQIDAFLKSDQSRSASRLLTAYNEGDIEEIKKVASASTVSNLDHMIIKLARKLPTGDVTAIQMNTNDDLDEDDLT

SEQ ID NO: 104649 - protein, 284 aa, Arabidopsis thaliana
  peptide (1)..(284): Ceres Seq. ID no. 13615475
  misc_feature (1)..(284): Homolog of NCBI NO: 18415496 NR Description: gamma-soluble NSF attachment protein (gamma-SNAP)
  misc_feature (1)..(258): Homolog of NCBI NO: 7486759 NR Description: hypothetical protein F9F13.60 - Arabidopsis >gi|5262164|emb|CAB45807.1| putative protein [Arabidopsis >gi|7268837|emb|CAB79041.1| putative protein [Arabidopsis
  misc_feature (254)..(284): Homolog of NCBI NO: 7486759 NR Description: hypothetical protein F9F13.60 - Arabidopsis >gi|5262164|emb|CAB45807.1| putative protein [Arabidopsis >gi|7268837|emb|CAB79041.1| putative protein [Arabidopsis
  misc_feature (1)..(284): Homolog of NCBI NO: 21554919 NR Description: unknown [Arabidopsis thaliana]
  misc_feature (1)..(284): Homolog of NCBI NO: 38344323 NR Description: OSJNBa0058K23.5 [Oryza sativa (japonica
  misc_feature (60)..(284): Homolog of NCBI NO: 5852090 NR Description: zwh13.1 [Oryza sativa (indica cultivar-group)]
  misc_feature (1)..(262): Homolog of NCBI NO: 5639862 NR Description: soluble NSF attachment protein gamma isoform
  misc_feature (2)..(267): Homolog of NCBI NO: 12804881 NR Description: N-ethylmaleimide-sensitive factor attachment
  misc_feature (2)..(267): Homolog of NCBI NO: 34932055 NR Description: similar to Gamma-soluble NSF attachment protein
  misc_feature (2)..(267): Homolog of NCBI NO: 26355647 NR Description: unnamed protein product [Mus musculus]
MMSKADKMTKLTLTRWSADWRGATELYEQAANGFRASNKYEKAKVALEKASKGQEMQASPWDAAKHMESAAALAQKLSIWNEVADFYRKASELYVECGRAQPASDALGKAARALEDVKPDDAIQLYTDACEILEEDGRDQMAFDLYRACANVYIKLEKFTDAATFFLRLGVAADKCDATNSQCKAYLSAIILYLYAHDLQQAEKCYNDCSQIDAFLKSDQSRSASRLLTAYNEGDIEEIKKVASASTVSNLDHMIIKLARKLPTGDVTAIQMNTNDDLDEDDLT

SEQ ID NO: 104650 - protein, 283 aa, Arabidopsis thaliana
  peptide (1)..(283): Ceres Seq. ID no. 13615476
  misc_feature (1)..(283): Homolog of NCBI NO: 18415496 NR Description: gamma-soluble NSF attachment protein (gamma-SNAP)
  misc_feature (1)..(257): Homolog of NCBI NO: 7486759 NR Description: hypothetical protein F9F13.60 - Arabidopsis >gi|5262164|emb|CAB45807.1| putative protein [Arabidopsis >gi|7268837|emb|CAB79041.1| putative protein [Arabidopsis
  misc_feature (253)..(283): Homolog of NCBI NO: 7486759 NR Description: hypothetical protein F9F13.60 - Arabidopsis >gi|5262164|emb|CAB45807.1| putative protein [Arabidopsis >gi|7268837|emb|CAB79041.1| putative protein [Arabidopsis
  misc_feature (1)..(283): Homolog of NCBI NO: 21554919 NR Description: unknown [Arabidopsis thaliana]
  misc_feature (1)..(283): Homolog of NCBI NO: 38344323 NR Description: OSJNBa0058K23.5 [Oryza sativa (japonica
  misc_feature (59)..(283): Homolog of NCBI NO: 5852090 NR Description: zwh13.1 [Oryza sativa (indica cultivar-group)]
  misc_feature (1)..(261): Homolog of NCBI NO: 5639862 NR Description: soluble NSF attachment protein gamma isoform
  misc_feature (1)..(266): Homolog of NCBI NO: 12804881 NR Description: N-ethylmaleimide-sensitive factor attachment
  misc_feature (1)..(266): Homolog of NCBI NO: 34932055 NR Description: similar to Gamma-soluble NSF attachment protein
  misc_feature (1)..(266): Homolog of NCBI NO: 26355647 NR Description: unnamed protein product [Mus musculus]
MSKADKMTKLTLTRWSADWRGATELYEQAANGFRASNKYEKAKVALEKASKGQEMQASPWDAAKHMESAAALAQKLSIWNEVADFYRKASELYVECGRAQPASDALGKAARALEDVKPDDAIQLYTDACEILEEDGRDQMAFDLYRACANVYIKLEKFTDAATFFLRLGVAADKCDATNSQCKAYLSAIILYLYAHDLQQAEKCYNDCSQIDAFLKSDQSRSASRLLTAYNEGDIEEIKKVASASTVSNLDHMIIKLARKLPTGDVTAIQMNTNDDLDEDDLT

SEQ ID NO: 104651 - DNA, 1797 bp, Arabidopsis thaliana
  misc_feature (1)..(1797): Ceres Seq. ID no. 13615477
  misc_feature: MA Experiment ID: 108434 Result: Down-regulated in Transcription
  misc_feature: MA Experiment 108434 PARAMETER Experiment Name: At_Root_Tips_cDNA_P Parameter: Tissue Value: Root Tips
  misc_feature: MA Experiment ID: 108464 Result: Up-regulated in Transcription
  misc_feature: MA Experiment 108464 PARAMETER Experiment Name: At_Germinating_Seeds_cDNA_P Parameter: Age (day) Value: 4 vs. 0
  misc_feature: MA Experiment 108464 PARAMETER Experiment Name: At_Germinating_Seeds_cDNA_P Parameter: Tissue Value: Germinating Seeds
  misc_feature: MA Experiment ID: 108574 Result: Up-regulated in Transcription
  misc_feature: MA Experiment 108574 PARAMETER Experiment Name: At_Wounding__cDNA_P Parameter: Timepoint (hr) Value: 1
  misc_feature: MA Experiment 108574 PARAMETER Experiment Name: At_Wounding__cDNA_P Parameter: Tissue Value: Aerial
  misc_feature: MA Experiment 108574 PARAMETER Experiment Name: At_Wounding__cDNA_P Parameter: Treatment Value: Wounding vs. No Wounding
  misc_feature: MA Experiment ID: 108579 Result: Up-regulated in Transcription
  misc_feature: MA Experiment 108579 PARAMETER Experiment Name: At_4deg_Cold_cDNA_P Parameter: Temperature (deg C) Value: 4 vs. 22
  misc_feature: MA Experiment 108579 PARAMETER Experiment Name: At_4deg_Cold_cDNA_P Parameter: Timepoint (hr) Value: 6
  misc_feature: MA Experiment 108579 PARAMETER Experiment Name: At_4deg_Cold_cDNA_P Parameter: Tissue Value: Aerial
  misc_feature: MA Experiment ID: 108585 Result: Up-regulated in Transcription
  misc_feature: MA Experiment 108585 PARAMETER Experiment Name: At_5mM_NaNP_cDNA_P Parameter: Timepoint (hr) Value: 6
  misc_feature: MA Experiment 108585 PARAMETER Experiment Name: At_5mM_NaNP_cDNA_P Parameter: Tissue Value: Aerial
  misc_feature: MA Experiment 108585 PARAMETER Experiment Name: At_5mM_NaNP_cDNA_P Parameter: Treatment Value: null
  misc_feature: MA Experiment ID: 108594 Result: Down-regulated in Transcription
  misc_feature: MA Experiment 108594 PARAMETER Experiment Name: At_Ler-rhl_Root_cDNA_P Parameter: Plant Line Value: null
  misc_feature: MA Experiment ID: 108668 Result: Up-regulated in Transcription
  misc_feature: MA Experiment 108668 PARAMETER Experiment Name: At_2mM_SA_cDNA_P Parameter: Plant Line Value: WS
  misc_feature: MA Experiment 108668 PARAMETER Experiment Name: At_2mM_SA_cDNA_P Parameter: Timepoint (hr) Value: 6
  misc_feature: MA Experiment 108668 PARAMETER Experiment Name: At_2mM_SA_cDNA_P Parameter: Treatment Value: 2mM SA vs. No Treatment
  misc_feature: MA Experiment ID: 20000069 Result: Up-regulated in Transcription
  misc_feature: MA Experiment 20000069 PARAMETER Experiment Name: At_100uM_ABA_Mutants_cDNA_P Parameter: Plant Line Value: CS23
  misc_feature: MA Experiment 20000069 PARAMETER Experiment Name: At_100uM_ABA_Mutants_cDNA_P Parameter: Timepoint (hr) Value: 6
  misc_feature: MA Experiment 20000069 PARAMETER Experiment Name: At_100uM_ABA_Mutants_cDNA_P Parameter: Tissue Value: Aerial
  misc_feature: MA Experiment 20000069 PARAMETER Experiment Name: At_100uM_ABA_Mutants_cDNA_P Parameter: Treatment Value: 100uM ABA vs. No Treatment
  misc_feature: MA Experiment ID: 20000070 Result: Up-regulated in Transcription
  misc_feature: MA Experiment 20000070 PARAMETER Experiment Name: At_100uM_ABA_Mutants_cDNA_P Parameter: Plant Line Value: CS24
  misc_feature: MA Experiment 20000070 PARAMETER Experiment Name: At_100uM_ABA_Mutants_cDNA_P Parameter: Timepoint (hr) Value: 6
  misc_feature: MA Experiment 20000070 PARAMETER Experiment Name: At_100uM_ABA_Mutants_cDNA_P Parameter: Tissue Value: Aerial
  misc_feature: MA Experiment 20000070 PARAMETER Experiment Name: At_100uM_ABA_Mutants_cDNA_P Parameter: Treatment Value: 100uM ABA vs. No Treatment
  misc_feature: MA Experiment ID: 20000071 Result: Up-regulated in Transcription
  misc_feature: MA Experiment 20000071 PARAMETER Experiment Name: At_100uM_ABA_Mutants_cDNA_P Parameter: Plant Line Value: CS8104
  misc_feature: MA Experiment 20000071 PARAMETER Experiment Name: At_100uM_ABA_Mutants_cDNA_P Parameter: Timepoint (hr) Value: 6
  misc_feature: MA Experiment 20000071 PARAMETER Experiment Name: At_100uM_ABA_Mutants_cDNA_P Parameter: Tissue Value: Aerial
  misc_feature: MA Experiment 20000071 PARAMETER Experiment Name: At_100uM_ABA_Mutants_cDNA_P Parameter: Treatment Value: 100uM ABA vs. No Treatment
  misc_feature: MA Experiment ID: 20000182 Result: Up-regulated in Transcription
  misc_feature: MA Experiment 20000182 PARAMETER Experiment Name: At_2mM_SA_P Parameter: Age (day) Value: 14
  misc_feature: MA Experiment 20000182 PARAMETER Experiment Name: At_2mM_SA_P Parameter: Organism Value: A. thaliana
  misc_feature: MA Experiment 20000182 PARAMETER Experiment Name: At_2mM_SA_P Parameter: Plant Line Value: WS
  misc_feature: MA Experiment 20000182 PARAMETER Experiment Name: At_2mM_SA_P Parameter: Timepoint (hr) Value: 6
  misc_feature: MA Experiment 20000182 PARAMETER Experiment Name: At_2mM_SA_P Parameter: Tissue Value: Aerial
  misc_feature: MA Experiment 20000182 PARAMETER Experiment Name: At_2mM_SA_P Parameter: Treatment Value: 2mM SA vs. No Treatment
  misc_feature: MA Experiment ID: 20000224 Result: Up-regulated in Transcription
  misc_feature: MA Experiment ID: 20000234 Result: Down-regulated in Transcription
  misc_feature: MA Experiment 20000234 PARAMETER Experiment Name: At_Siliques_P Parameter: Age (day) Value: 21
  misc_feature: MA Experiment 20000234 PARAMETER Experiment Name: At_Siliques_P Parameter: Organism Value: A. thaliana
  misc_feature: MA Experiment 20000234 PARAMETER Experiment Name: At_Siliques_P Parameter: Plant Line Value: WS
  misc_feature: MA Experiment 20000234 PARAMETER Experiment Name: At_Siliques_P Parameter: Tissue Value: Less Than 5mm Siliques vs. Whole Plant
  misc_feature: MA Experiment ID: 20000235 Result: Down-regulated in Transcription
  misc_feature: MA Experiment 20000235 PARAMETER Experiment Name: At_Siliques_P Parameter: Age (day) Value: 21
  misc_feature: MA Experiment 20000235 PARAMETER Experiment Name: At_Siliques_P Parameter: Organism Value: A. thaliana
  misc_feature: MA Experiment 20000235 PARAMETER Experiment Name: At_Siliques_P Parameter: Plant Line Value: WS
  misc_feature: MA Experiment 20000235 PARAMETER Experiment Name: At_Siliques_P Parameter: Tissue Value: 5-10mm Siliques vs. Whole Plant
  misc_feature: MA Experiment ID: 20000264 Result: Down-regulated in Transcription
  misc_feature: MA Experiment 20000264 PARAMETER Experiment Name: At_Open_Flower_P Parameter: Age (day) Value: 21
  misc_feature: MA Experiment 20000264 PARAMETER Experiment Name: At_Open_Flower_P Parameter: Plant Line Value: WS
  misc_feature: MA Experiment 20000264 PARAMETER Experiment Name: At_Open_Flower_P Parameter: Tissue Value: Open Flower vs. Whole Plant
  misc_feature: MA Experiment ID: 20000495 Result: Down-regulated in Transcription
  misc_feature: MA Experiment 20000495 PARAMETER Experiment Name: At_Guard_Cells_P Parameter: Harvest Date Value: 8/2/2002
  misc_feature: MA Experiment 20000495 PARAMETER Experiment Name: At_Guard_Cells_P Parameter: Organism Value: A. thaliana
  misc_feature: MA Experiment 20000495 PARAMETER Experiment Name: At_Guard_Cells_P Parameter: Tissue Value: Guard Cells vs. Leaves
  misc_feature: MA Experiment ID: 20001247 Result: Up-regulated in Transcription
  misc_feature: MA Experiment 20001247 PARAMETER Experiment Name: At_Far-red-induction_P Parameter: Age (day) Value: 7
  misc_feature: MA Experiment 20001247 PARAMETER Experiment Name: At_Far-red-induction_P Parameter: Light Value: Far-red vs. White
  misc_feature: MA Experiment 20001247 PARAMETER Experiment Name: At_Far-red-induction_P Parameter: Organism Value: A. thaliana
  misc_feature: MA Experiment 20001247 PARAMETER Experiment Name: At_Far-red-induction_P Parameter: Plant Line Value: Columbia
  misc_feature: MA Experiment 20001247 PARAMETER Experiment Name: At_Far-red-induction_P Parameter: Timepoint (hr) Value: 1
  misc_feature: MA Experiment 20001247 PARAMETER Experiment Name: At_Far-red-induction_P Parameter: Tissue Value: Whole Plant
  misc_feature: MA Experiment ID: 20001557 Result: Up-regulated in Transcription
  misc_feature: MA Experiment 20001557 PARAMETER Experiment Name: At_Drought_Soil_Dry_P Parameter: Age (day) Value: 27
  misc_feature: MA Experiment 20001557 PARAMETER Experiment Name: At_Drought_Soil_Dry_P Parameter: Organism Value: A. thaliana
  misc_feature: MA Experiment 20001557 PARAMETER Experiment Name: At_Drought_Soil_Dry_P Parameter: Plant Line Value: WS
  misc_feature: MA Experiment 20001557 PARAMETER Experiment Name: At_Drought_Soil_Dry_P Parameter: Post Timepoint (hr) Value: 3
  misc_feature: MA Experiment 20001557 PARAMETER Experiment Name: At_Drought_Soil_Dry_P Parameter: Post-Treatment Value: Re-Water vs. No Drought
  misc_feature: MA Experiment 20001557 PARAMETER Experiment Name: At_Drought_Soil_Dry_P Parameter: Timepoint (day) Value: 13
  misc_feature: MA Experiment 20001557 PARAMETER Experiment Name: At_Drought_Soil_Dry_P Parameter: Treatment Value: Drought vs. No Drought
  misc_feature: MA Experiment ID: 20001905 Result: Up-regulated in Transcription
  misc_feature: MA Experiment 20001905 PARAMETER Experiment Name: At_Drought_Reproduction_P Parameter: Age (day) Value: 40
  misc_feature: MA Experiment 20001905 PARAMETER Experiment Name: At_Drought_Reproduction_P Parameter: Organism Value: A. thaliana
  misc_feature: MA Experiment 20001905 PARAMETER Experiment Name: At_Drought_Reproduction_P Parameter: Plant Line Value: WS
  misc_feature: MA Experiment 20001905 PARAMETER Experiment Name: At_Drought_Reproduction_P Parameter: Timepoint (day) Value: 10
  misc_feature: MA Experiment 20001905 PARAMETER Experiment Name: At_Drought_Reproduction_P Parameter: Tissue Value: Rosettes
  misc_feature: MA Experiment 20001905 PARAMETER Experiment Name: At_Drought_Reproduction_P Parameter: Treatment Value: Drought vs. No Drought
aatcagtttctcaacgaatctttctaaacaagacaaaggatcaagaacactacttgttctttgtctgagacttcaaacacaagaaaccaaaaatagaaaaagatatgagagagctttttatgtatctatttcttcttttcttagttctatgtgtcaaatctgtttattctactccgacaagagaacaattccaaaattgcttgtccacaaaacaattcaattctaccctcaaaaaccctataaatctcaccactcatacactagattcccgagttcacaccgacttttccgagtcttcatctccaaattctagtttcctcaacttgaatttcacaagcttgaagccgattctcatcgttaagccaaaatccgaatccgaaataaaacaatcgattttatgcagcaggaaacttggagtgcaagtaagaacaatgagtggtggtcatgactacgaaggtctatcttacctctcactatcacctttcataatcgtcgacctcgttaacctcagatcaatcagcatcaacctcacagacgagaccgcttggatccaatcgggcgcaacactcggcgaagtctactacaagatcgccaaaaccagcaagatccatgcctttgccgcagggatatgtccaagtgttggtgttggtggacatattagcggaggaggattcggtacaataatgaggaaatacggtttagcgtctgataacgttgtggacgcacgtttgatggatgtaaatgggaaaactcttgaccggaaaacgatgggagaggatttgttttgggcgcttagaggcggtggagctgcgagttttggcgttgtcttgtcgtggaaggttaagcttgctagggttcctgaaaaggtaacttgtttcataagtcaacatccgatgggacctagcatgaacaagcttgttcatagatggcaatccataggatcagagctagacgaagatttattcatcagagtcattattgacaacagtctagaagggaatcaaagaaaagtgaaatcaacatttcaaactctatttcttggtggaatcgatagactgattcctctgatgaaccagaagtttccggaactcggcttacgatctcaagactgttcggaaatgagctggatcgaatcgataatgttcttcaactggagatcaggacagccgttagagattttgctcaacagagacctaagattcgaggatcagtatttcaaagcaaagtcagattatgttcaaaaacccgttcctgaaaacgttttcgaagaagtaaccaagagatttctcgagcaagatactccactgatgatctttgagccattgggtgggaaaatcagcaagatttcagaaacagaatctccatatccacacagaagaggtaatctgtataatatacagtacatggtgaaatggaaagtgaatgaagtcgaggagatgaacaaacatgtcaggtggatgagatcgttacacgattacatgactccgtatgtttctaaatcgccgagaggagcttatttgaattacagagatcttgatttgggctcgaccaaagggattaacacgagtttcgaagatgcaaggaaatggggtgagacttatttcaaaggtaatttcaagagattaggtttggttaaagggaagattgatccaacaaatttcttcaggaacgaacagagtattcctcctctgttttgagtcctcaatacaaaaccagatataaaagatgtcatttcattttttcaattataatagataatgtaactttctgctacaattgtaaaagtgagatgtaccc

SEQ ID NO: 104652 - protein, 530 aa, Arabidopsis thaliana
  peptide (1)..(530): Ceres Seq. ID no. 13615478
  misc_feature (81)..(236): Pfam Name: FAD binding domain Pfam Description: FAD binding domain
  misc_feature (1)..(530): Homolog of NCBI NO: 15233424 NR Description: FAD-linked oxidoreductase family [Arabidopsis
  misc_feature (1)..(530): Homolog of NCBI NO: 14194127 NR Description: AT4g20860/T13K14_20 [Arabidopsis thaliana]
  misc_feature (1)..(453): Homolog of NCBI NO: 24417282 NR Description: unknown [Arabidopsis thaliana]
  misc_feature (3)..(529): Homolog of NCBI NO: 15241474 NR Description: FAD-linked oxidoreductase family [Arabidopsis >gi|10176891|dbj|BAB10121.1| berberine bridge enzyme [Arabidopsis
  misc_feature (4)..(529): Homolog of NCBI NO: 15241494 NR Description: FAD-linked oxidoreductase family [Arabidopsis >gi|18176302|gb|AAL60019.1| putative berberine bridge enzyme
  misc_feature (5)..(527): Homolog of NCBI NO: 15220954 NR Description: FAD-linked oxidoreductase family [Arabidopsis >gi|16323167|gb|AAL15318.1| At1g30760/T5I8_22 [Arabidopsis >gi|28416457|gb|AAO42759.1| At1g30760/T5I8_22 [Arabidopsis
  misc_feature (8)..(527): Homolog of NCBI NO: 15226830 NR Description: FAD-linked oxidoreductase family [Arabidopsis
  misc_feature (7)..(529): Homolog of NCBI NO: 13161397 NR Description: CPRD2 [Vigna unguiculata]
  misc_feature (7)..(529): Homolog of NCBI NO: 18652398 NR Description: carbohydrate oxidase [Lactuca sativa]
  misc_feature (26)..(528): Homolog of NCBI NO: 15233411 NR Description: FAD-linked oxidoreductase family [Arabidopsis
MRELFMYLFLLFLVLCVKSVYSTPTREQFQNCLSTKQFNSTLKNPINLTTHTLDSRVHTDFSESSSPNSSFLNLNFTSLKPILIVKPKSESEIKQSILCSRKLGVQVRTMSGGHDYEGLSYLSLSPFIIVDLVNLRSISINLTDETAWIQSGATLGEVYYKIAKTSKIHAFAAGICPSVGVGGHISGGGFGTIMRKYGLASDNVVDARLMDVNGKTLDRKTMGEDLFWALRGGGAASFGVVLSWKVKLARVPEKVTCFISQHPMGPSMNKLVHRWQSIGSELDEDLFIRVIIDNSLEGNQRKVKSTFQTLFLGGIDRLIPLMNQKFPELGLRSQDCSEMSWIESIMFFNWRSGQPLEILLNRDLRFEDQYFKAKSDYVQKPVPENVFEEVTKRFLEQDTPLMIFEPLGGKISKISETESPYPHRRGNLYNIQYMVKWKVNEVEEMNKHVRWMRSLHDYMTPYVSKSPRGAYLNYRDLDLGSTKGINTSFEDARKWGETYFKGNFKRLGLVKGKIDPTNFFRNEQSIPPLF

SEQ ID NO: 104653 - protein, 525 aa, Arabidopsis thaliana
  peptide (1)..(525): Ceres Seq. ID no. 13615479
  misc_feature (76)..(231): Pfam Name: FAD binding domain Pfam Description: FAD binding domain
  misc_feature (1)..(525): Homolog of NCBI NO: 15233424 NR Description: FAD-linked oxidoreductase family [Arabidopsis
  misc_feature (1)..(525): Homolog of NCBI NO: 14194127 NR Description: AT4g20860/T13K14_20 [Arabidopsis thaliana]
  misc_feature (1)..(448): Homolog of NCBI NO: 24417282 NR Description: unknown [Arabidopsis thaliana]
  misc_feature (1)..(524): Homolog of NCBI NO: 15241474 NR Description: FAD-linked oxidoreductase family [Arabidopsis >gi|10176891|dbj|BAB10121.1| berberine bridge enzyme [Arabidopsis
  misc_feature (1)..(524): Homolog of NCBI NO: 15241494 NR Description: FAD-linked oxidoreductase family [Arabidopsis >gi|18176302|gb|AAL60019.1| putative berberine bridge enzyme
  misc_feature (1)..(522): Homolog of NCBI NO: 15220954 NR Description: FAD-linked oxidoreductase family [Arabidopsis >gi|16323167|gb|AAL15318.1| At1g30760/T5I8_22 [Arabidopsis >gi|28416457|gb|AAO42759.1| At1g30760/T5I8_22 [Arabidopsis
  misc_feature (3)..(522): Homolog of NCBI NO: 15226830 NR Description: FAD-linked oxidoreductase family [Arabidopsis
  misc_feature (2)..(524): Homolog of NCBI NO: 13161397 NR Description: CPRD2 [Vigna unguiculata]
  misc_feature (2)..(524): Homolog of NCBI NO: 18652398 NR Description: carbohydrate oxidase [Lactuca sativa]
  misc_feature (21)..(523): Homolog of NCBI NO: 15233411 NR Description: FAD-linked oxidoreductase family [Arabidopsis
MYLFLLFLVLCVKSVYSTPTREQFQNCLSTKQFNSTLKNPINLTTHTLDSRVHTDFSESSSPNSSFLNLNFTSLKPILIVKPKSESEIKQSILCSRKLGVQVRTMSGGHDYEGLSYLSLSPFIIVDLVNLRSISINLTDETAWIQSGATLGEVYYKIAKTSKIHAFAAGICPSVGVGGHISGGGFGTIMRKYGLASDNVVDARLMDVNGKTLDRKTMGEDLFWALRGGGAASFGVVLSWKVKLARVPEKVTCFISQHPMGPSMNKLVHRWQSIGSELDEDLFIRVIIDNSLEGNQRKVKSTFQTLFLGGIDRLIPLMNQKFPELGLRSQDCSEMSWIESIMFFNWRSGQPLEILLNRDLRFEDQYFKAKSDYVQKPVPENVFEEVTKRFLEQDTPLMIFEPLGGKISKISETESPYPHRRGNLYNIQYMVKWKVNEVEEMNKHVRWMRSLHDYMTPYVSKSPRGAYLNYRDLDLGSTKGINTSFEDARKWGETYFKGNFKRLGLVKGKIDPTNFFRNEQSIPPLF

SEQ ID NO: 104654 - protein, 421 aa, Arabidopsis thaliana
  peptide (1)..(421): Ceres Seq. ID no. 13615480
  misc_feature (1)..(127): Pfam Name: FAD binding domain Pfam Description: FAD binding domain
  misc_feature (1)..(421): Homolog of NCBI NO: 15233424 NR Description: FAD-linked oxidoreductase family [Arabidopsis
  misc_feature (1)..(421): Homolog of NCBI NO: 14194127 NR Description: AT4g20860/T13K14_20 [Arabidopsis thaliana]
  misc_feature (1)..(344): Homolog of NCBI NO: 24417282 NR Description: unknown [Arabidopsis thaliana]
  misc_feature (1)..(420): Homolog of NCBI NO: 15241474 NR Description: FAD-linked oxidoreductase family [Arabidopsis >gi|10176891|dbj|BAB10121.1| berberine bridge enzyme [Arabidopsis
  misc_feature (1)..(420): Homolog of NCBI NO: 15241494 NR Description: FAD-linked oxidoreductase family [Arabidopsis >gi|18176302|gb|AAL60019.1| putative berberine bridge enzyme
  misc_feature (1)..(418): Homolog of NCBI NO: 15220954 NR Description: FAD-linked oxidoreductase family [Arabidopsis >gi|16323167|gb|AAL15318.1| At1g30760/T5I8_22 [Arabidopsis >gi|28416457|gb|AAO42759.1| At1g30760/T5I8_22 [Arabidopsis
  misc_feature (1)..(418): Homolog of NCBI NO: 15226830 NR Description: FAD-linked oxidoreductase family [Arabidopsis
  misc_feature (1)..(420): Homolog of NCBI NO: 13161397 NR Description: CPRD2 [Vigna unguiculata]
  misc_feature (1)..(420): Homolog of NCBI NO: 18652398 NR Description: carbohydrate oxidase [Lactuca sativa]
  misc_feature (1)..(419): Homolog of NCBI NO: 15233411 NR Description: FAD-linked oxidoreductase family [Arabidopsis
MSGGHDYEGLSYLSLSPFIIVDLVNLRSISINLTDETAWIQSGATLGEVYYKIAKTSKIHAFAAGICPSVGVGGHISGGGFGTIMRKYGLASDNVVDARLMDVNGKTLDRKTMGEDLFWALRGGGAASFGVVLSWKVKLARVPEKVTCFISQHPMGPSMNKLVHRWQSIGSELDEDLFIRVIIDNSLEGNQRKVKSTFQTLFLGGIDRLIPLMNQKFPELGLRSQDCSEMSWIESIMFFNWRSGQPLEILLNRDLRFEDQYFKAKSDYVQKPVPENVFEEVTKRFLEQDTPLMIFEPLGGKISKISETESPYPHRRGNLYNIQYMVKWKVNEVEEMNKHVRWMRSLHDYMTPYVSKSPRGAYLNYRDLDLGSTKGINTSFEDARKWGETYFKGNFKRLGLVKGKIDPTNFFRNEQSIPPLF

SEQ ID NO: 104655 - DNA, 2349 bp, Arabidopsis thaliana
  misc_feature (1)..(2349): Ceres Seq. ID no. 13615493
  misc_feature: MA Experiment ID: 108434 Result: Up-regulated in Transcription
  misc_feature: MA Experiment 108434 PARAMETER Experiment Name: At_Root_Tips_cDNA_P Parameter: Tissue Value: Root Tips
  misc_feature: MA Experiment ID: 108569 Result: Up-regulated in Transcription
  misc_feature: MA Experiment 108569 PARAMETER Experiment Name: At_0.001%_MeJA__cDNA_P Parameter: Timepoint (hr) Value: 6
  misc_feature: MA Experiment 108569 PARAMETER Experiment Name: At_0.001%_MeJA__cDNA_P Parameter: Tissue Value: Aerial
  misc_feature: MA Experiment 108569 PARAMETER Experiment Name: At_0.001%_MeJA__cDNA_P Parameter: Treatment Value: 0.001% MeJA vs. No Treatment
  misc_feature: MA Experiment ID: 108573 Result: Up-regulated in Transcription
  misc_feature: MA Experiment 108573 PARAMETER Experiment Name: At_Drought_cDNA_P Parameter: Timepoint (hr) Value: 6
  misc_feature: MA Experiment 108573 PARAMETER Experiment Name: At_Drought_cDNA_P Parameter: Tissue Value: Aerial
  misc_feature: MA Experiment 108573 PARAMETER Experiment Name: At_Drought_cDNA_P Parameter: Treatment Value: Drought vs. No Drought
  misc_feature: MA Experiment ID: 108577 Result: Down-regulated in Transcription
  misc_feature: MA Experiment 108577 PARAMETER Experiment Name: At_42deg_Heat_cDNA_P Parameter: Temperature (deg C) Value: 42 vs. 22
  misc_feature: MA Experiment 108577 PARAMETER Experiment Name: At_42deg_Heat_cDNA_P Parameter: Timepoint (hr) Value: 6
  misc_feature: MA Experiment 108577 PARAMETER Experiment Name: At_42deg_Heat_cDNA_P Parameter: Tissue Value: Aerial
  misc_feature: MA Experiment ID: 20000087 Result: Down-regulated in Transcription
  misc_feature: MA Experiment 20000087 PARAMETER Experiment Name: At_100uM_ABA_Mutants_cDNA_P Parameter: Plant Line Value: WS
  misc_feature: MA Experiment 20000087 PARAMETER Experiment Name: At_100uM_ABA_Mutants_cDNA_P Parameter: Timepoint (hr) Value: 6
  misc_feature: MA Experiment 20000087 PARAMETER Experiment Name: At_100uM_ABA_Mutants_cDNA_P Parameter: Tissue Value: Aerial
  misc_feature: MA Experiment 20000087 PARAMETER Experiment Name: At_100uM_ABA_Mutants_cDNA_P Parameter: Treatment Value: 100uM ABA vs. No Treatment
  misc_feature: MA Experiment ID: 20000111 Result: Down-regulated in Transcription
  misc_feature: MA Experiment 20000111 PARAMETER Experiment Name: At_42deg_Heat_cDNA_P Parameter: Temperature (deg C) Value: 42 vs. 22
  misc_feature: MA Experiment 20000111 PARAMETER Experiment Name: At_42deg_Heat_cDNA_P Parameter: Timepoint (hr) Value: 6
  misc_feature: MA Experiment 20000111 PARAMETER Experiment Name: At_42deg_Heat_cDNA_P Parameter: Tissue Value: Aerial
  misc_feature: MA Experiment ID: 20000113 Result: Down-regulated in Transcription
  misc_feature: MA Experiment 20000113 PARAMETER Experiment Name: At_42deg_Heat_cDNA_P Parameter: Temperature (deg C) Value: 42 vs. 22
  misc_feature: MA Experiment 20000113 PARAMETER Experiment Name: At_42deg_Heat_cDNA_P Parameter: Timepoint (hr) Value: 8
  misc_feature: MA Experiment 20000113 PARAMETER Experiment Name: At_42deg_Heat_cDNA_P Parameter: Tissue Value: Aerial
  misc_feature: MA Experiment ID: 20000173 Result: Down-regulated in Transcription
  misc_feature: MA Experiment 20000173 PARAMETER Experiment Name: At_42deg_Heat_P Parameter: Age (day) Value: 14
  misc_feature: MA Experiment 20000173 PARAMETER Experiment Name: At_42deg_Heat_P Parameter: Organism Value: A. thaliana
  misc_feature: MA Experiment 20000173 PARAMETER Experiment Name: At_42deg_Heat_P Parameter: Plant Line Value: WS
  misc_feature: MA Experiment 20000173 PARAMETER Experiment Name: At_42deg_Heat_P Parameter: Temperature (deg C) Value: 42 vs. 22
  misc_feature: MA Experiment 20000173 PARAMETER Experiment Name: At_42deg_Heat_P Parameter: Timepoint (hr) Value: 6
  misc_feature: MA Experiment 20000173 PARAMETER Experiment Name: At_42deg_Heat_P Parameter: Tissue Value: Aerial
  misc_feature: MA Experiment ID: 20000179 Result: Up-regulated in Transcription
  misc_feature: MA Experiment 20000179 PARAMETER Experiment Name: At_Germinating_Seeds_P Parameter: Age (hr) Value: 6 vs. 0
  misc_feature: MA Experiment 20000179 PARAMETER Experiment Name: At_Germinating_Seeds_P Parameter: Tissue Value: Germinating Seeds
  misc_feature: MA Experiment ID: 20000180 Result: Up-regulated in Transcription
  misc_feature: MA Experiment 20000180 PARAMETER Experiment Name: At_Germinating_Seeds_P Parameter: Age (hr) Value: 24 vs. 0
  misc_feature: MA Experiment 20000180 PARAMETER Experiment Name: At_Germinating_Seeds_P Parameter: Tissue Value: Germinating Seeds
  misc_feature: MA Experiment ID: 20001451 Result: Down-regulated in Transcription
  misc_feature: MA Experiment 20001451 PARAMETER Experiment Name: At_Far-red-induction_P Parameter: Age (day) Value: 7
  misc_feature: MA Experiment 20001451 PARAMETER Experiment Name: At_Far-red-induction_P Parameter: Light Value: Far-red vs. White
  misc_feature: MA Experiment 20001451 PARAMETER Experiment Name: At_Far-red-induction_P Parameter: Organism Value: A. thaliana
  misc_feature: MA Experiment 20001451 PARAMETER Experiment Name: At_Far-red-induction_P Parameter: Plant Line Value: Columbia
  misc_feature: MA Experiment 20001451 PARAMETER Experiment Name: At_Far-red-induction_P Parameter: Timepoint (hr) Value: 24
  misc_feature: MA Experiment 20001451 PARAMETER Experiment Name: At_Far-red-induction_P Parameter: Tissue Value: Whole Plant
  misc_feature: MA Experiment ID: 20001911 Result: Down-regulated in Transcription
  misc_feature: MA Experiment 20001911 PARAMETER Experiment Name: At_Drought_Reproduction_P Parameter: Age (day) Value: 40
  misc_feature: MA Experiment 20001911 PARAMETER Experiment Name: At_Drought_Reproduction_P Parameter: Organism Value: A. thaliana
  misc_feature: MA Experiment 20001911 PARAMETER Experiment Name: At_Drought_Reproduction_P Parameter: Plant Line Value: WS
  misc_feature: MA Experiment 20001911 PARAMETER Experiment Name: At_Drought_Reproduction_P Parameter: Timepoint (day) Value: 10
  misc_feature: MA Experiment 20001911 PARAMETER Experiment Name: At_Drought_Reproduction_P Parameter: Tissue Value: Flowers
  misc_feature: MA Experiment 20001911 PARAMETER Experiment Name: At_Drought_Reproduction_P Parameter: Treatment Value: Drought vs. No Drought
aaaagctatagatcgatcctaggcttacctcaaacctcagtctccgttgactactgagactcgtcgacctctgatccgcttcttcgactatacggatctacttccgatcttgatgatggccggaggtaacgtacggtttctggttttgatactcgccgtagcaatttgcggtgctgcttctgttttccagccgatctcagactctcaccgatctgcggctctggatgtcttcgtaccagtcgatggatcatacaaaagcttggaggaggcatatgaagcattaaagactttggagattcttggaattgataaaaagtctgatcttagctcaaagacttgtgagaatgtggttaaagttcttcagtcgtcttcttctactcttaaggatgcattttatgcgttaaacgttaatgggattctaaaatgtaaaattggtgaagctggtcctaaggacattgtttctcaacttcaagctggtgttaaagatgcgaagctattgcttgatttctattattctgtcagaggcttggtgctggctaaggagcaatttcctggaactcatataagtcttggagatgccgaagccattttccgttccatcaagtctcttagccagagtgatggaagatggcgctacagctccaacaatcccgaatcaagcacttttgctgctggcttagcctatgaaacgcttgctggagtgatttcattagcaccttcagagtttgatccatctttgatccagtcggtgaagacgggtatcctgaagctttctgacagtatccaaaaatatgatgatgggacattttattttgatgagaagtctgttgatgcaagtcaaggcccgatctcaacaactgcatcagttattagagggctcacgtcatttgcagcttcagaatccacaggattgaaccttccaggtgataagatagttggtctggccaaattctttctgggtgttggaattcctggtgatgccaaggacttcttcaaccaaatagatgcactagcttgtttggaagacaacaagttttctgttccactcatcttgtctcttccatccactgtcatttcattgacaaagaaagagcctctgaaggttaaagttagcactgtactgggttcgaaggcaccagctcttagtgtgaagcttacacaagctctaagttctaagtcagtggattcatctgtaattaataaccaggagcttaagtttgacgctgacagtgcaacgtacttcctggactcctttcccaagaactttgacattggaaaatatacttttgtatttaagattgtgctggatgaatcagcacatgagaaagtatacataactgaagctcaaacaaaagtgcctatagctgccacaggagctattagcattgaaaatgcagaaattgctgtacttgacagtgacattggaagcgttgaatctcagaaaaagctagatttaactaaagatggagcggtatcattatcagcaaaccaccttcaaaagctacgcctgtcattccagttaactactccacttggcaatgcgtttaagccacaccaggcatttttcaagctgaaacatgagtcacaggtcgagcatatctttctcgtgaaaacttctggaaagaagtctgaattagttctagattttcttggattggttgagaagctctactacctctctggtaaatatgagatacagctaaccattggagatgcttctatggagaactctttactgagtaatattggtcacattgaactagacctaccagagcgtccagagaaggcgactcgtcctcctctacagtctactgagccttactcaagatatgggccaaaagctgaaatatcacacatattcaggattcctgaaaagcttccagcaaagcagctctcactagttttcttgggtgttatcgttctcccattcatcggtttcctgattgggcttacgcggttgggagtgaacataaagagcttcccatcgtcgactggatctgcaatatccgctttacttttccactgcggaattggagctgttttgcttctatatgtgctattctggttgaagttggatctattcacgactctcaaggcactttctttgttgggagtgtttctgttgttcgtgggacacagaacactatctcaacttgcatcagcatcaaacaagttgaaatctgcttgaagaagaagaactcactatgaaggatctttttttggtttatgcgtattttcagttttgtagtattgcttatagattatggtgatagacaaattcaaaagaagttcagagtttacatactctctcagtttagtcttaaaaagtaatcaagagtctctttcctt

SEQ ID NO: 104656 - protein, 691 aa, Arabidopsis thaliana; identical to SEQ ID NO: 30697
  peptide (1)..(691): Ceres Seq. ID no. 13615494
  misc_feature (209)..(660): Homolog of NCBI NO: 7486600 NR Description: hypothetical protein F7J7.90 - Arabidopsis >gi|2911072|emb|CAA17534.1| putative protein [Arabidopsis >gi|7268912|emb|CAB79115.1| putative protein [Arabidopsis
  misc_feature (1)..(204): Homolog of NCBI NO: 7486600 NR Description: hypothetical protein F7J7.90 - Arabidopsis >gi|2911072|emb|CAA17534.1| putative protein [Arabidopsis >gi|7268912|emb|CAB79115.1| putative protein [Arabidopsis
  misc_feature (10)..(691): Homolog of NCBI NO: 34906860 NR Description: P0470A12.7 [Oryza sativa (japonica
  misc_feature (243)..(689): Homolog of NCBI NO: 31198567 NR Description: ENSANGP00000020783 [Anopheles gambiae]
  misc_feature (299)..(682): Homolog of NCBI NO: 28436786 NR Description: Similar to ribophorin II [Xenopus laevis]
  misc_feature (82)..(682): Homolog of NCBI NO: 28279254 NR Description: Similar to ribophorin II [Danio rerio]
  misc_feature (71)..(682): Homolog of NCBI NO: 35493916 NR Description: ribophorin II precursor;
  misc_feature (71)..(682): Homolog of NCBI NO: 88567 NR Description: ribophorin II precursor - human
  misc_feature (71)..(682): Homolog of NCBI NO: 36049 NR Description: unnamed protein product [Homo sapiens]
  misc_feature (294)..(682): Homolog of NCBI NO: 13928974 NR Description: ribophorin 2 [Rattus norvegicus]

SEQ ID NO: 104657 - protein, 690 aa, Arabidopsis thaliana; identical to SEQ ID NO: 30698
  peptide (1)..(690): Ceres Seq. ID no. 13615495
  misc_feature (208)..(659): Homolog of NCBI NO: 7486600 NR Description: hypothetical protein F7J7.90 - Arabidopsis >gi|2911072|emb|CAA17534.1| putative protein [Arabidopsis >gi|7268912|emb|CAB79115.1| putative protein [Arabidopsis
  misc_feature (1)..(203): Homolog of NCBI NO: 7486600 NR Description: hypothetical protein F7J7.90 - Arabidopsis >gi|2911072|emb|CAA17534.1| putative protein [Arabidopsis >gi|7268912|emb|CAB79115.1| putative protein [Arabidopsis
  misc_feature (9)..(690): Homolog of NCBI NO: 34906860 NR Description: P0470A12.7 [Oryza sativa (japonica
  misc_feature (242)..(688): Homolog of NCBI NO: 31198567 NR Description: ENSANGP00000020783 [Anopheles gambiae]
  misc_feature (298)..(681): Homolog of NCBI NO: 28436786 NR Description: Similar to ribophorin II [Xenopus laevis]
  misc_feature (81)..(681): Homolog of NCBI NO: 28279254 NR Description: Similar to ribophorin II [Danio rerio]
  misc_feature (70)..(681): Homolog of NCBI NO: 35493916 NR Description: ribophorin II precursor;
  misc_feature (70)..(681): Homolog of NCBI NO: 88567 NR Description: ribophorin II precursor - human
  misc_feature (70)..(681): Homolog of NCBI NO: 36049 NR Description: unnamed protein product [Homo sapiens]
  misc_feature (293)..(681): Homolog of NCBI NO: 13928974 NR Description: ribophorin 2 [Rattus norvegicus]

SEQ ID NO: 104658 - DNA, 1294 bp, Arabidopsis thaliana
  misc_feature (1)..(1294): Ceres Seq. ID no. 13615496
  misc_feature: MA Experiment ID: 108463 Result: Down-regulated in Transcription
  misc_feature: MA Experiment 108463 PARAMETER Experiment Name: At_Germinating_Seeds_cDNA_P Parameter: Age (day) Value: 3 vs. 0
  misc_feature: MA Experiment 108463 PARAMETER Experiment Name: At_Germinating_Seeds_cDNA_P Parameter: Tissue Value: Germinating Seeds
  misc_feature: MA Experiment ID: 108569 Result: Down-regulated in Transcription
  misc_feature: MA Experiment 108569 PARAMETER Experiment Name: At_0.001%_MeJA__cDNA_P Parameter: Timepoint (hr) Value: 6
  misc_feature: MA Experiment 108569 PARAMETER Experiment Name: At_0.001%_MeJA__cDNA_P Parameter: Tissue Value: Aerial
  misc_feature: MA Experiment 108569 PARAMETER Experiment Name: At_0.001%_MeJA__cDNA_P Parameter: Treatment Value: 0.001% MeJA vs. No Treatment
  misc_feature: MA Experiment ID: 108573 Result: Down-regulated in Transcription
  misc_feature: MA Experiment 108573 PARAMETER Experiment Name: At_Drought_cDNA_P Parameter: Timepoint (hr) Value: 6
  misc_feature: MA Experiment 108573 PARAMETER Experiment Name: At_Drought_cDNA_P Parameter: Tissue Value: Aerial
  misc_feature: MA Experiment 108573 PARAMETER Experiment Name: At_Drought_cDNA_P Parameter: Treatment Value: Drought vs. No Drought
  misc_feature: MA Experiment ID: 108585 Result: Down-regulated in Transcription
  misc_feature: MA Experiment 108585 PARAMETER Experiment Name: At_5mM_NaNP_cDNA_P Parameter: Timepoint (hr) Value: 6
  misc_feature: MA Experiment 108585 PARAMETER Experiment Name: At_5mM_NaNP_cDNA_P Parameter: Tissue Value: Aerial
  misc_feature: MA Experiment 108585 PARAMETER Experiment Name: At_5mM_NaNP_cDNA_P Parameter: Treatment Value: null
  misc_feature: MA Experiment ID: 108595 Result: Down-regulated in Transcription
  misc_feature: MA Experiment 108595 PARAMETER Experiment Name: At_Ler-pi_Ovule_cDNA_P Parameter: Plant Line Value: null
  misc_feature: MA Experiment ID: 108668 Result: Down-regulated in Transcription
  misc_feature: MA Experiment 108668 PARAMETER Experiment Name: At_2mM_SA_cDNA_P Parameter: Plant Line Value: WS
  misc_feature: MA Experiment 108668 PARAMETER Experiment Name: At_2mM_SA_cDNA_P Parameter: Timepoint (hr) Value: 6
  misc_feature: MA Experiment 108668 PARAMETER Experiment Name: At_2mM_SA_cDNA_P Parameter: Treatment Value: 2mM SA vs. No Treatment
  misc_feature: MA Experiment ID: 20000113 Result: Up-regulated in Transcription
  misc_feature: MA Experiment 20000113 PARAMETER Experiment Name: At_42deg_Heat_cDNA_P Parameter: Temperature (deg C) Value: 42 vs. 22
  misc_feature: MA Experiment 20000113 PARAMETER Experiment Name: At_42deg_Heat_cDNA_P Parameter: Timepoint (hr) Value: 8
  misc_feature: MA Experiment 20000113 PARAMETER Experiment Name: At_42deg_Heat_cDNA_P Parameter: Tissue Value: Aerial
  misc_feature: MA Experiment ID: 20000182 Result: Down-regulated in Transcription
  misc_feature: MA Experiment 20000182 PARAMETER Experiment Name: At_2mM_SA_P Parameter: Age (day) Value: 14
  misc_feature: MA Experiment 20000182 PARAMETER Experiment Name: At_2mM_SA_P Parameter: Organism Value: A. thaliana
  misc_feature: MA Experiment 20000182 PARAMETER Experiment Name: At_2mM_SA_P Parameter: Plant Line Value: WS
  misc_feature: MA Experiment 20000182 PARAMETER Experiment Name: At_2mM_SA_P Parameter: Timepoint (hr) Value: 6
  misc_feature: MA Experiment 20000182 PARAMETER Experiment Name: At_2mM_SA_P Parameter: Tissue Value: Aerial
  misc_feature: MA Experiment 20000182 PARAMETER Experiment Name: At_2mM_SA_P Parameter: Treatment Value: 2mM SA vs. No Treatment
  misc_feature: MA Experiment ID: 20000185 Result: Down-regulated in Transcription
  misc_feature: MA Experiment 20000185 PARAMETER Experiment Name: At_Roots__P Parameter: Age (day) Value: 7 vs. 21
  misc_feature: MA Experiment 20000185 PARAMETER Experiment Name: At_Roots__P Parameter: Organism Value: A. thaliana
  misc_feature: MA Experiment 20000185 PARAMETER Experiment Name: At_Roots__P Parameter: Tissue Value: Roots vs. Whole Plant
  misc_feature: MA Experiment ID: 20000224 Result: Up-regulated in Transcription
  misc_feature: MA Experiment ID: 20000439 Result: Down-regulated in Transcription
  misc_feature: MA Experiment 20000439 PARAMETER Experiment Name: At_Roots__P Parameter: Age (day) Value: 14 vs. 21
  misc_feature: MA Experiment 20000439 PARAMETER Experiment Name: At_Roots__P Parameter: Organism Value: A. thaliana
  misc_feature: MA Experiment 20000439 PARAMETER Experiment Name: At_Roots__P Parameter: Tissue Value: Roots vs. Whole Plant
  misc_feature: MA Experiment ID: 20001558 Result: Up-regulated in Transcription
  misc_feature: MA Experiment 20001558 PARAMETER Experiment Name: At_Drought_Soil_Dry_P Parameter: Age (day) Value: 27
  misc_feature: MA Experiment 20001558 PARAMETER Experiment Name: At_Drought_Soil_Dry_P Parameter: Organism Value: A. thaliana
  misc_feature: MA Experiment 20001558 PARAMETER Experiment Name: At_Drought_Soil_Dry_P Parameter: Plant Line Value: WS
  misc_feature: MA Experiment 20001558 PARAMETER Experiment Name: At_Drought_Soil_Dry_P Parameter: Post Timepoint (hr) Value: 6
  misc_feature: MA Experiment 20001558 PARAMETER Experiment Name: At_Drought_Soil_Dry_P Parameter: Post-Treatment Value: Re-Water vs. No Drought
  misc_feature: MA Experiment 20001558 PARAMETER Experiment Name: At_Drought_Soil_Dry_P Parameter: Timepoint (day) Value: 13
  misc_feature: MA Experiment 20001558 PARAMETER Experiment Name: At_Drought_Soil_Dry_P Parameter: Treatment Value: Drought vs. No Drought
atcagacatcagagggaacttggaggacacagagaagcgcaaattatcagacagagtgagaacgaagaagaagaaagcacaggatgctaagcttgagatattcattaccttatcttcttcttcaaacaagggaatcatcaactaagctcttcaccaaaaagcctaacaatgttgtggtttgtgcggcgagaggtccaagacctcggtctcctcgtgtatggaaaacaaggaagaggattggaactatctctaaagctgccaaaatgattgcttgtataaaaggattgtcgaatgttaaagaagaagtttatggagcgcttgattccttcattgcttgggaattagagttccctcttgttatagttaagaaggcattagttatacttgaagatgaaaaagaatggaagaagattattcaggtgacaaaatggatgctgagtaaaggccaaggaagaacaatgggaacttacttctcattactaaatgctttagcagaagataatcgccttgacgaagctgaggaattgtggaacaaattgttcatggaacatttagaaggaactcctagaaagttcttcaacaaaatgatctctatatattacaagagagatatgcaccaaaagctcttcgaggtctttgctgacatggaggagcttggagtgaaaccgaatgttgcgattgtgtctatggttggaaaagtgtttgtgaaactagagatgaaggataagtacgagaaactgatgaagaaatatcctccaccacagtgggagtttagatacatcaaaggaagacgtgttaaggtcaaggcaaagcagctgaatgagctaagcgaaggtgaaggtggtttaagcagcgacgaagataagattgacaatgagattgagagtgaagaagaagatggtgaggatctcagtgaagaggaagaagatgaaaaagaacttttgggtggaagtcaaggacagattacttctagagaacccagtcttgatcatttggactcttcatgagcttttgagatcgtatctaccgttgaatcatctataaggaaaatagatagacggccaaggttcttcaaagaagctttctggggctgagcttgggtttctgacgaaaacatgaccagaaaagttttgaactatctgagcttaagagtcaaaacaaggtatagatttgaagagtcaactaaaaagagtattaaactcagcaaaaagattaaatactgtaaaatcttttagtacgactgtgtaagctctgaaaacaaaaattattgtataatttcagacaataatttcag

SEQ ID NO: 104659 - protein, 307 aa, Arabidopsis thaliana; identical to SEQ ID NO: 39451
  peptide (1)..(307): Ceres Seq. ID no. 13615497
  misc_feature (127)..(161): Pfam Name: PPR repeat Pfam Description: PPR repeat
  misc_feature (1)..(307): Homolog of NCBI NO: 18415645 NR Description: pentatricopeptide (PPR) repeat-containing protein thaliana] >gi|21618230|gb|AAM67280.1| unknown [Arabidopsis
  misc_feature (14)..(307): Homolog of NCBI NO: 7486589 NR Description: hypothetical protein F7J7.130 - Arabidopsis >gi|2911076|emb|CAA17538.1| putative protein [Arabidopsis >gi|7268916|emb|CAB79119.1| putative protein [Arabidopsis
  misc_feature (1)..(272): Homolog of NCBI NO: 34909686 NR Description: B1131G08.1 [Oryza sativa (japonica
  misc_feature (45)..(241): Homolog of NCBI NO: 18415213 NR Description: pentatricopeptide (PPR) repeat-containing protein
  misc_feature (45)..(233): Homolog of NCBI NO: 7485419 NR Description: hypothetical protein F13C5.140 - Arabidopsis >gi|2832625|emb|CAA16754.1| putative protein [Arabidopsis >gi|7268691|emb|CAB78899.1| putative protein [Arabidopsis
  misc_feature (26)..(241): Homolog of NCBI NO: 34393638 NR Description: pentatricopeptide (PPR) repeat-containing
  misc_feature (7)..(290): Homolog of NCBI NO: 18390413 NR Description: expressed protein [Arabidopsis thaliana] unknown protein [Arabidopsis thaliana]
  misc_feature (7)..(290): Homolog of NCBI NO: 30678929 NR Description: expressed protein [Arabidopsis thaliana]
  misc_feature (72)..(290): Homolog of NCBI NO: 25406795 NR Description: hypothetical protein [imported] - Arabidopsis >gi|2494119|gb|AAB80628.1| EST gb|T04104 comes from this gene.

SEQ ID NO: 104660 - protein, 247 aa, Arabidopsis thaliana; identical to SEQ ID NO: 39452
  peptide (1)..(247): Ceres Seq. ID no. 13615498
  misc_feature (67)..(101): Pfam Name: PPR repeat Pfam Description: PPR repeat
  misc_feature (1)..(247): Homolog of NCBI NO: 18415645 NR Description: pentatricopeptide (PPR) repeat-containing protein thaliana] >gi|21618230|gb|AAM67280.1| unknown [Arabidopsis
  misc_feature (1)..(247): Homolog of NCBI NO: 7486589 NR Description: hypothetical protein F7J7.130 - Arabidopsis >gi|2911076|emb|CAA17538.1| putative protein [Arabidopsis >gi|7268916|emb|CAB79119.1| putative protein [Arabidopsis
  misc_feature (1)..(212): Homolog of NCBI NO: 34909686 NR Description: B1131G08.1 [Oryza sativa (japonica
  misc_feature (1)..(181): Homolog of NCBI NO: 18415213 NR Description: pentatricopeptide (PPR) repeat-containing protein
  misc_feature (1)..(173): Homolog of NCBI NO: 7485419 NR Description: hypothetical protein F13C5.140 - Arabidopsis >gi|2832625|emb|CAA16754.1| putative protein [Arabidopsis >gi|7268691|emb|CAB78899.1| putative protein [Arabidopsis
  misc_feature (1)..(181): Homolog of NCBI NO: 34393638 NR Description: pentatricopeptide (PPR) repeat-containing
  misc_feature (1)..(230): Homolog of NCBI NO: 18390413 NR Description: expressed protein [Arabidopsis thaliana] unknown protein [Arabidopsis thaliana]
  misc_feature (1)..(230): Homolog of NCBI NO: 30678929 NR Description: expressed protein [Arabidopsis thaliana]
  misc_feature (12)..(230): Homolog of NCBI NO: 25406795 NR Description: hypothetical protein [imported] - Arabidopsis >gi|2494119|gb|AAB80628.1| EST gb|T04104 comes from this gene.

SEQ ID NO: 104661 - protein, 191 aa, Arabidopsis thaliana; identical to SEQ ID NO: 39453
  peptide (1)..(191): Ceres Seq. ID no. 13615499
  misc_feature (11)..(45): Pfam Name: PPR repeat Pfam Description: PPR repeat
  misc_feature (1)..(191): Homolog of NCBI NO: 18415645 NR Description: pentatricopeptide (PPR) repeat-containing protein thaliana] >gi|21618230|gb|AAM67280.1| unknown [Arabidopsis
  misc_feature (1)..(191): Homolog of NCBI NO: 7486589 NR Description: hypothetical protein F7J7.130 - Arabidopsis >gi|2911076|emb|CAA17538.1| putative protein [Arabidopsis >gi|7268916|emb|CAB79119.1| putative protein [Arabidopsis
  misc_feature (1)..(156): Homolog of NCBI NO: 34909686 NR Description: B1131G08.1 [Oryza sativa (japonica
  misc_feature (1)..(125): Homolog of NCBI NO: 18415213 NR Description: pentatricopeptide (PPR) repeat-containing protein
  misc_feature (1)..(117): Homolog of NCBI NO: 7485419 NR Description: hypothetical protein F13C5.140 - Arabidopsis >gi|2832625|emb|CAA16754.1| putative protein [Arabidopsis >gi|7268691|emb|CAB78899.1| putative protein [Arabidopsis
  misc_feature (1)..(125): Homolog of NCBI NO: 34393638 NR Description: pentatricopeptide (PPR) repeat-containing
  misc_feature (1)..(174): Homolog of NCBI NO: 18390413 NR Description: expressed protein [Arabidopsis thaliana] unknown protein [Arabidopsis thaliana]
  misc_feature (1)..(174): Homolog of NCBI NO: 30678929 NR Description: expressed protein [Arabidopsis thaliana]
  misc_feature (1)..(174): Homolog of NCBI NO: 25406795 NR Description: hypothetical protein [imported] - Arabidopsis >gi|2494119|gb|AAB80628.1| EST gb|T04104 comes from this gene.

SEQ ID NO: 104662 - DNA, 1049 bp, Arabidopsis thaliana
  misc_feature (1)..(1049): Ceres Seq. ID no. 13615504
  misc_feature: MA Experiment ID: 20000171 Result: Up-regulated in Transcription
  misc_feature: MA Experiment 20000171 PARAMETER Experiment Name: At_42deg_Heat_P Parameter: Age (day) Value: 14
  misc_feature: MA Experiment 20000171 PARAMETER Experiment Name: At_42deg_Heat_P Parameter: Organism Value: A. thaliana
  misc_feature: MA Experiment 20000171 PARAMETER Experiment Name: At_42deg_Heat_P Parameter: Plant Line Value: WS
  misc_feature: MA Experiment 20000171 PARAMETER Experiment Name: At_42deg_Heat_P Parameter: Temperature (deg C) Value: 42 vs. 22
  misc_feature: MA Experiment 20000171 PARAMETER Experiment Name: At_42deg_Heat_P Parameter: Timepoint (hr) Value: 1
  misc_feature: MA Experiment 20000171 PARAMETER Experiment Name: At_42deg_Heat_P Parameter: Tissue Value: Aerial
  misc_feature: MA Experiment ID: 20000173 Result: Up-regulated in Transcription
  misc_feature: MA Experiment 20000173 PARAMETER Experiment Name: At_42deg_Heat_P Parameter: Age (day) Value: 14
  misc_feature: MA Experiment 20000173 PARAMETER Experiment Name: At_42deg_Heat_P Parameter: Organism Value: A. thaliana
  misc_feature: MA Experiment 20000173 PARAMETER Experiment Name: At_42deg_Heat_P Parameter: Plant Line Value: WS
  misc_feature: MA Experiment 20000173 PARAMETER Experiment Name: At_42deg_Heat_P Parameter: Temperature (deg C) Value: 42 vs. 22
  misc_feature: MA Experiment 20000173 PARAMETER Experiment Name: At_42deg_Heat_P Parameter: Timepoint (hr) Value: 6
  misc_feature: MA Experiment 20000173 PARAMETER Experiment Name: At_42deg_Heat_P Parameter: Tissue Value: Aerial
  misc_feature: MA Experiment ID: 20000214 Result: Down-regulated in Transcription
  misc_feature: MA Experiment 20000214 PARAMETER Experiment Name: At_4deg_Cold_P Parameter: Timepoint (hr) Value: 6
  misc_feature: MA Experiment ID: 20000436 Result: Up-regulated in Transcription
  misc_feature: MA Experiment 20000436 PARAMETER Experiment Name: At_Drought_P Parameter: Age (day) Value: 7
  misc_feature: MA Experiment 20000436 PARAMETER Experiment Name: At_Drought_P Parameter: Organism Value: A. thaliana
  misc_feature: MA Experiment 20000436 PARAMETER Experiment Name: At_Drought_P Parameter: Plant Line Value: WS
  misc_feature: MA Experiment 20000436 PARAMETER Experiment Name: At_Drought_P Parameter: Timepoint (hr) Value: 12
  misc_feature: MA Experiment 20000436 PARAMETER Experiment Name: At_Drought_P Parameter: Tissue Value: Whole Plant
  misc_feature: MA Experiment 20000436 PARAMETER Experiment Name: At_Drought_P Parameter: Treatment Value: Drought vs. No Drought
  misc_feature: MA Experiment ID: 20000437 Result: Up-regulated in Transcription
  misc_feature: MA Experiment 20000437 PARAMETER Experiment Name: At_Drought_P Parameter: Age (day) Value: 8
  misc_feature: MA Experiment 20000437 PARAMETER Experiment Name: At_Drought_P Parameter: Organism Value: A. thaliana
  misc_feature: MA Experiment 20000437 PARAMETER Experiment Name: At_Drought_P Parameter: Plant Line Value: WS
  misc_feature: MA Experiment 20000437 PARAMETER Experiment Name: At_Drought_P Parameter: Timepoint (hr) Value: 24
  misc_feature: MA Experiment 20000437 PARAMETER Experiment Name: At_Drought_P Parameter: Tissue Value: Whole Plant
  misc_feature: MA Experiment 20000437 PARAMETER Experiment Name: At_Drought_P Parameter: Treatment Value: Drought vs. No Drought
  misc_feature: MA Experiment ID: 20000443 Result: Up-regulated in Transcription
  misc_feature: MA Experiment 20000443 PARAMETER Experiment Name: At_1uM_BR-BRZ__P Parameter: Tissue Value: Shoot Apices
  misc_feature: MA Experiment 20000443 PARAMETER Experiment Name: At_1uM_BR-BRZ__P Parameter: Treatment Value: 1uM BRZ vs. No Treatment
  misc_feature: MA Experiment ID: 20000453 Result: Up-regulated in Transcription
  misc_feature: MA Experiment 20000453 PARAMETER Experiment Name: At_100uM_ABA_P Parameter: Age (day) Value: 15
  misc_feature: MA Experiment 20000453 PARAMETER Experiment Name: At_100uM_ABA_P Parameter: Organism Value: A. thaliana
  misc_feature: MA Experiment 20000453 PARAMETER Experiment Name: At_100uM_ABA_P Parameter: Plant Line Value: WS
  misc_feature: MA Experiment 20000453 PARAMETER Experiment Name: At_100uM_ABA_P Parameter: Timepoint (hr) Value: 24
  misc_feature: MA Experiment 20000453 PARAMETER Experiment Name: At_100uM_ABA_P Parameter: Tissue Value: Aerial
  misc_feature: MA Experiment 20000453 PARAMETER Experiment Name: At_100uM_ABA_P Parameter: Treatment Value: 100uM ABA vs. No Treatment
  misc_feature: MA Experiment ID: 20001247 Result: Up-regulated in Transcription
  misc_feature: MA Experiment 20001247 PARAMETER Experiment Name: At_Far-red-induction_P Parameter: Age (day) Value: 7
  misc_feature: MA Experiment 20001247 PARAMETER Experiment Name: At_Far-red-induction_P Parameter: Light Value: Far-red vs. White
  misc_feature: MA Experiment 20001247 PARAMETER Experiment Name: At_Far-red-induction_P Parameter: Organism Value: A. thaliana
  misc_feature: MA Experiment 20001247 PARAMETER Experiment Name: At_Far-red-induction_P Parameter: Plant Line Value: Columbia
  misc_feature: MA Experiment 20001247 PARAMETER Experiment Name: At_Far-red-induction_P Parameter: Timepoint (hr) Value: 1
  misc_feature: MA Experiment 20001247 PARAMETER Experiment Name: At_Far-red-induction_P Parameter: Tissue Value: Whole Plant
  misc_feature: MA Experiment ID: 20001248 Result: Down-regulated in Transcription
  misc_feature: MA Experiment 20001248 PARAMETER Experiment Name: At_Far-red-induction_P Parameter: Age (day) Value: 7
  misc_feature: MA Experiment 20001248 PARAMETER Experiment Name: At_Far-red-induction_P Parameter: Light Value: Far-red vs. White
  misc_feature: MA Experiment 20001248 PARAMETER Experiment Name: At_Far-red-induction_P Parameter: Organism Value: A. thaliana
  misc_feature: MA Experiment 20001248 PARAMETER Experiment Name: At_Far-red-induction_P Parameter: Plant Line Value: Columbia
  misc_feature: MA Experiment 20001248 PARAMETER Experiment Name: At_Far-red-induction_P Parameter: Timepoint (hr) Value: 4
  misc_feature: MA Experiment 20001248 PARAMETER Experiment Name: At_Far-red-induction_P Parameter: Tissue Value: Whole Plant
  misc_feature: MA Experiment ID: 20001554 Result: Up-regulated in Transcription
  misc_feature: MA Experiment 20001554 PARAMETER Experiment Name: At_Drought_Soil_Dry_P Parameter: Age (day) Value: 21
  misc_feature: MA Experiment 20001554 PARAMETER Experiment Name: At_Drought_Soil_Dry_P Parameter: Organism Value: A. thaliana
  misc_feature: MA Experiment 20001554 PARAMETER Experiment Name: At_Drought_Soil_Dry_P Parameter: Plant Line Value: WS
  misc_feature: MA Experiment 20001554 PARAMETER Experiment Name: At_Drought_Soil_Dry_P Parameter: Post Timepoint (hr) Value: None
  misc_feature: MA Experiment 20001554 PARAMETER Experiment Name: At_Drought_Soil_Dry_P Parameter: Post-Treatment Value: None
  misc_feature: MA Experiment 20001554 PARAMETER Experiment Name: At_Drought_Soil_Dry_P Parameter: Timepoint (day) Value: 7
  misc_feature: MA Experiment 20001554 PARAMETER Experiment Name: At_Drought_Soil_Dry_P Parameter: Treatment Value: Drought vs. No Drought
  misc_feature: MA Experiment ID: 20001555 Result: Up-regulated in Transcription
  misc_feature: MA Experiment 20001555 PARAMETER Experiment Name: At_Drought_Soil_Dry_P Parameter: Age (day) Value: 24
  misc_feature: MA Experiment 20001555 PARAMETER Experiment Name: At_Drought_Soil_Dry_P Parameter: Organism Value: A. thaliana
  misc_feature: MA Experiment 20001555 PARAMETER Experiment Name: At_Drought_Soil_Dry_P Parameter: Plant Line Value: WS
  misc_feature: MA Experiment 20001555 PARAMETER Experiment Name: At_Drought_Soil_Dry_P Parameter: Post Timepoint (hr) Value: None
  misc_feature: MA Experiment 20001555 PARAMETER Experiment Name: At_Drought_Soil_Dry_P Parameter: Post-Treatment Value: None
  misc_feature: MA Experiment 20001555 PARAMETER Experiment Name: At_Drought_Soil_Dry_P Parameter: Timepoint (day) Value: 10
  misc_feature: MA Experiment 20001555 PARAMETER Experiment Name: At_Drought_Soil_Dry_P Parameter: Treatment Value: Drought vs. No Drought
  misc_feature: MA Experiment ID: 20001556 Result: Up-regulated in Transcription
  misc_feature: MA Experiment 20001556 PARAMETER Experiment Name: At_Drought_Soil_Dry_P Parameter: Age (day) Value: 26
  misc_feature: MA Experiment 20001556 PARAMETER Experiment Name: At_Drought_Soil_Dry_P Parameter: Organism Value: A. thaliana
  misc_feature: MA Experiment 20001556 PARAMETER Experiment Name: At_Drought_Soil_Dry_P Parameter: Plant Line Value: WS
  misc_feature: MA Experiment 20001556 PARAMETER Experiment Name: At_Drought_Soil_Dry_P Parameter: Post Timepoint (hr) Value: None
  misc_feature: MA Experiment 20001556 PARAMETER Experiment Name: At_Drought_Soil_Dry_P Parameter: Post-Treatment Value: None
  misc_feature: MA Experiment 20001556 PARAMETER Experiment Name: At_Drought_Soil_Dry_P Parameter: Timepoint (day) Value: 12
  misc_feature: MA Experiment 20001556 PARAMETER Experiment Name: At_Drought_Soil_Dry_P Parameter: Treatment Value: Drought vs. No Drought
  misc_feature: MA Experiment ID: 20001559 Result: Up-regulated in Transcription
  misc_feature: MA Experiment 20001559 PARAMETER Experiment Name: At_Drought_Soil_Dry_P Parameter: Age (day) Value: 28
  misc_feature: MA Experiment 20001559 PARAMETER Experiment Name: At_Drought_Soil_Dry_P Parameter: Organism Value: A. thaliana
  misc_feature: MA Experiment 20001559 PARAMETER Experiment Name: At_Drought_Soil_Dry_P Parameter: Plant Line Value: WS
  misc_feature: MA Experiment 20001559 PARAMETER Experiment Name: At_Drought_Soil_Dry_P Parameter: Post Timepoint (hr) Value: 29
  misc_feature: MA Experiment 20001559 PARAMETER Experiment Name: At_Drought_Soil_Dry_P Parameter: Post-Treatment Value: Re-Water vs. No Drought
  misc_feature: MA Experiment 20001559 PARAMETER Experiment Name: At_Drought_Soil_Dry_P Parameter: Timepoint (day) Value: 14
  misc_feature: MA Experiment 20001559 PARAMETER Experiment Name: At_Drought_Soil_Dry_P Parameter: Treatment Value: Drought vs. No Drought
  misc_feature: MA Experiment ID: 20001768 Result: Up-regulated in Transcription
  misc_feature: MA Experiment 20001768 PARAMETER Experiment Name: At_Far-red-enriched-adult_P Parameter: Age (day) Value: 28
  misc_feature: MA Experiment 20001768 PARAMETER Experiment Name: At_Far-red-enriched-adult_P Parameter: Light Value: Far-red enriched vs. White
  misc_feature: MA Experiment 20001768 PARAMETER Experiment Name: At_Far-red-enriched-adult_P Parameter: Organism Value: A. thaliana
  misc_feature: MA Experiment 20001768 PARAMETER Experiment Name: At_Far-red-enriched-adult_P Parameter: Plant Line Value: Columbia
  misc_feature: MA Experiment 20001768 PARAMETER Experiment Name: At_Far-red-enriched-adult_P Parameter: Timepoint (hr) Value: 1
  misc_feature: MA Experiment 20001768 PARAMETER Experiment Name: At_Far-red-enriched-adult_P Parameter: Tissue Value: Aerial
  misc_feature: MA Experiment ID: 20001904 Result: Up-regulated in Transcription
  misc_feature: MA Experiment 20001904 PARAMETER Experiment Name: At_Drought_Reproduction_P Parameter: Age (day) Value: 37
  misc_feature: MA Experiment 20001904 PARAMETER Experiment Name: At_Drought_Reproduction_P Parameter: Organism Value: A. thaliana
  misc_feature: MA Experiment 20001904 PARAMETER Experiment Name: At_Drought_Reproduction_P Parameter: Plant Line Value: WS
  misc_feature: MA Experiment 20001904 PARAMETER Experiment Name: At_Drought_Reproduction_P Parameter: Timepoint (day) Value: 7
  misc_feature: MA Experiment 20001904 PARAMETER Experiment Name: At_Drought_Reproduction_P Parameter: Tissue Value: Rosettes
  misc_feature: MA Experiment 20001904 PARAMETER Experiment Name: At_Drought_Reproduction_P Parameter: Treatment Value: Drought vs. No Drought
  misc_feature: MA Experiment ID: 20001905 Result: Up-regulated in Transcription
  misc_feature: MA Experiment 20001905 PARAMETER Experiment Name: At_Drought_Reproduction_P Parameter: Age (day) Value: 40
  misc_feature: MA Experiment 20001905 PARAMETER Experiment Name: At_Drought_Reproduction_P Parameter: Organism Value: A. thaliana
  misc_feature: MA Experiment 20001905 PARAMETER Experiment Name: At_Drought_Reproduction_P Parameter: Plant Line Value: WS
  misc_feature: MA Experiment 20001905 PARAMETER Experiment Name: At_Drought_Reproduction_P Parameter: Timepoint (day) Value: 10
  misc_feature: MA Experiment 20001905 PARAMETER Experiment Name: At_Drought_Reproduction_P Parameter: Tissue Value: Rosettes
  misc_feature: MA Experiment 20001905 PARAMETER Experiment Name: At_Drought_Reproduction_P Parameter: Treatment Value: Drought vs. No Drought
  misc_feature: MA Experiment ID: 20001911 Result: Up-regulated in Transcription
  misc_feature: MA Experiment 20001911 PARAMETER Experiment Name: At_Drought_Reproduction_P Parameter: Age (day) Value: 40
  misc_feature: MA Experiment 20001911 PARAMETER Experiment Name: At_Drought_Reproduction_P Parameter: Organism Value: A. thaliana
  misc_feature: MA Experiment 20001911 PARAMETER Experiment Name: At_Drought_Reproduction_P Parameter: Plant Line Value: WS
  misc_feature: MA Experiment 20001911 PARAMETER Experiment Name: At_Drought_Reproduction_P Parameter: Timepoint (day) Value: 10
  misc_feature: MA Experiment 20001911 PARAMETER Experiment Name: At_Drought_Reproduction_P Parameter: Tissue Value: Flowers
  misc_feature: MA Experiment 20001911 PARAMETER Experiment Name: At_Drought_Reproduction_P Parameter: Treatment Value: Drought vs. No Drought
gaattctcaggagaagaagaagaagaagaagtgaacagagaaaatggcggcttactacagatggaagagtttcgaggagaacgaagatcgtccagagaagcctcgccgttacggtgttacggagatgcgaggtcctcattactccgttctcagccagaaccttcttcaggaaatttttgaatcgatgggacagtttgttgatgggttaaagttctctggaggatccaacagtttgattccaaaatcattcatcaaacaagctattgaaatggctcatgaacatggtgtttatgttagcactggtgattgggctgaacatatgcttcgtagtggtccttcagctttcaaagactatgtggaggagtgtaagcagttggggtttgacactattgagctgaatgcaaatttgcttgaagttcctgaggaaactcttctacgatatgtacgtttgattaagaacggtggtctcagagccaaaccaatgtttgctgtgaaattcaacaagtctgatattcctggtaggaatagagcatttggttcctatgttgttccagaacctcggtcaagcgagtttgtggaggacatagatctcttgatcagaaaggctgaacggtgtttagaagccggggcagacactattatgatagatgcggatgatgtctgcaaatacgcggattcccttcgagcagacataattgctaaagtcataggacgtttgggaatagagaagactatgtttgaagcatctgatgcgaagttggttgagtggttcatcaaacgttatggtccaaatgtgaatctctatgtggatcattctcagattatggatctcgagtgcctccgtggtcgtcatctgggtaaagatcaccaatctgttctcagttcctcctacttcttgttttaaagtagtagctctcgcactacatctagtgttgtgtgaatttcctatatatgtattatgtcgtatgtgtctgatgttatgtgcttctttgatgctgtaagaatgcaaatgttttgagaataatgtgatatgcgatttttcggtgatc

SEQ ID NO: 104663 - protein, 286 aa, Arabidopsis thaliana
  peptide (1)..(286): Ceres Seq. ID no. 13615505
  misc_feature (10)..(273): Pfam Name: (2R)-phospho-3-sulfolactate synthase (ComA) Pfam Description: (2R)-phospho-3-sulfolactate synthase (ComA)
  misc_feature (1)..(286): Homolog of NCBI NO: 30685384 NR Description: expressed protein [Arabidopsis thaliana]
  misc_feature (1)..(251): Homolog of NCBI NO: 7487784 NR Description: hypothetical protein T6K22.50 - Arabidopsis >gi|3402751|emb|CAA20197.1| putative protein [Arabidopsis >gi|7268928|emb|CAB79131.1| putative protein [Arabidopsis
  misc_feature (10)..(267): Homolog of NCBI NO: 40745438 NR Description: hypothetical protein AN1464.2 [Aspergillus
  misc_feature (16)..(267): Homolog of NCBI NO: 19553737 NR Description: hypothetical protein [Corynebacterium glutamicum
  misc_feature (9)..(274): Homolog of NCBI NO: 29655237 NR Description: hypothetical protein [Coxiella burnetii RSA 493]
MAAYYRWKSFEENEDRPEKPRRYGVTEMRGPHYSVLSQNLLQEIFESMGQFVDGLKFSGGSNSLIPKSFIKQAIEMAHEHGVYVSTGDWAEHMLRSGPSAFKDYVEECKQLGFDTIELNANLLEVPEETLLRYVRLIKNGGLRAKPMFAVKFNKSDIPGRNRAFGSYVVPEPRSSEFVEDIDLLIRKAERCLEAGADTIMIDADDVCKYADSLRADIIAKVIGRLGIEKTMFEASDAKLVEWFIKRYGPNVNLYVDHSQIMDLECLRGRHLGKDHQSVLSSSYFLF

SEQ ID NO: 104664 - protein, 259 aa, Arabidopsis thaliana
  peptide (1)..(259): Ceres Seq. ID no. 13615506
  misc_feature (1)..(246): Pfam Name: (2R)-phospho-3-sulfolactate synthase (ComA) Pfam Description: (2R)-phospho-3-sulfolactate synthase (ComA)
  misc_feature (1)..(259): Homolog of NCBI NO: 30685384 NR Description: expressed protein [Arabidopsis thaliana]
  misc_feature (1)..(224): Homolog of NCBI NO: 7487784 NR Description: hypothetical protein T6K22.50 - Arabidopsis >gi|3402751|emb|CAA20197.1| putative protein [Arabidopsis >gi|7268928|emb|CAB79131.1| putative protein [Arabidopsis
  misc_feature (1)..(240): Homolog of NCBI NO: 40745438 NR Description: hypothetical protein AN1464.2 [Aspergillus
  misc_feature (1)..(240): Homolog of NCBI NO: 19553737 NR Description: hypothetical protein [Corynebacterium glutamicum
  misc_feature (1)..(247): Homolog of NCBI NO: 29655237 NR Description: hypothetical protein [Coxiella burnetii RSA 493]
MRGPHYSVLSQNLLQEIFESMGQFVDGLKFSGGSNSLIPKSFIKQAIEMAHEHGVYVSTGDWAEHMLRSGPSAFKDYVEECKQLGFDTIELNANLLEVPEETLLRYVRLIKNGGLRAKPMFAVKFNKSDIPGRNRAFGSYVVPEPRSSEFVEDIDLLIRKAERCLEAGADTIMIDADDVCKYADSLRADIIAKVIGRLGIEKTMFEASDAKLVEWFIKRYGPNVNLYVDHSQIMDLECLRGRHLGKDHQSVLSSSYFLF

SEQ ID NO: 104665 - protein, 239 aa, Arabidopsis thaliana
  peptide (1)..(239): Ceres Seq. ID no. 13615507
  misc_feature (1)..(226): Pfam Name: (2R)-phospho-3-sulfolactate synthase (ComA) Pfam Description: (2R)-phospho-3-sulfolactate synthase (ComA)
  misc_feature (1)..(239): Homolog of NCBI NO: 30685384 NR Description: expressed protein [Arabidopsis thaliana]
  misc_feature (1)..(204): Homolog of NCBI NO: 7487784 NR Description: hypothetical protein T6K22.50 - Arabidopsis >gi|3402751|emb|CAA20197.1| putative protein [Arabidopsis >gi|7268928|emb|CAB79131.1| putative protein [Arabidopsis
  misc_feature (1)..(220): Homolog of NCBI NO: 40745438 NR Description: hypothetical protein AN1464.2 [Aspergillus
  misc_feature (1)..(220): Homolog of NCBI NO: 19553737 NR Description: hypothetical protein [Corynebacterium glutamicum
  misc_feature (1)..(227): Homolog of NCBI NO: 29655237 NR Description: hypothetical protein [Coxiella burnetii RSA 493]
MGQFVDGLKFSGGSNSLIPKSFIKQAIEMAHEHGVYVSTGDWAEHMLRSGPSAFKDYVEECKQLGFDTIELNANLLEVPEETLLRYVRLIKNGGLRAKPMFAVKFNKSDIPGRNRAFGSYVVPEPRSSEFVEDIDLLIRKAERCLEAGADTIMIDADDVCKYADSLRADIIAKVIGRLGIEKTMFEASDAKLVEWFIKRYGPNVNLYVDHSQIMDLECLRGRHLGKDHQSVLSSSYFLF

SEQ ID NO: 104666 - DNA, 1150 bp, Arabidopsis thaliana
  misc_feature (1)..(1150): Ceres Seq. ID no. 13615511
  misc_feature: MA Experiment ID: 108462 Result: Down-regulated in Transcription
  misc_feature: MA Experiment 108462 PARAMETER Experiment Name: At_Germinating_Seeds_cDNA_P Parameter: Age (day) Value: 2 vs. 0
  misc_feature: MA Experiment 108462 PARAMETER Experiment Name: At_Germinating_Seeds_cDNA_P Parameter: Tissue Value: Germinating Seeds
  misc_feature: MA Experiment ID: 108572 Result: Up-regulated in Transcription
  misc_feature: MA Experiment 108572 PARAMETER Experiment Name: At_Drought_cDNA_P Parameter: Timepoint (hr) Value: 1
  misc_feature: MA Experiment 108572 PARAMETER Experiment Name: At_Drought_cDNA_P Parameter: Tissue Value: Aerial
  misc_feature: MA Experiment 108572 PARAMETER Experiment Name: At_Drought_cDNA_P Parameter: Treatment Value: Drought vs. No Drought
  misc_feature: MA Experiment ID: 108579 Result: Up-regulated in Transcription
  misc_feature: MA Experiment 108579 PARAMETER Experiment Name: At_4deg_Cold_cDNA_P Parameter: Temperature (deg C) Value: 4 vs. 22
  misc_feature: MA Experiment 108579 PARAMETER Experiment Name: At_4deg_Cold_cDNA_P Parameter: Timepoint (hr) Value: 6
  misc_feature: MA Experiment 108579 PARAMETER Experiment Name: At_4deg_Cold_cDNA_P Parameter: Tissue Value: Aerial
  misc_feature: MA Experiment ID: 108594 Result: Down-regulated in Transcription
  misc_feature: MA Experiment 108594 PARAMETER Experiment Name: At_Ler-rhl_Root_cDNA_P Parameter: Plant Line Value: null
  misc_feature: MA Experiment ID: 108595 Result: Up-regulated in Transcription
  misc_feature: MA Experiment 108595 PARAMETER Experiment Name: At_Ler-pi_Ovule_cDNA_P Parameter: Plant Line Value: null
  misc_feature: MA Experiment ID: 108605 Result: Up-regulated in Transcription
  misc_feature: MA Experiment 108605 PARAMETER Experiment Name: At_100uM_ABA_cDNA_P Parameter: Timepoint (hr) Value: 6
  misc_feature: MA Experiment 108605 PARAMETER Experiment Name: At_100uM_ABA_cDNA_P Parameter: Tissue Value: Aerial
  misc_feature: MA Experiment 108605 PARAMETER Experiment Name: At_100uM_ABA_cDNA_P Parameter: Treatment Value: 100uM ABA vs. No Treatment
  misc_feature: MA Experiment ID: 108607 Result: Up-regulated in Transcription
  misc_feature: MA Experiment 108607 PARAMETER Experiment Name: At_100uM_ABA_cDNA_P Parameter: Timepoint (hr) Value: 4
  misc_feature: MA Experiment 108607 PARAMETER Experiment Name: At_100uM_ABA_cDNA_P Parameter: Tissue Value: Aerial
  misc_feature: MA Experiment 108607 PARAMETER Experiment Name: At_100uM_ABA_cDNA_P Parameter: Treatment Value: 100uM ABA vs. No Treatment
  misc_feature: MA Experiment ID: 108608 Result: Up-regulated in Transcription
  misc_feature: MA Experiment 108608 PARAMETER Experiment Name: At_100uM_ABA_cDNA_P Parameter: Timepoint (hr) Value: 1
  misc_feature: MA Experiment 108608 PARAMETER Experiment Name: At_100uM_ABA_cDNA_P Parameter: Tissue Value: Aerial
  misc_feature: MA Experiment 108608 PARAMETER Experiment Name: At_100uM_ABA_cDNA_P Parameter: Treatment Value: 100uM ABA vs. No Treatment
  misc_feature: MA Experiment ID: 20000069 Result: Up-regulated in Transcription
  misc_feature: MA Experiment 20000069 PARAMETER Experiment Name: At_100uM_ABA_Mutants_cDNA_P Parameter: Plant Line Value: CS23
  misc_feature: MA Experiment 20000069 PARAMETER Experiment Name: At_100uM_ABA_Mutants_cDNA_P Parameter: Timepoint (hr) Value: 6
  misc_feature: MA Experiment 20000069 PARAMETER Experiment Name: At_100uM_ABA_Mutants_cDNA_P Parameter: Tissue Value: Aerial
  misc_feature: MA Experiment 20000069 PARAMETER Experiment Name: At_100uM_ABA_Mutants_cDNA_P Parameter: Treatment Value: 100uM ABA vs. No Treatment
  misc_feature: MA Experiment ID: 20000070 Result: Up-regulated in Transcription
  misc_feature: MA Experiment 20000070 PARAMETER Experiment Name: At_100uM_ABA_Mutants_cDNA_P Parameter: Plant Line Value: CS24
  misc_feature: MA Experiment 20000070 PARAMETER Experiment Name: At_100uM_ABA_Mutants_cDNA_P Parameter: Timepoint (hr) Value: 6
  misc_feature: MA Experiment 20000070 PARAMETER Experiment Name: At_100uM_ABA_Mutants_cDNA_P Parameter: Tissue Value: Aerial
  misc_feature: MA Experiment 20000070 PARAMETER Experiment Name: At_100uM_ABA_Mutants_cDNA_P Parameter: Treatment Value: 100uM ABA vs. No Treatment
  misc_feature: MA Experiment ID: 20000071 Result: Up-regulated in Transcription
  misc_feature: MA Experiment 20000071 PARAMETER Experiment Name: At_100uM_ABA_Mutants_cDNA_P Parameter: Plant Line Value: CS8104
  misc_feature: MA Experiment 20000071 PARAMETER Experiment Name: At_100uM_ABA_Mutants_cDNA_P Parameter: Timepoint (hr) Value: 6
  misc_feature: MA Experiment 20000071 PARAMETER Experiment Name: At_100uM_ABA_Mutants_cDNA_P Parameter: Tissue Value: Aerial
  misc_feature: MA Experiment 20000071 PARAMETER Experiment Name: At_100uM_ABA_Mutants_cDNA_P Parameter: Treatment Value: 100uM ABA vs. No Treatment
  misc_feature: MA Experiment ID: 20000072 Result: Up-regulated in Transcription
  misc_feature: MA Experiment 20000072 PARAMETER Experiment Name: At_100uM_ABA_Mutants_cDNA_P Parameter: Plant Line Value: CS8105
  misc_feature: MA Experiment 20000072 PARAMETER Experiment Name: At_100uM_ABA_Mutants_cDNA_P Parameter: Timepoint (hr) Value: 6
  misc_feature: MA Experiment 20000072 PARAMETER Experiment Name: At_100uM_ABA_Mutants_cDNA_P Parameter: Tissue Value: Aerial
  misc_feature: MA Experiment 20000072 PARAMETER Experiment Name: At_100uM_ABA_Mutants_cDNA_P Parameter: Treatment Value: 100uM ABA vs. No Treatment
  misc_feature: MA Experiment ID: 20000086 Result: Up-regulated in Transcription
  misc_feature: MA Experiment 20000086 PARAMETER Experiment Name: At_100uM_ABA_Mutants_cDNA_P Parameter: Plant Line Value: CS22
  misc_feature: MA Experiment 20000086 PARAMETER Experiment Name: At_100uM_ABA_Mutants_cDNA_P Parameter: Timepoint (hr) Value: 6
  misc_feature: MA Experiment 20000086 PARAMETER Experiment Name: At_100uM_ABA_Mutants_cDNA_P Parameter: Tissue Value: Aerial
  misc_feature: MA Experiment 20000086 PARAMETER Experiment Name: At_100uM_ABA_Mutants_cDNA_P Parameter: Treatment Value: 100uM ABA vs. No Treatment
  misc_feature: MA Experiment ID: 20000087 Result: Up-regulated in Transcription
  misc_feature: MA Experiment 20000087 PARAMETER Experiment Name: At_100uM_ABA_Mutants_cDNA_P Parameter: Plant Line Value: WS
  misc_feature: MA Experiment 20000087 PARAMETER Experiment Name: At_100uM_ABA_Mutants_cDNA_P Parameter: Timepoint (hr) Value: 6
  misc_feature: MA Experiment 20000087 PARAMETER Experiment Name: At_100uM_ABA_Mutants_cDNA_P Parameter: Tissue Value: Aerial
  misc_feature: MA Experiment 20000087 PARAMETER Experiment Name: At_100uM_ABA_Mutants_cDNA_P Parameter: Treatment Value: 100uM ABA vs. No Treatment
  misc_feature: MA Experiment ID: 20000088 Result: Up-regulated in Transcription
  misc_feature: MA Experiment 20000088 PARAMETER Experiment Name: At_100uM_ABA_Mutants_cDNA_P Parameter: Plant Line Value: Landsberg
  misc_feature: MA Experiment 20000088 PARAMETER Experiment Name: At_100uM_ABA_Mutants_cDNA_P Parameter: Timepoint (hr) Value: 6
  misc_feature: MA Experiment 20000088 PARAMETER Experiment Name: At_100uM_ABA_Mutants_cDNA_P Parameter: Tissue Value: Aerial
  misc_feature: MA Experiment 20000088 PARAMETER Experiment Name: At_100uM_ABA_Mutants_cDNA_P Parameter: Treatment Value: 100uM ABA vs. No Treatment
  misc_feature: MA Experiment ID: 20000090 Result: Up-regulated in Transcription
  misc_feature: MA Experiment ID: 20000111 Result: Down-regulated in Transcription
  misc_feature: MA Experiment 20000111 PARAMETER Experiment Name: At_42deg_Heat_cDNA_P Parameter: Temperature (deg C) Value: 42 vs. 22
  misc_feature: MA Experiment 20000111 PARAMETER Experiment Name: At_42deg_Heat_cDNA_P Parameter: Timepoint (hr) Value: 6
  misc_feature: MA Experiment 20000111 PARAMETER Experiment Name: At_42deg_Heat_cDNA_P Parameter: Tissue Value: Aerial
  misc_feature: MA Experiment ID: 20000113 Result: Down-regulated in Transcription
  misc_feature: MA Experiment 20000113 PARAMETER Experiment Name: At_42deg_Heat_cDNA_P Parameter: Temperature (deg C) Value: 42 vs. 22
  misc_feature: MA Experiment 20000113 PARAMETER Experiment Name: At_42deg_Heat_cDNA_P Parameter: Timepoint (hr) Value: 8
  misc_feature: MA Experiment 20000113 PARAMETER Experiment Name: At_42deg_Heat_cDNA_P Parameter: Tissue Value: Aerial
  misc_feature: MA Experiment ID: 20000117 Result: Up-regulated in Transcription
  misc_feature: MA Experiment 20000117 PARAMETER Experiment Name: At_100uM_ABA_Mutants_cDNA_P Parameter: Plant Line Value: Columbia
  misc_feature: MA Experiment 20000117 PARAMETER Experiment Name: At_100uM_ABA_Mutants_cDNA_P Parameter: Timepoint (hr) Value: 6
  misc_feature: MA Experiment 20000117 PARAMETER Experiment Name: At_100uM_ABA_Mutants_cDNA_P Parameter: Tissue Value: Aerial
  misc_feature: MA Experiment 20000117 PARAMETER Experiment Name: At_100uM_ABA_Mutants_cDNA_P Parameter: Treatment Value: 100uM ABA vs. No Treatment
  misc_feature: MA Experiment ID: 20000173 Result: Down-regulated in Transcription
  misc_feature: MA Experiment 20000173 PARAMETER Experiment Name: At_42deg_Heat_P Parameter: Age (day) Value: 14
  misc_feature: MA Experiment 20000173 PARAMETER Experiment Name: At_42deg_Heat_P Parameter: Organism Value: A. thaliana
  misc_feature: MA Experiment 20000173 PARAMETER Experiment Name: At_42deg_Heat_P Parameter: Plant Line Value: WS
  misc_feature: MA Experiment 20000173 PARAMETER Experiment Name: At_42deg_Heat_P Parameter: Temperature (deg C) Value: 42 vs. 22
  misc_feature: MA Experiment 20000173 PARAMETER Experiment Name: At_42deg_Heat_P Parameter: Timepoint (hr) Value: 6
  misc_feature: MA Experiment 20000173 PARAMETER Experiment Name: At_42deg_Heat_P Parameter: Tissue Value: Aerial
  misc_feature: MA Experiment ID: 20000224 Result: Up-regulated in Transcription
  misc_feature: MA Experiment ID: 20000234 Result: Up-regulated in Transcription
  misc_feature: MA Experiment 20000234 PARAMETER Experiment Name: At_Siliques_P Parameter: Age (day) Value: 21
  misc_feature: MA Experiment 20000234 PARAMETER Experiment Name: At_Siliques_P Parameter: Organism Value: A. thaliana
  misc_feature: MA Experiment 20000234 PARAMETER Experiment Name: At_Siliques_P Parameter: Plant Line Value: WS
  misc_feature: MA Experiment 20000234 PARAMETER Experiment Name: At_Siliques_P Parameter: Tissue Value: Less Than 5mm Siliques vs. Whole Plant
  misc_feature: MA Experiment ID: 20000235 Result: Up-regulated in Transcription
  misc_feature: MA Experiment 20000235 PARAMETER Experiment Name: At_Siliques_P Parameter: Age (day) Value: 21
  misc_feature: MA Experiment 20000235 PARAMETER Experiment Name: At_Siliques_P Parameter: Organism Value: A. thaliana
  misc_feature: MA Experiment 20000235 PARAMETER Experiment Name: At_Siliques_P Parameter: Plant Line Value: WS
  misc_feature: MA Experiment 20000235 PARAMETER Experiment Name: At_Siliques_P Parameter: Tissue Value: 5-10mm Siliques vs. Whole Plant
  misc_feature: MA Experiment ID: 20000267 Result: Up-regulated in Transcription
  misc_feature: MA Experiment 20000267 PARAMETER Experiment Name: At_Drought_P Parameter: Age (day) Value: 7
  misc_feature: MA Experiment 20000267 PARAMETER Experiment Name: At_Drought_P Parameter: Organism Value: A. thaliana
  misc_feature: MA Experiment 20000267 PARAMETER Experiment Name: At_Drought_P Parameter: Plant Line Value: WS
  misc_feature: MA Experiment 20000267 PARAMETER Experiment Name: At_Drought_P Parameter: Timepoint (hr) Value: 6
  misc_feature: MA Experiment 20000267 PARAMETER Experiment Name: At_Drought_P Parameter: Tissue Value: Whole Plant
  misc_feature: MA Experiment 20000267 PARAMETER Experiment Name: At_Drought_P Parameter: Treatment Value: Drought vs. No Drought
  misc_feature: MA Experiment ID: 20000437 Result: Up-regulated in Transcription
  misc_feature: MA Experiment 20000437 PARAMETER Experiment Name: At_Drought_P Parameter: Age (day) Value: 8
  misc_feature: MA Experiment 20000437 PARAMETER Experiment Name: At_Drought_P Parameter: Organism Value: A. thaliana
  misc_feature: MA Experiment 20000437 PARAMETER Experiment Name: At_Drought_P Parameter: Plant Line Value: WS
  misc_feature: MA Experiment 20000437 PARAMETER Experiment Name: At_Drought_P Parameter: Timepoint (hr) Value: 24
  misc_feature: MA Experiment 20000437 PARAMETER Experiment Name: At_Drought_P Parameter: Tissue Value: Whole Plant
  misc_feature: MA Experiment 20000437 PARAMETER Experiment Name: At_Drought_P Parameter: Treatment Value: Drought vs. No Drought
  misc_feature: MA Experiment ID: 20000438 Result: Down-regulated in Transcription
  misc_feature: MA Experiment 20000438 PARAMETER Experiment Name: At_Shoots__P Parameter: Age (day) Value: 14
  misc_feature: MA Experiment 20000438 PARAMETER Experiment Name: At_Shoots__P Parameter: Tissue Value: Shoots vs. Whole Plant
  misc_feature: MA Experiment ID: 20000441 Result: Down-regulated in Transcription
  misc_feature: MA Experiment 20000441 PARAMETER Experiment Name: At_1uM_BR-BRZ__P Parameter: Tissue Value: Shoot Apices
  misc_feature: MA Experiment 20000441 PARAMETER Experiment Name: At_1uM_BR-BRZ__P Parameter: Treatment Value: 1uM BR vs. No Treatment
  misc_feature: MA Experiment ID: 20000443 Result: Down-regulated in Transcription
  misc_feature: MA Experiment 20000443 PARAMETER Experiment Name: At_1uM_BR-BRZ__P Parameter: Tissue Value: Shoot Apices
  misc_feature: MA Experiment 20000443 PARAMETER Experiment Name: At_1uM_BR-BRZ__P Parameter: Treatment Value: 1uM BRZ vs. No Treatment
  misc_feature: MA Experiment ID: 20001247 Result: Down-regulated in Transcription
  misc_feature: MA Experiment 20001247 PARAMETER Experiment Name: At_Far-red-induction_P Parameter: Age (day) Value: 7
  misc_feature: MA Experiment 20001247 PARAMETER Experiment Name: At_Far-red-induction_P Parameter: Light Value: Far-red vs. White
  misc_feature: MA Experiment 20001247 PARAMETER Experiment Name: At_Far-red-induction_P Parameter: Organism Value: A. thaliana
  misc_feature: MA Experiment 20001247 PARAMETER Experiment Name: At_Far-red-induction_P Parameter: Plant Line Value: Columbia
  misc_feature: MA Experiment 20001247 PARAMETER Experiment Name: At_Far-red-induction_P Parameter: Timepoint (hr) Value: 1
  misc_feature: MA Experiment 20001247 PARAMETER Experiment Name: At_Far-red-induction_P Parameter: Tissue Value: Whole Plant
  misc_feature: MA Experiment ID: 20001450 Result: Down-regulated in Transcription
  misc_feature: MA Experiment 20001450 PARAMETER Experiment Name: At_Far-red-induction_P Parameter: Age (day) Value: 7
  misc_feature: MA Experiment 20001450 PARAMETER Experiment Name: At_Far-red-induction_P Parameter: Light Value: Far-red vs. White
  misc_feature: MA Experiment 20001450 PARAMETER Experiment Name: At_Far-red-induction_P Parameter: Organism Value: A. thaliana
  misc_feature: MA Experiment 20001450 PARAMETER Experiment Name: At_Far-red-induction_P Parameter: Plant Line Value: Columbia
  misc_feature: MA Experiment 20001450 PARAMETER Experiment Name: At_Far-red-induction_P Parameter: Timepoint (hr) Value: 8
  misc_feature: MA Experiment 20001450 PARAMETER Experiment Name: At_Far-red-induction_P Parameter: Tissue Value: Whole Plant
  misc_feature: MA Experiment ID: 20001451 Result: Down-regulated in Transcription
  misc_feature: MA Experiment 20001451 PARAMETER Experiment Name: At_Far-red-induction_P Parameter: Age (day) Value: 7
  misc_feature: MA Experiment 20001451 PARAMETER Experiment Name: At_Far-red-induction_P Parameter: Light Value: Far-red vs. White
  misc_feature: MA Experiment 20001451 PARAMETER Experiment Name: At_Far-red-induction_P Parameter: Organism Value: A. thaliana
  misc_feature: MA Experiment 20001451 PARAMETER Experiment Name: At_Far-red-induction_P Parameter: Plant Line Value: Columbia
  misc_feature: MA Experiment 20001451 PARAMETER Experiment Name: At_Far-red-induction_P Parameter: Timepoint (hr) Value: 24
  misc_feature: MA Experiment 20001451 PARAMETER Experiment Name: At_Far-red-induction_P Parameter: Tissue Value: Whole Plant
  misc_feature: MA Experiment ID: 20001555 Result: Up-regulated in Transcription
  misc_feature: MA Experiment 20001555 PARAMETER Experiment Name: At_Drought_Soil_Dry_P Parameter: Age (day) Value: 24
  misc_feature: MA Experiment 20001555 PARAMETER Experiment Name: At_Drought_Soil_Dry_P Parameter: Organism Value: A. thaliana
  misc_feature: MA Experiment 20001555 PARAMETER Experiment Name: At_Drought_Soil_Dry_P Parameter: Plant Line Value: WS
  misc_feature: MA Experiment 20001555 PARAMETER Experiment Name: At_Drought_Soil_Dry_P Parameter: Post Timepoint (hr) Value: None
  misc_feature: MA Experiment 20001555 PARAMETER Experiment Name: At_Drought_Soil_Dry_P Parameter: Post-Treatment Value: None
  misc_feature: MA Experiment 20001555 PARAMETER Experiment Name: At_Drought_Soil_Dry_P Parameter: Timepoint (day) Value: 10
  misc_feature: MA Experiment 20001555 PARAMETER Experiment Name: At_Drought_Soil_Dry_P Parameter: Treatment Value: Drought vs. No Drought
  misc_feature: MA Experiment ID: 20001556 Result: Up-regulated in Transcription
  misc_feature: MA Experiment 20001556 PARAMETER Experiment Name: At_Drought_Soil_Dry_P Parameter: Age (day) Value: 26
  misc_feature: MA Experiment 20001556 PARAMETER Experiment Name: At_Drought_Soil_Dry_P Parameter: Organism Value: A. thaliana
  misc_feature: MA Experiment 20001556 PARAMETER Experiment Name: At_Drought_Soil_Dry_P Parameter: Plant Line Value: WS
  misc_feature: MA Experiment 20001556 PARAMETER Experiment Name: At_Drought_Soil_Dry_P Parameter: Post Timepoint (hr) Value: None
  misc_feature: MA Experiment 20001556 PARAMETER Experiment Name: At_Drought_Soil_Dry_P Parameter: Post-Treatment Value: None
  misc_feature: MA Experiment 20001556 PARAMETER Experiment Name: At_Drought_Soil_Dry_P Parameter: Timepoint (day) Value: 12
  misc_feature: MA Experiment 20001556 PARAMETER Experiment Name: At_Drought_Soil_Dry_P Parameter: Treatment Value: Drought vs. No Drought
  misc_feature: MA Experiment ID: 20001557 Result: Up-regulated in Transcription
  misc_feature: MA Experiment 20001557 PARAMETER Experiment Name: At_Drought_Soil_Dry_P Parameter: Age (day) Value: 27
  misc_feature: MA Experiment 20001557 PARAMETER Experiment Name: At_Drought_Soil_Dry_P Parameter: Organism Value: A. thaliana
  misc_feature: MA Experiment 20001557 PARAMETER Experiment Name: At_Drought_Soil_Dry_P Parameter: Plant Line Value: WS
  misc_feature: MA Experiment 20001557 PARAMETER Experiment Name: At_Drought_Soil_Dry_P Parameter: Post Timepoint (hr) Value: 3
  misc_feature: MA Experiment 20001557 PARAMETER Experiment Name: At_Drought_Soil_Dry_P Parameter: Post-Treatment Value: Re-Water vs. No Drought
  misc_feature: MA Experiment 20001557 PARAMETER Experiment Name: At_Drought_Soil_Dry_P Parameter: Timepoint (day) Value: 13
  misc_feature: MA Experiment 20001557 PARAMETER Experiment Name: At_Drought_Soil_Dry_P Parameter: Treatment Value: Drought vs. No Drought
  misc_feature: MA Experiment ID: 20001558 Result: Up-regulated in Transcription
  misc_feature: MA Experiment 20001558 PARAMETER Experiment Name: At_Drought_Soil_Dry_P Parameter: Age (day) Value: 27
  misc_feature: MA Experiment 20001558 PARAMETER Experiment Name: At_Drought_Soil_Dry_P Parameter: Organism Value: A. thaliana
  misc_feature: MA Experiment 20001558 PARAMETER Experiment Name: At_Drought_Soil_Dry_P Parameter: Plant Line Value: WS
  misc_feature: MA Experiment 20001558 PARAMETER Experiment Name: At_Drought_Soil_Dry_P Parameter: Post Timepoint (hr) Value: 6
  misc_feature: MA Experiment 20001558 PARAMETER Experiment Name: At_Drought_Soil_Dry_P Parameter: Post-Treatment Value: Re-Water vs. No Drought
  misc_feature: MA Experiment 20001558 PARAMETER Experiment Name: At_Drought_Soil_Dry_P Parameter: Timepoint (day) Value: 13
  misc_feature: MA Experiment 20001558 PARAMETER Experiment Name: At_Drought_Soil_Dry_P Parameter: Treatment Value: Drought vs. No Drought
  misc_feature: MA Experiment ID: 20001560 Result: Up-regulated in Transcription
  misc_feature: MA Experiment 20001560 PARAMETER Experiment Name: At_Drought_Soil_Dry_P Parameter: Age (day) Value: 28
  misc_feature: MA Experiment 20001560 PARAMETER Experiment Name: At_Drought_Soil_Dry_P Parameter: Organism Value: A. thaliana
  misc_feature: MA Experiment 20001560 PARAMETER Experiment Name: At_Drought_Soil_Dry_P Parameter: Plant Line Value: WS
  misc_feature: MA Experiment 20001560 PARAMETER Experiment Name: At_Drought_Soil_Dry_P Parameter: Post Timepoint (hr) Value: None
  misc_feature: MA Experiment 20001560 PARAMETER Experiment Name: At_Drought_Soil_Dry_P Parameter: Post-Treatment Value: None
  misc_feature: MA Experiment 20001560 PARAMETER Experiment Name: At_Drought_Soil_Dry_P Parameter: Timepoint (day) Value: 14
  misc_feature: MA Experiment 20001560 PARAMETER Experiment Name: At_Drought_Soil_Dry_P Parameter: Treatment Value: Drought vs. No Drought
  misc_feature: MA Experiment ID: 20001757 Result: Down-regulated in Transcription
  misc_feature: MA Experiment 20001757 PARAMETER Experiment Name: At_50mM_NH4NO3_L-to-H_P Parameter: Timepoint (hr) Value: 6
  misc_feature: MA Experiment 20001757 PARAMETER Experiment Name: At_50mM_NH4NO3_L-to-H_P Parameter: Tissue Value: Leaf
  misc_feature: MA Experiment 20001757 PARAMETER Experiment Name: At_50mM_NH4NO3_L-to-H_P Parameter: Treatment Value: 50mM NH4NO3 vs 100mM Mannitol
  misc_feature: MA Experiment ID: 20001904 Result: Up-regulated in Transcription
  misc_feature: MA Experiment 20001904 PARAMETER Experiment Name: At_Drought_Reproduction_P Parameter: Age (day) Value: 37
  misc_feature: MA Experiment 20001904 PARAMETER Experiment Name: At_Drought_Reproduction_P Parameter: Organism Value: A. thaliana
  misc_feature: MA Experiment 20001904 PARAMETER Experiment Name: At_Drought_Reproduction_P Parameter: Plant Line Value: WS
  misc_feature: MA Experiment 20001904 PARAMETER Experiment Name: At_Drought_Reproduction_P Parameter: Timepoint (day) Value: 7
  misc_feature: MA Experiment 20001904 PARAMETER Experiment Name: At_Drought_Reproduction_P Parameter: Tissue Value: Rosettes
  misc_feature: MA Experiment 20001904 PARAMETER Experiment Name: At_Drought_Reproduction_P Parameter: Treatment Value: Drought vs. No Drought
  misc_feature: MA Experiment ID: 20001905 Result: Up-regulated in Transcription
  misc_feature: MA Experiment 20001905 PARAMETER Experiment Name: At_Drought_Reproduction_P Parameter: Age (day) Value: 40
  misc_feature: MA Experiment 20001905 PARAMETER Experiment Name: At_Drought_Reproduction_P Parameter: Organism Value: A. thaliana
  misc_feature: MA Experiment 20001905 PARAMETER Experiment Name: At_Drought_Reproduction_P Parameter: Plant Line Value: WS
  misc_feature: MA Experiment 20001905 PARAMETER Experiment Name: At_Drought_Reproduction_P Parameter: Timepoint (day) Value: 10
  misc_feature: MA Experiment 20001905 PARAMETER Experiment Name: At_Drought_Reproduction_P Parameter: Tissue Value: Rosettes
  misc_feature: MA Experiment 20001905 PARAMETER Experiment Name: At_Drought_Reproduction_P Parameter: Treatment Value: Drought vs. No Drought
aagacccaactaaatatcttcttttctctccatacactttttccagatatttctaatcaacaaaactgatgaatcaagaaaagaccatttcttgttgttgtgttcttgatgcttccacttatgttggtttctggattctcaagagattgctcactagaggttactctgttcacgcagctatccgtaaaaacggggagagtgtgcttgaagagaaaatcagagacatggaagctaacgaagagagattagaggtttatgatgtggatgtgttagattaccaaagtatcctcatttctctcaacaattgtaatgctgtcttctgttgtttggataatcctgaagggtacgatgaggagaaggaagtggatttggaggtgagaggagctattaatgtggtggaagcatgtgcaagaacagagagtatagagaagattgtgttctcatcttcgttaactgctgcaatttggagagataacattggaactcagaaagatgttgatgagaagtgttggagtgatcttgacttctgtctcaaaaaaaagttgtggcatgctcttgcgaagacacagtccgagaaggcagcttgggcattagccatggatcgtatggtcaacatggtttcggttaacccgggcctcatcgttggaccatcagtggctcaacacaacccaagaccgaccatgtcttacctcaaaggagctgcacaaatgtatgagaacggtgtgttagcgtacgtagatgttgaatttgtagcggatgttcacattcgagcattcgaggatacttcggcttgtggtagatacttttgcttcaaccaaattgtgaacacggaagaagaagctctcaagcttgtacaaactctatctcctttaatacctatgccaccaaggcatgagaaagaaatgcaaggaagtgaagtttatgaagagagattgagaaacaagaaactaaacaagctggtggaagctggatttgcttgttaattacatgaagagagatgttataaattaaagggcaagaaaataacaaagaaattttatagtaagagttgtttgtttacttatttttttaattattgtactctcaattcagtattttatatatctatattttattttattttgaaatgaaaggaaaatatgtgttactc

SEQ ID NO: 104667 - protein, 304 aa, Arabidopsis thaliana
  peptide (1)..(304): Ceres Seq. ID no. 13615512
  misc_feature (1)..(304): Homolog of NCBI NO: 18400407 NR Description: cinnamoyl-CoA reductase-related [Arabidopsis >gi|20197297|gb|AAC63661.2| putative cinnamoyl CoA reductase
  misc_feature (1)..(304): Homolog of NCBI NO: 25412171 NR Description: probable cinnamoyl CoA reductase [imported] -
  misc_feature (1)..(304): Homolog of NCBI NO: 21553382 NR Description: putative cinnamoyl CoA reductase [Arabidopsis
  misc_feature (1)..(304): Homolog of NCBI NO: 15234751 NR Description: cinnamoyl-CoA reductase-related [Arabidopsis
  misc_feature (1)..(304): Homolog of NCBI NO: 21553548 NR Description: cinnamoyl-CoA reductase-like protein [Arabidopsis
  misc_feature (2)..(298): Homolog of NCBI NO: 37537132 NR Description: putative cinnamoyl-CoA reductase [Oryza sativa
  misc_feature (11)..(297): Homolog of NCBI NO: 9964087 NR Description: cinnamoyl CoA reductase [Lolium perenne]
  misc_feature (11)..(297): Homolog of NCBI NO: 25140432 NR Description: cinnamoyl CoA reductase [Hordeum vulgare]
  misc_feature (11)..(297): Homolog of NCBI NO: 3341511 NR Description: cinnamoyl-CoA reductase [Saccharum officinarum]
  misc_feature (11)..(297): Homolog of NCBI NO: 17978649 NR Description: cinnamoyl-CoA reductase [Pinus taeda]
MNQEKTISCCCVLDASTYVGFWILKRLLTRGYSVHAAIRKNGESVLEEKIRDMEANEERLEVYDVDVLDYQSILISLNNCNAVFCCLDNPEGYDEEKEVDLEVRGAINVVEACARTESIEKIVFSSSLTAAIWRDNIGTQKDVDEKCWSDLDFCLKKKLWHALAKTQSEKAAWALAMDRMVNMVSVNPGLIVGPSVAQHNPRPTMSYLKGAAQMYENGVLAYVDVEFVADVHIRAFEDTSACGRYFCFNQIVNTEEEALKLVQTLSPLIPMPPRHEKEMQGSEVYEERLRNKKLNKLVEAGFAC

SEQ ID NO: 104668 - protein, 252 aa, Arabidopsis thaliana
  peptide (1)..(252): Ceres Seq. ID no. 13615513
  misc_feature (1)..(252): Homolog of NCBI NO: 18400407 NR Description: cinnamoyl-CoA reductase-related [Arabidopsis >gi|20197297|gb|AAC63661.2| putative cinnamoyl CoA reductase
  misc_feature (1)..(252): Homolog of NCBI NO: 25412171 NR Description: probable cinnamoyl CoA reductase [imported] -
  misc_feature (1)..(252): Homolog of NCBI NO: 21553382 NR Description: putative cinnamoyl CoA reductase [Arabidopsis
  misc_feature (1)..(252): Homolog of NCBI NO: 15234751 NR Description: cinnamoyl-CoA reductase-related [Arabidopsis
  misc_feature (1)..(252): Homolog of NCBI NO: 21553548 NR Description: cinnamoyl-CoA reductase-like protein [Arabidopsis
  misc_feature (1)..(246): Homolog of NCBI NO: 37537132 NR Description: putative cinnamoyl-CoA reductase [Oryza sativa
  misc_feature (1)..(245): Homolog of NCBI NO: 9964087 NR Description: cinnamoyl CoA reductase [Lolium perenne]
  misc_feature (1)..(245): Homolog of NCBI NO: 25140432 NR Description: cinnamoyl CoA reductase [Hordeum vulgare]
  misc_feature (1)..(245): Homolog of NCBI NO: 3341511 NR Description: cinnamoyl-CoA reductase [Saccharum officinarum]
  misc_feature (1)..(245): Homolog of NCBI NO: 17978649 NR Description: cinnamoyl-CoA reductase [Pinus taeda]
MEANEERLEVYDVDVLDYQSILISLNNCNAVFCCLDNPEGYDEEKEVDLEVRGAINVVEACARTESIEKIVFSSSLTAAIWRDNIGTQKDVDEKCWSDLDFCLKKKLWHALAKTQSEKAAWALAMDRMVNMVSVNPGLIVGPSVAQHNPRPTMSYLKGAAQMYENGVLAYVDVEFVADVHIRAFEDTSACGRYFCFNQIVNTEEEALKLVQTLSPLIPMPPRHEKEMQGSEVYEERLRNKKLNKLVEAGFAC

SEQ ID NO: 104669 - DNA, 2385 bp, Arabidopsis thaliana
  misc_feature (1)..(2385): Ceres Seq. ID no. 13615522
  misc_feature: MA Experiment ID: 108433 Result: Down-regulated in Transcription
  misc_feature: MA Experiment 108433 PARAMETER Experiment Name: At_rhl_Mutant2_cDNA_P Parameter: Age (day) Value: 7
  misc_feature: MA Experiment 108433 PARAMETER Experiment Name: At_rhl_Mutant2_cDNA_P Parameter: Organism Value: A. thaliana
  misc_feature: MA Experiment 108433 PARAMETER Experiment Name: At_rhl_Mutant2_cDNA_P Parameter: Plant Line Value: rhl Mutant vs. wt landsburg
  misc_feature: MA Experiment 108433 PARAMETER Experiment Name: At_rhl_Mutant2_cDNA_P Parameter: Tissue Value: Roots
  misc_feature: MA Experiment ID: 20000234 Result: Up-regulated in Transcription
  misc_feature: MA Experiment 20000234 PARAMETER Experiment Name: At_Siliques_P Parameter: Age (day) Value: 21
  misc_feature: MA Experiment 20000234 PARAMETER Experiment Name: At_Siliques_P Parameter: Organism Value: A. thaliana
  misc_feature: MA Experiment 20000234 PARAMETER Experiment Name: At_Siliques_P Parameter: Plant Line Value: WS
  misc_feature: MA Experiment 20000234 PARAMETER Experiment Name: At_Siliques_P Parameter: Tissue Value: Less Than 5mm Siliques vs. Whole Plant
  misc_feature: MA Experiment ID: 20000235 Result: Up-regulated in Transcription
  misc_feature: MA Experiment 20000235 PARAMETER Experiment Name: At_Siliques_P Parameter: Age (day) Value: 21
  misc_feature: MA Experiment 20000235 PARAMETER Experiment Name: At_Siliques_P Parameter: Organism Value: A. thaliana
  misc_feature: MA Experiment 20000235 PARAMETER Experiment Name: At_Siliques_P Parameter: Plant Line Value: WS
  misc_feature: MA Experiment 20000235 PARAMETER Experiment Name: At_Siliques_P Parameter: Tissue Value: 5-10mm Siliques vs. Whole Plant
  misc_feature: MA Experiment ID: 20000439 Result: Up-regulated in Transcription
  misc_feature: MA Experiment 20000439 PARAMETER Experiment Name: At_Roots__P Parameter: Age (day) Value: 14 vs. 21
  misc_feature: MA Experiment 20000439 PARAMETER Experiment Name: At_Roots__P Parameter: Organism Value: A. thaliana
  misc_feature: MA Experiment 20000439 PARAMETER Experiment Name: At_Roots__P Parameter: Tissue Value: Roots vs. Whole Plant
  misc_feature: MA Experiment ID: 20000495 Result: Up-regulated in Transcription
  misc_feature: MA Experiment 20000495 PARAMETER Experiment Name: At_Guard_Cells_P Parameter: Harvest Date Value: 8/2/2002
  misc_feature: MA Experiment 20000495 PARAMETER Experiment Name: At_Guard_Cells_P Parameter: Organism Value: A. thaliana
  misc_feature: MA Experiment 20000495 PARAMETER Experiment Name: At_Guard_Cells_P Parameter: Tissue Value: Guard Cells vs. Leaves
  misc_feature: MA Experiment ID: 20000496 Result: Up-regulated in Transcription
  misc_feature: MA Experiment 20000496 PARAMETER Experiment Name: At_Guard_Cells_P Parameter: Harvest Date Value: 7/19/2002
  misc_feature: MA Experiment 20000496 PARAMETER Experiment Name: At_Guard_Cells_P Parameter: Organism Value: Canola
  misc_feature: MA Experiment 20000496 PARAMETER Experiment Name: At_Guard_Cells_P Parameter: Tissue Value: Guard Cells vs. Leaves
  misc_feature: MA Experiment ID: 20001451 Result: Down-regulated in Transcription
  misc_feature: MA Experiment 20001451 PARAMETER Experiment Name: At_Far-red-induction_P Parameter: Age (day) Value: 7
  misc_feature: MA Experiment 20001451 PARAMETER Experiment Name: At_Far-red-induction_P Parameter: Light Value: Far-red vs. White
  misc_feature: MA Experiment 20001451 PARAMETER Experiment Name: At_Far-red-induction_P Parameter: Organism Value: A. thaliana
  misc_feature: MA Experiment 20001451 PARAMETER Experiment Name: At_Far-red-induction_P Parameter: Plant Line Value: Columbia
  misc_feature: MA Experiment 20001451 PARAMETER Experiment Name: At_Far-red-induction_P Parameter: Timepoint (hr) Value: 24
  misc_feature: MA Experiment 20001451 PARAMETER Experiment Name: At_Far-red-induction_P Parameter: Tissue Value: Whole Plant
  misc_feature: MA Experiment ID: 20001757 Result: Down-regulated in Transcription
  misc_feature: MA Experiment 20001757 PARAMETER Experiment Name: At_50mM_NH4NO3_L-to-H_P Parameter: Timepoint (hr) Value: 6
  misc_feature: MA Experiment 20001757 PARAMETER Experiment Name: At_50mM_NH4NO3_L-to-H_P Parameter: Tissue Value: Leaf
  misc_feature: MA Experiment 20001757 PARAMETER Experiment Name: At_50mM_NH4NO3_L-to-H_P Parameter: Treatment Value: 50mM NH4NO3 vs 100mM Mannitol
acaacactacctacactctctcttgctttctctcctctctgttttttctagctttctctctcacaaaatcaaaactttttttctgtgttcattatcatctccttaaattcataacaatacactctcataattcttctctgcgtaggagagacattgcagaaataaaagagtttttaatagacccaagaaaaagagaaaaaaagcattcatttttttcttgctttgttgctttgcttttgcttttctgtttctcttcttttgtgggcacaacaaaacatcaacaaagtaatgattttgtgttcttccttctccttctggtaatctaatctaaagcttttcatggtggtgatgaagttaataacaatgaagatattctctgttctgttactactatgtttcttcgttacttgttctctctcttctgaacccagaaaccctgaagtggaggcgttgataaacataaagaacgagttacatgatccacatggtgttttcaaaaactgggatgagttttctgttgatccttgtagctggactatgatctcttgttcttcagacaacctcgtaattggcttaggagctccaagtcagtctctttcaggaactttatctgggtctattggaaatctcactaatcttcgacaagtgtcattacagaacaataacatctccggtaaaatcccaccggagatttgttctcttcccaaattacagactctggatttatccaataaccggttctccggtgaaatccccggttctgttaaccagctgagtaatctccaatatctgaggttgaacaacaactcattatctgggccctttcctgcttctctgtctcaaatccctcacctctctttcttagacttgtcttataacaatctcagaggtcctgttcctaaatttcctgcaaggacattcaatgttgctgggaaccctttgatttgtaaaaacagcctaccggagatttgttcaggatcaatcagtgcaagccctctttctgtctctttacgttcttcatcaggacgtagaaccaacatattagcagttgcacttggtgtaagccttggctttgctgttagtgtaatcctctctctcgggttcatttggtatcgaaagaaacaaagacggttaacgatgcttcgcattagtgacaagcaagaggaagggttacttgggttgggaaatctaagaagcttcacattcagggaacttcatgtagctacggatggttttagttccaagagtattcttggtgctggtgggtttggtaatgtctacagaggaaaattcggggatgggacagtggttgcagtgaaacgattgaaagatgtgaatggaacctccgggaactcacagtttcgtactgagcttgagatgatcagcttagctgttcataggaatttgcttcggttaatcggttattgtgcgagttctagcgaaagacttcttgtttacccttacatgtccaatggcagcgtcgcctctaggctcaaagctaagccagcgttggactggaacacaaggaagaagatagcgattggagctgcaagagggttgttttatctacacgagcaatgcgatcccaagattattcaccgagatgtcaaggcagcaaacattctcctagatgagtattttgaagcagttgttggggattttggactagcaaagctactcaaccacgaggattcacatgtcacaaccgcggttagaggaactgttggtcacattgcacctgagtatctctccaccggtcagtcatctgagaaaaccgatgtctttgggttcggtatacttttgctagagctcatcacaggaatgagagctctcgagtttggcaagtctgttagccagaaaggagctatgctagaatgggtgaggaagctacacaaggaaatgaaagtagaggagctagtagaccgagaactggggacaacctacgatagaatagaagttggagagatgctacaagtggcactgctctgcactcagtttcttccagctcacagacccaaaatgtctgaagtagttcagatgcttgaaggagatggattagctgagagatgggctgcttcacatgaccattcacatttctaccatgccaacatgtcttacaggactattacctctactgatggcaacaaccaaaccaaacatctgtttggctcctcaggatttgaagatgaagatgataatcaagcgttagattcattcgccatggaactatctggtccaaggtagtaaatcttggacacagaaagaaacagatataatatccccatgacttcaatttttgtttttgagatgatatagacatgtaaatggttatcaaacctttgaaaaaattgagattctgggtctaatggttaatattttggatgt

SEQ ID NO: 104670 - protein, 634 aa, Arabidopsis thaliana; identical to SEQ ID NO: 20999
  peptide (1)..(634): Ceres Seq. ID no. 13615523
  misc_feature (299)..(494): Pfam Name: Protein kinase domain Pfam Description: Protein kinase domain
  misc_feature (80)..(634): Homolog of NCBI NO: 15224077 NR Description: LRR receptor protein kinase -related [Arabidopsis
  misc_feature (1)..(634): Homolog of NCBI NO: 22329033 NR Description: receptor-related kinase homolog [Arabidopsis >gi|17979065|gb|AAL49800.1| putative receptor kinase homolog
  misc_feature (1)..(634): Homolog of NCBI NO: 15237242 NR Description: receptor protein kinase-related protein
  misc_feature (6)..(634): Homolog of NCBI NO: 21593619 NR Description: receptor protein kinase-like protein [Arabidopsis
  misc_feature (15)..(634): Homolog of NCBI NO: 11862956 NR Description: putative protein kinase [Oryza sativa (japonica
  misc_feature (18)..(634): Homolog of NCBI NO: 22331326 NR Description: somatic embryogenesis receptor-related kinase thaliana] >gi|19715615|gb|AAL91629.1| AT3g25560/MWL2_18 thaliana] >gi|27363232|gb|AAO11535.1| At3g25560/MWL2_18
  misc_feature (20)..(634): Homolog of NCBI NO: 9279736 NR Description: receptor-like kinase [Arabidopsis thaliana]
  misc_feature (15)..(582): Homolog of NCBI NO: 15219817 NR Description: receptor-related kinase [Arabidopsis thaliana] putative receptor kinase [Arabidopsis thaliana]
  misc_feature (155)..(634): Homolog of NCBI NO: 25407653 NR Description: receptor-like kinase homolog [imported] -
  misc_feature (32)..(577): Homolog of NCBI NO: 13897310 NR Description: SERK2 protein [Zea mays]

SEQ ID NO: 104671 - protein, 631 aa, Arabidopsis thaliana; identical to SEQ ID NO: 21000
  peptide (1)..(631): Ceres Seq. ID no. 13615524
  misc_feature (296)..(491): Pfam Name: Protein kinase domain Pfam Description: Protein kinase domain
  misc_feature (77)..(631): Homolog of NCBI NO: 15224077 NR Description: LRR receptor protein kinase -related [Arabidopsis
  misc_feature (1)..(631): Homolog of NCBI NO: 22329033 NR Description: receptor-related kinase homolog [Arabidopsis >gi|17979065|gb|AAL49800.1| putative receptor kinase homolog
  misc_feature (1)..(631): Homolog of NCBI NO: 15237242 NR Description: receptor protein kinase-related protein
  misc_feature (3)..(631): Homolog of NCBI NO: 21593619 NR Description: receptor protein kinase-like protein [Arabidopsis
  misc_feature (12)..(631): Homolog of NCBI NO: 11862956 NR Description: putative protein kinase [Oryza sativa (japonica
  misc_feature (15)..(631): Homolog of NCBI NO: 22331326 NR Description: somatic embryogenesis receptor-related kinase thaliana] >gi|19715615|gb|AAL91629.1| AT3g25560/MWL2_18 thaliana] >gi|27363232|gb|AAO11535.1| At3g25560/MWL2_18
  misc_feature (17)..(631): Homolog of NCBI NO: 9279736 NR Description: receptor-like kinase [Arabidopsis thaliana]
  misc_feature (12)..(579): Homolog of NCBI NO: 15219817 NR Description: receptor-related kinase [Arabidopsis thaliana] putative receptor kinase [Arabidopsis thaliana]
  misc_feature (152)..(631): Homolog of NCBI NO: 25407653 NR Description: receptor-like kinase homolog [imported] -
  misc_feature (29)..(574): Homolog of NCBI NO: 13897310 NR Description: SERK2 protein [Zea mays]

SEQ ID NO: 104672 - protein, 626 aa, Arabidopsis thaliana; identical to SEQ ID NO: 21001
  peptide (1)..(626): Ceres Seq. ID no. 13615525
  misc_feature (291)..(486): Pfam Name: Protein kinase domain Pfam Description: Protein kinase domain
  misc_feature (72)..(626): Homolog of NCBI NO: 15224077 NR Description: LRR receptor protein kinase -related [Arabidopsis
  misc_feature (1)..(626): Homolog of NCBI NO: 22329033 NR Description: receptor-related kinase homolog [Arabidopsis >gi|17979065|gb|AAL49800.1| putative receptor kinase homolog
  misc_feature (1)..(626): Homolog of NCBI NO: 15237242 NR Description: receptor protein kinase-related protein
  misc_feature (1)..(626): Homolog of NCBI NO: 21593619 NR Description: receptor protein kinase-like protein [Arabidopsis
  misc_feature (7)..(626): Homolog of NCBI NO: 11862956 NR Description: putative protein kinase [Oryza sativa (japonica
  misc_feature (10)..(626): Homolog of NCBI NO: 22331326 NR Description: somatic embryogenesis receptor-related kinase thaliana] >gi|19715615|gb|AAL91629.1| AT3g25560/MWL2_18 thaliana] >gi|27363232|gb|AAO11535.1| At3g25560/MWL2_18
  misc_feature (12)..(626): Homolog of NCBI NO: 9279736 NR Description: receptor-like kinase [Arabidopsis thaliana]
  misc_feature (7)..(574): Homolog of NCBI NO: 15219817 NR Description: receptor-related kinase [Arabidopsis thaliana] putative receptor kinase [Arabidopsis thaliana]
  misc_feature (147)..(626): Homolog of NCBI NO: 25407653 NR Description: receptor-like kinase homolog [imported] -
  misc_feature (24)..(569): Homolog of NCBI NO: 13897310 NR Description: SERK2 protein [Zea mays]

SEQ ID NO: 104673 - DNA, 1167 bp, Arabidopsis thaliana
  misc_feature (1)..(1167): Ceres Seq. ID no. 13615530
  misc_feature: MA Experiment ID: 108434 Result: Up-regulated in Transcription
  misc_feature: MA Experiment 108434 PARAMETER Experiment Name: At_Root_Tips_cDNA_P Parameter: Tissue Value: Root Tips
  misc_feature: MA Experiment ID: 108464 Result: Down-regulated in Transcription
  misc_feature: MA Experiment 108464 PARAMETER Experiment Name: At_Germinating_Seeds_cDNA_P Parameter: Age (day) Value: 4 vs. 0
  misc_feature: MA Experiment 108464 PARAMETER Experiment Name: At_Germinating_Seeds_cDNA_P Parameter: Tissue Value: Germinating Seeds
  misc_feature: MA Experiment ID: 108488 Result: Up-regulated in Transcription
  misc_feature: MA Experiment ID: 108561 Result: Down-regulated in Transcription
  misc_feature: MA Experiment 108561 PARAMETER Experiment Name: At_100uM_ABA_cDNA_P Parameter: Timepoint (hr) Value: 6
  misc_feature: MA Experiment 108561 PARAMETER Experiment Name: At_100uM_ABA_cDNA_P Parameter: Tissue Value: Aerial
  misc_feature: MA Experiment 108561 PARAMETER Experiment Name: At_100uM_ABA_cDNA_P Parameter: Treatment Value: 100uM ABA vs. No Treatment
  misc_feature: MA Experiment ID: 108573 Result: Down-regulated in Transcription
  misc_feature: MA Experiment 108573 PARAMETER Experiment Name: At_Drought_cDNA_P Parameter: Timepoint (hr) Value: 6
  misc_feature: MA Experiment 108573 PARAMETER Experiment Name: At_Drought_cDNA_P Parameter: Tissue Value: Aerial
  misc_feature: MA Experiment 108573 PARAMETER Experiment Name: At_Drought_cDNA_P Parameter: Treatment Value: Drought vs. No Drought
  misc_feature: MA Experiment ID: 108585 Result: Down-regulated in Transcription
  misc_feature: MA Experiment 108585 PARAMETER Experiment Name: At_5mM_NaNP_cDNA_P Parameter: Timepoint (hr) Value: 6
  misc_feature: MA Experiment 108585 PARAMETER Experiment Name: At_5mM_NaNP_cDNA_P Parameter: Tissue Value: Aerial
  misc_feature: MA Experiment 108585 PARAMETER Experiment Name: At_5mM_NaNP_cDNA_P Parameter: Treatment Value: null
  misc_feature: MA Experiment ID: 108595 Result: Down-regulated in Transcription
  misc_feature: MA Experiment 108595 PARAMETER Experiment Name: At_Ler-pi_Ovule_cDNA_P Parameter: Plant Line Value: null
  misc_feature: MA Experiment ID: 108605 Result: Down-regulated in Transcription
  misc_feature: MA Experiment 108605 PARAMETER Experiment Name: At_100uM_ABA_cDNA_P Parameter: Timepoint (hr) Value: 6
  misc_feature: MA Experiment 108605 PARAMETER Experiment Name: At_100uM_ABA_cDNA_P Parameter: Tissue Value: Aerial
  misc_feature: MA Experiment 108605 PARAMETER Experiment Name: At_100uM_ABA_cDNA_P Parameter: Treatment Value: 100uM ABA vs. No Treatment
  misc_feature: MA Experiment ID: 108668 Result: Down-regulated in Transcription
  misc_feature: MA Experiment 108668 PARAMETER Experiment Name: At_2mM_SA_cDNA_P Parameter: Plant Line Value: WS
  misc_feature: MA Experiment 108668 PARAMETER Experiment Name: At_2mM_SA_cDNA_P Parameter: Timepoint (hr) Value: 6
  misc_feature: MA Experiment 108668 PARAMETER Experiment Name: At_2mM_SA_cDNA_P Parameter: Treatment Value: 2mM SA vs. No Treatment
  misc_feature: MA Experiment ID: 20000070 Result: Down-regulated in Transcription
  misc_feature: MA Experiment 20000070 PARAMETER Experiment Name: At_100uM_ABA_Mutants_cDNA_P Parameter: Plant Line Value: CS24
  misc_feature: MA Experiment 20000070 PARAMETER Experiment Name: At_100uM_ABA_Mutants_cDNA_P Parameter: Timepoint (hr) Value: 6
  misc_feature: MA Experiment 20000070 PARAMETER Experiment Name: At_100uM_ABA_Mutants_cDNA_P Parameter: Tissue Value: Aerial
  misc_feature: MA Experiment 20000070 PARAMETER Experiment Name: At_100uM_ABA_Mutants_cDNA_P Parameter: Treatment Value: 100uM ABA vs. No Treatment
  misc_feature: MA Experiment ID: 20000071 Result: Down-regulated in Transcription
  misc_feature: MA Experiment 20000071 PARAMETER Experiment Name: At_100uM_ABA_Mutants_cDNA_P Parameter: Plant Line Value: CS8104
  misc_feature: MA Experiment 20000071 PARAMETER Experiment Name: At_100uM_ABA_Mutants_cDNA_P Parameter: Timepoint (hr) Value: 6
  misc_feature: MA Experiment 20000071 PARAMETER Experiment Name: At_100uM_ABA_Mutants_cDNA_P Parameter: Tissue Value: Aerial
  misc_feature: MA Experiment 20000071 PARAMETER Experiment Name: At_100uM_ABA_Mutants_cDNA_P Parameter: Treatment Value: 100uM ABA vs. No Treatment
  misc_feature: MA Experiment ID: 20000117 Result: Down-regulated in Transcription
  misc_feature: MA Experiment 20000117 PARAMETER Experiment Name: At_100uM_ABA_Mutants_cDNA_P Parameter: Plant Line Value: Columbia
  misc_feature: MA Experiment 20000117 PARAMETER Experiment Name: At_100uM_ABA_Mutants_cDNA_P Parameter: Timepoint (hr) Value: 6
  misc_feature: MA Experiment 20000117 PARAMETER Experiment Name: At_100uM_ABA_Mutants_cDNA_P Parameter: Tissue Value: Aerial
  misc_feature: MA Experiment 20000117 PARAMETER Experiment Name: At_100uM_ABA_Mutants_cDNA_P Parameter: Treatment Value: 100uM ABA vs. No Treatment
  misc_feature: MA Experiment ID: 20000182 Result: Down-regulated in Transcription
  misc_feature: MA Experiment 20000182 PARAMETER Experiment Name: At_2mM_SA_P Parameter: Age (day) Value: 14
  misc_feature: MA Experiment 20000182 PARAMETER Experiment Name: At_2mM_SA_P Parameter: Organism Value: A. thaliana
  misc_feature: MA Experiment 20000182 PARAMETER Experiment Name: At_2mM_SA_P Parameter: Plant Line Value: WS
  misc_feature: MA Experiment 20000182 PARAMETER Experiment Name: At_2mM_SA_P Parameter: Timepoint (hr) Value: 6
  misc_feature: MA Experiment 20000182 PARAMETER Experiment Name: At_2mM_SA_P Parameter: Tissue Value: Aerial
  misc_feature: MA Experiment 20000182 PARAMETER Experiment Name: At_2mM_SA_P Parameter: Treatment Value: 2mM SA vs. No Treatment
  misc_feature: MA Experiment ID: 20000185 Result: Down-regulated in Transcription
  misc_feature: MA Experiment 20000185 PARAMETER Experiment Name: At_Roots__P Parameter: Age (day) Value: 7 vs. 21
  misc_feature: MA Experiment 20000185 PARAMETER Experiment Name: At_Roots__P Parameter: Organism Value: A. thaliana
  misc_feature: MA Experiment 20000185 PARAMETER Experiment Name: At_Roots__P Parameter: Tissue Value: Roots vs. Whole Plant
  misc_feature: MA Experiment ID: 20000224 Result: Up-regulated in Transcription
  misc_feature: MA Experiment ID: 20000436 Result: Down-regulated in Transcription
  misc_feature: MA Experiment 20000436 PARAMETER Experiment Name: At_Drought_P Parameter: Age (day) Value: 7
  misc_feature: MA Experiment 20000436 PARAMETER Experiment Name: At_Drought_P Parameter: Organism Value: A. thaliana
  misc_feature: MA Experiment 20000436 PARAMETER Experiment Name: At_Drought_P Parameter: Plant Line Value: WS
  misc_feature: MA Experiment 20000436 PARAMETER Experiment Name: At_Drought_P Parameter: Timepoint (hr) Value: 12
  misc_feature: MA Experiment 20000436 PARAMETER Experiment Name: At_Drought_P Parameter: Tissue Value: Whole Plant
  misc_feature: MA Experiment 20000436 PARAMETER Experiment Name: At_Drought_P Parameter: Treatment Value: Drought vs. No Drought
  misc_feature: MA Experiment ID: 20000437 Result: Down-regulated in Transcription
  misc_feature: MA Experiment 20000437 PARAMETER Experiment Name: At_Drought_P Parameter: Age (day) Value: 8
  misc_feature: MA Experiment 20000437 PARAMETER Experiment Name: At_Drought_P Parameter: Organism Value: A. thaliana
  misc_feature: MA Experiment 20000437 PARAMETER Experiment Name: At_Drought_P Parameter: Plant Line Value: WS
  misc_feature: MA Experiment 20000437 PARAMETER Experiment Name: At_Drought_P Parameter: Timepoint (hr) Value: 24
  misc_feature: MA Experiment 20000437 PARAMETER Experiment Name: At_Drought_P Parameter: Tissue Value: Whole Plant
  misc_feature: MA Experiment 20000437 PARAMETER Experiment Name: At_Drought_P Parameter: Treatment Value: Drought vs. No Drought
  misc_feature: MA Experiment ID: 20000439 Result: Down-regulated in Transcription
  misc_feature: MA Experiment 20000439 PARAMETER Experiment Name: At_Roots__P Parameter: Age (day) Value: 14 vs. 21
  misc_feature: MA Experiment 20000439 PARAMETER Experiment Name: At_Roots__P Parameter: Organism Value: A. thaliana
  misc_feature: MA Experiment 20000439 PARAMETER Experiment Name: At_Roots__P Parameter: Tissue Value: Roots vs. Whole Plant
  misc_feature: MA Experiment ID: 20000794 Result: Down-regulated in Transcription
  misc_feature: MA Experiment 20000794 PARAMETER Experiment Name: At_Petals_P Parameter: Age (day) Value: 23-25 days
  misc_feature: MA Experiment 20000794 PARAMETER Experiment Name: At_Petals_P Parameter: Plant Line Value: WS
  misc_feature: MA Experiment 20000794 PARAMETER Experiment Name: At_Petals_P Parameter: Tissue Value: Petals vs. Whole plant
  misc_feature: MA Experiment ID: 20001450 Result: Down-regulated in Transcription
  misc_feature: MA Experiment 20001450 PARAMETER Experiment Name: At_Far-red-induction_P Parameter: Age (day) Value: 7
  misc_feature: MA Experiment 20001450 PARAMETER Experiment Name: At_Far-red-induction_P Parameter: Light Value: Far-red vs. White
  misc_feature: MA Experiment 20001450 PARAMETER Experiment Name: At_Far-red-induction_P Parameter: Organism Value: A. thaliana
  misc_feature: MA Experiment 20001450 PARAMETER Experiment Name: At_Far-red-induction_P Parameter: Plant Line Value: Columbia
  misc_feature: MA Experiment 20001450 PARAMETER Experiment Name: At_Far-red-induction_P Parameter: Timepoint (hr) Value: 8
  misc_feature: MA Experiment 20001450 PARAMETER Experiment Name: At_Far-red-induction_P Parameter: Tissue Value: Whole Plant
  misc_feature: MA Experiment ID: 20001757 Result: Up-regulated in Transcription
  misc_feature: MA Experiment 20001757 PARAMETER Experiment Name: At_50mM_NH4NO3_L-to-H_P Parameter: Timepoint (hr) Value: 6
  misc_feature: MA Experiment 20001757 PARAMETER Experiment Name: At_50mM_NH4NO3_L-to-H_P Parameter: Tissue Value: Leaf
  misc_feature: MA Experiment 20001757 PARAMETER Experiment Name: At_50mM_NH4NO3_L-to-H_P Parameter: Treatment Value: 50mM NH4NO3 vs 100mM Mannitol
  misc_feature: MA Experiment ID: 20001905 Result: Down-regulated in Transcription
  misc_feature: MA Experiment 20001905 PARAMETER Experiment Name: At_Drought_Reproduction_P Parameter: Age (day) Value: 40
  misc_feature: MA Experiment 20001905 PARAMETER Experiment Name: At_Drought_Reproduction_P Parameter: Organism Value: A. thaliana
  misc_feature: MA Experiment 20001905 PARAMETER Experiment Name: At_Drought_Reproduction_P Parameter: Plant Line Value: WS
  misc_feature: MA Experiment 20001905 PARAMETER Experiment Name: At_Drought_Reproduction_P Parameter: Timepoint (day) Value: 10
  misc_feature: MA Experiment 20001905 PARAMETER Experiment Name: At_Drought_Reproduction_P Parameter: Tissue Value: Rosettes
  misc_feature: MA Experiment 20001905 PARAMETER Experiment Name: At_Drought_Reproduction_P Parameter: Treatment Value: Drought vs. No Drought
ttattcttctggataagagcttcgtgatggtttgaaacctctgagtgaagaagaagcgccatggctgggattaccagcagcaccgttggattcaacgccgtcttcaccggaataaccaaaacagtatcatcacattcactcttctctgttgattccaaactctgtagtcttcgtctctccaaaaccgaactgtctttcactaatctcactccttctcctcgccgtgctttcgccgtcacttgccgcttcggcggtggtggtggaggttatcgattctctggagacaatagaagaggtaggccgaaagaagctgaaattgatgaagctcttgatatctcctcaattaggtcagctactgttaggcttatcgatgggcaacaaaacatgcttggtttagtgtctaaagacgaagccgttcgaatggctgatgatgctgaacttgatctggttatactatcgcctgatgcagatcctccggttgttaaaatgatggactacagtaaatacagatacgaacagcaaaagaggaaaaaagatcagcaaaagaaaacaactcgcatggatttaaaggagcttaaaatgggttataatattgatcagcatgattattccgttcgtctaagggctgcccaaaagttcttgcaagatggtgacaaggttaaggtgattgtgagcatgaaaggacgagaaaacgagttcagaaatatcgctattgaactcctcagacgtttccaaaccgaaataggggagcttgcaactgaagagagcaaaaacttcagggacagaaatatgttcattatcttggtcccaaacaaagaaatgattcggaaaccacaagaaccacccacaagaaagaagaaaaaaacagcggaaaacgaagcttcagcttcagctgcagaaataacagctgagcctgagcctgagcctgagcctgagcctgaacctgagcctgagcctgagcctgagcctgagccagagcctctacagatcgattcttgagtttaaaatcttgtggtaggattttcagagctaaagtaaagttttgtatatttacttttctaccatgtctcaagagagccaagagctgtataacaaatagagttagtcctatttgaatgatgttcttcgtttgtagatcttttctctaatctatttttttgtttaact

SEQ ID NO: 104674 - protein, 312 aa, Arabidopsis thaliana; identical to SEQ ID NO: 37566
  peptide (1)..(312): Ceres Seq. ID no. 13615531
  misc_feature (166)..(252): Pfam Name: Translation initiation factor IF-3, C-terminal domain Pfam Description: Translation initiation factor IF-3, C-terminal
  misc_feature (1)..(312): Homolog of NCBI NO: 15224088 NR Description: chloroplast initiation factor 3 -related thaliana] >gi|25412188|pir||B84632 probable chloroplast
  misc_feature (1)..(283): Homolog of NCBI NO: 18417644 NR Description: expressed protein [Arabidopsis thaliana] putative protein [Arabidopsis thaliana]
  misc_feature (1)..(164): Homolog of NCBI NO: 25407671 NR Description: hypothetical protein AT4g30690 [imported] - thaliana >gi|5725433|emb|CAB52442.1| putative protein thaliana] >gi|7269970|emb|CAB79787.1| putative protein
  misc_feature (82)..(269): Homolog of NCBI NO: 33241247 NR Description: Translation initiation factor 3 [Prochlorococcus subsp. marinus str. CCMP1375] >gi|33238777|gb|AAQ00842.1| initiation factor 3 [Prochlorococcus marinus subsp. marinus str.
  misc_feature (82)..(284): Homolog of NCBI NO: 33864629 NR Description: translation initiation factor IF-3 [Synechococcus
  misc_feature (95)..(252): Homolog of NCBI NO: 17232115 NR Description: translation initiation factor IF-3 [Nostoc sp.
  misc_feature (95)..(252): Homolog of NCBI NO: 20138475 NR Description: Translation initiation factor IF-3
  misc_feature (75)..(306): Homolog of NCBI NO: 547710 NR Description: TRANSLATION INITIATION FACTOR IF-3, CHLOROPLAST
  misc_feature (95)..(253): Homolog of NCBI NO: 20808119 NR Description: Translation initiation factor IF3 tengcongensis] >gi|22095768|sp|Q8R9C2|IF3_THETN Translation
  misc_feature (95)..(252): Homolog of NCBI NO: 23128110 NR Description: hypothetical protein [Nostoc punctiforme]

SEQ ID NO: 104675 - protein, 204 aa, Arabidopsis thaliana; identical to SEQ ID NO: 37567
  peptide (1)..(204): Ceres Seq. ID no. 13615532
  misc_feature (58)..(144): Pfam Name: Translation initiation factor IF-3, C-terminal domain Pfam Description: Translation initiation factor IF-3, C-terminal
  misc_feature (1)..(204): Homolog of NCBI NO: 15224088 NR Description: chloroplast initiation factor 3 -related thaliana] >gi|25412188|pir||B84632 probable chloroplast
  misc_feature (1)..(175): Homolog of NCBI NO: 18417644 NR Description: expressed protein [Arabidopsis thaliana] putative protein [Arabidopsis thaliana]
  misc_feature (1)..(56): Homolog of NCBI NO: 25407671 NR Description: hypothetical protein AT4g30690 [imported] - thaliana >gi|5725433|emb|CAB52442.1| putative protein thaliana] >gi|7269970|emb|CAB79787.1| putative protein
  misc_feature (1)..(161): Homolog of NCBI NO: 33241247 NR Description: Translation initiation factor 3 [Prochlorococcus subsp. marinus str. CCMP1375] >gi|33238777|gb|AAQ00842.1| initiation factor 3 [Prochlorococcus marinus subsp. marinus str.
  misc_feature (1)..(176): Homolog of NCBI NO: 33864629 NR Description: translation initiation factor IF-3 [Synechococcus
  misc_feature (1)..(144): Homolog of NCBI NO: 17232115 NR Description: translation initiation factor IF-3 [Nostoc sp.
  misc_feature (1)..(144): Homolog of NCBI NO: 20138475 NR Description: Translation initiation factor IF-3
  misc_feature (1)..(198): Homolog of NCBI NO: 547710 NR Description: TRANSLATION INITIATION FACTOR IF-3, CHLOROPLAST
  misc_feature (1)..(145): Homolog of NCBI NO: 20808119 NR Description: Translation initiation factor IF3 tengcongensis] >gi|22095768|sp|Q8R9C2|IF3_THETN Translation
  misc_feature (1)..(144): Homolog of NCBI NO: 23128110 NR Description: hypothetical protein [Nostoc punctiforme]

SEQ ID NO: 104676 - protein, 192 aa, Arabidopsis thaliana; identical to SEQ ID NO: 37568
  peptide (1)..(192): Ceres Seq. ID no. 13615533
  misc_feature (46)..(132): Pfam Name: Translation initiation factor IF-3, C-terminal domain Pfam Description: Translation initiation factor IF-3, C-terminal
  misc_feature (1)..(192): Homolog of NCBI NO: 15224088 NR Description: chloroplast initiation factor 3 -related thaliana] >gi|25412188|pir||B84632 probable chloroplast
  misc_feature (1)..(163): Homolog of NCBI NO: 18417644 NR Description: expressed protein [Arabidopsis thaliana] putative protein [Arabidopsis thaliana]
  misc_feature (1)..(44): Homolog of NCBI NO: 25407671 NR Description: hypothetical protein AT4g30690 [imported] - thaliana >gi|5725433|emb|CAB52442.1| putative protein thaliana] >gi|7269970|emb|CAB79787.1| putative protein
  misc_feature (1)..(149): Homolog of NCBI NO: 33241247 NR Description: Translation initiation factor 3 [Prochlorococcus subsp. marinus str. CCMP1375] >gi|33238777|gb|AAQ00842.1| initiation factor 3 [Prochlorococcus marinus subsp. marinus str.
  misc_feature (1)..(164): Homolog of NCBI NO: 33864629 NR Description: translation initiation factor IF-3 [Synechococcus
  misc_feature (1)..(132): Homolog of NCBI NO: 17232115 NR Description: translation initiation factor IF-3 [Nostoc sp.
  misc_feature (1)..(132): Homolog of NCBI NO: 20138475 NR Description: Translation initiation factor IF-3
  misc_feature (1)..(186): Homolog of NCBI NO: 547710 NR Description: TRANSLATION INITIATION FACTOR IF-3, CHLOROPLAST
  misc_feature (1)..(133): Homolog of NCBI NO: 20808119 NR Description: Translation initiation factor IF3 tengcongensis] >gi|22095768|sp|Q8R9C2|IF3_THETN Translation
  misc_feature (1)..(132): Homolog of NCBI NO: 23128110 NR Description: hypothetical protein [Nostoc punctiforme]

SEQ ID NO: 104677 - DNA, 1040 bp, Arabidopsis thaliana
  misc_feature (1)..(1040): Ceres Seq. ID no. 13615538
  misc_feature: MA Experiment ID: 108434 Result: Down-regulated in Transcription
  misc_feature: MA Experiment 108434 PARAMETER Experiment Name: At_Root_Tips_cDNA_P Parameter: Tissue Value: Root Tips
  misc_feature: MA Experiment ID: 108462 Result: Up-regulated in Transcription
  misc_feature: MA Experiment 108462 PARAMETER Experiment Name: At_Germinating_Seeds_cDNA_P Parameter: Age (day) Value: 2 vs. 0
  misc_feature: MA Experiment 108462 PARAMETER Experiment Name: At_Germinating_Seeds_cDNA_P Parameter: Tissue Value: Germinating Seeds
  misc_feature: MA Experiment ID: 108464 Result: Up-regulated in Transcription
  misc_feature: MA Experiment 108464 PARAMETER Experiment Name: At_Germinating_Seeds_cDNA_P Parameter: Age (day) Value: 4 vs. 0
  misc_feature: MA Experiment 108464 PARAMETER Experiment Name: At_Germinating_Seeds_cDNA_P Parameter: Tissue Value: Germinating Seeds
  misc_feature: MA Experiment ID: 108501 Result: Up-regulated in Transcription
  misc_feature: MA Experiment 108501 PARAMETER Experiment Name: At_ap2_floral_buds_cDNA_P Parameter: Plant Line Value: ap2 (Ler.)
  misc_feature: MA Experiment 108501 PARAMETER Experiment Name: At_ap2_floral_buds_cDNA_P Parameter: Tissue Value: Closed Flower
  misc_feature: MA Experiment ID: 20000306 Result: Up-regulated in Transcription
  misc_feature: MA Experiment 20000306 PARAMETER Experiment Name: At_Germinating_Seeds_Sub_P Parameter: Age (hr) Value: 6 vs. 0
  misc_feature: MA Experiment 20000306 PARAMETER Experiment Name: At_Germinating_Seeds_Sub_P Parameter: Organism Value: A. thaliana
  misc_feature: MA Experiment 20000306 PARAMETER Experiment Name: At_Germinating_Seeds_Sub_P Parameter: Plant Line Value: WS
  misc_feature: MA Experiment 20000306 PARAMETER Experiment Name: At_Germinating_Seeds_Sub_P Parameter: Tissue Value: Germinating Seeds
  misc_feature: MA Experiment ID: 20000307 Result: Up-regulated in Transcription
  misc_feature: MA Experiment 20000307 PARAMETER Experiment Name: At_Germinating_Seeds_Sub_P Parameter: Age (hr) Value: 24 vs. 0
  misc_feature: MA Experiment 20000307 PARAMETER Experiment Name: At_Germinating_Seeds_Sub_P Parameter: Organism Value: A. thaliana
  misc_feature: MA Experiment 20000307 PARAMETER Experiment Name: At_Germinating_Seeds_Sub_P Parameter: Plant Line Value: WS
  misc_feature: MA Experiment 20000307 PARAMETER Experiment Name: At_Germinating_Seeds_Sub_P Parameter: Tissue Value: Germinating Seeds
  misc_feature: MA Experiment ID: 20000314 Result: Up-regulated in Transcription
  misc_feature: MA Experiment 20000314 PARAMETER Experiment Name: At_14day_Shoots-Roots_Sub_P Parameter: Age (day) Value: 14
  misc_feature: MA Experiment 20000314 PARAMETER Experiment Name: At_14day_Shoots-Roots_Sub_P Parameter: Organism Value: A. thaliana
  misc_feature: MA Experiment 20000314 PARAMETER Experiment Name: At_14day_Shoots-Roots_Sub_P Parameter: Plant Line Value: WS
  misc_feature: MA Experiment 20000314 PARAMETER Experiment Name: At_14day_Shoots-Roots_Sub_P Parameter: Tissue Value: Roots vs. Whole Plant
  misc_feature: MA Experiment ID: 20000355 Result: Up-regulated in Transcription
  misc_feature: MA Experiment 20000355 PARAMETER Experiment Name: At_Siliques_Sub_P Parameter: Age (day) Value: 21
  misc_feature: MA Experiment 20000355 PARAMETER Experiment Name: At_Siliques_Sub_P Parameter: Organism Value: A. thaliana
  misc_feature: MA Experiment 20000355 PARAMETER Experiment Name: At_Siliques_Sub_P Parameter: Plant Line Value: WS
  misc_feature: MA Experiment 20000355 PARAMETER Experiment Name: At_Siliques_Sub_P Parameter: Tissue Value: Less Than 5mm Siliques vs. Whole Plant
attcttgtctgaactaaaacctagaaaaaaatggctgaggaatcaccaagttctggcctttgtagatatgctatagttactggagggaatagaggaattggatttgagatatgcagacaattagcaaacaaagggattagggttattttgacatctagagatgagaaacaagggcttgaagctgttgagacattgaagaaagagcttgagatttctgatcaaagcattgtctttcatcagcttgatgtctctgatcctgttagtgtcacttctcttgctgagtttgtgaaaacccatttcggaaaactcgatatcttgatcaataatgctggggttggtggtgtaatcactgatgttgatgctttaagagctgggacagggaaagaaggtttcaagtgggaggaaactatcactgagacttatgagctagctgaggaatgcataaagattaactattatggaccaaagagaatgtgtgaggcgtttattccacttttgcagttatctgattctccaagaatcattaacgtatcatccttcatgggtcaagtaaagaatttagtaaacgaatgggcaaaagggatcctgagtgacgcagagaatctaacggaggtaagaattgaccaagtgatcaaccaacttctcaatgatctgaaagaagatacggctaagacaaaatattgggctaaagtcatgtcggcttacgttgtttcgaaagccggtttgaatgcttacacgaggatcttagcgaagaaacatcccgagattcgcgttaactcggtttgtcctggatttgttaagactgatatgaattttaaaactggaattttatctgtggaagaaggagcatcaagtcctgtgaggttagctttgcttccacatcaagaatctccttctggttgcttctttgatcgcaaacaagtttcagagttctgaaatctttgtgtggagatagataagccaaagttttattcatgtaatgagaattattgtttgaaagctaaacagaaagtatcgactattcaataaacagaaacatt

SEQ ID NO: 104678 - protein, 301 aa, Arabidopsis thaliana
  peptide (1)..(301): Ceres Seq. ID no. 13615539
  misc_feature (1)..(301): Homolog of NCBI NO: 15224100 NR Description: short-chain dehydrogenase/reductase family [Arabidopsis thaliana] >gi|25412197|pir||F84633 probable carbonyl
  misc_feature (1)..(301): Homolog of NCBI NO: 15233062 NR Description: short-chain dehydrogenase/reductase family [Arabidopsis thaliana] >gi|11358115|pir||T47914 hypothetical
  misc_feature (12)..(301): Homolog of NCBI NO: 18378884 NR Description: short-chain dehydrogenase/reductase family [Arabidopsis thaliana] >gi|13878161|gb|AAK44158.1|AF370343_1 carbonyl reductase [Arabidopsis thaliana]
  misc_feature (12)..(301): Homolog of NCBI NO: 25518668 NR Description: hypothetical protein T1N6.22 - Arabidopsis
  misc_feature (94)..(295): Homolog of NCBI NO: 34559416 NR Description: (-)-isopiperitenone reductase [Mentha x piperita]
  misc_feature (12)..(105): Homolog of NCBI NO: 34559416 NR Description: (-)-isopiperitenone reductase [Mentha x piperita]
  misc_feature (12)..(300): Homolog of NCBI NO: 33146492 NR Description: carbonyl reductase -like protein [Oryza sativa
  misc_feature (12)..(301): Homolog of NCBI NO: 38346767 NR Description: OSJNBa0081C01.18 [Oryza sativa (japonica
  misc_feature (12)..(299): Homolog of NCBI NO: 38346769 NR Description: OSJNBa0081C01.20 [Oryza sativa (japonica
  misc_feature (1)..(301): Homolog of NCBI NO: 38346772 NR Description: OSJNBa0081C01.23 [Oryza sativa (japonica
MAEESPSSGLCRYAIVTGGNRGIGFEICRQLANKGIRVILTSRDEKQGLEAVETLKKELEISDQSIVFHQLDVSDPVSVTSLAEFVKTHFGKLDILINNAGVGGVITDVDALRAGTGKEGFKWEETITETYELAEECIKINYYGPKRMCEAFIPLLQLSDSPRIINVSSFMGQVKNLVNEWAKGILSDAENLTEVRIDQVINQLLNDLKEDTAKTKYWAKVMSAYVVSKAGLNAYTRILAKKHPEIRVNSVCPGFVKTDMNFKTGILSVEEGASSPVRLALLPHQESPSGCFFDRKQVSEF

SEQ ID NO: 104679 - protein, 154 aa, Arabidopsis thaliana; identical to SEQ ID NO: 41728
  peptide (1)..(154): Ceres Seq. ID no. 13615540
  misc_feature (1)..(154): Homolog of NCBI NO: 15224100 NR Description: short-chain dehydrogenase/reductase family [Arabidopsis thaliana] >gi|25412197|pir||F84633 probable carbonyl
  misc_feature (1)..(154): Homolog of NCBI NO: 15233062 NR Description: short-chain dehydrogenase/reductase family [Arabidopsis thaliana] >gi|11358115|pir||T47914 hypothetical
  misc_feature (1)..(154): Homolog of NCBI NO: 18378884 NR Description: short-chain dehydrogenase/reductase family [Arabidopsis thaliana] >gi|13878161|gb|AAK44158.1|AF370343_1 carbonyl reductase [Arabidopsis thaliana]
  misc_feature (1)..(154): Homolog of NCBI NO: 25518668 NR Description: hypothetical protein T1N6.22 - Arabidopsis
  misc_feature (1)..(148): Homolog of NCBI NO: 34559416 NR Description: (-)-isopiperitenone reductase [Mentha x piperita]
  misc_feature (1)..(153): Homolog of NCBI NO: 33146492 NR Description: carbonyl reductase -like protein [Oryza sativa
  misc_feature (1)..(154): Homolog of NCBI NO: 38346767 NR Description: OSJNBa0081C01.18 [Oryza sativa (japonica
  misc_feature (1)..(152): Homolog of NCBI NO: 38346769 NR Description: OSJNBa0081C01.20 [Oryza sativa (japonica
  misc_feature (1)..(154): Homolog of NCBI NO: 38346772 NR Description: OSJNBa0081C01.23 [Oryza sativa (japonica
  misc_feature (1)..(154): Homolog of NCBI NO: 38346774 NR Description: OSJNBa0081C01.25 [Oryza sativa (japonica

SEQ ID NO: 104680 - DNA, 1040 bp, Arabidopsis thaliana
  misc_feature (1)..(1040): Ceres Seq. ID no. 13615553
  misc_feature: MA Experiment ID: 108435 Result: Down-regulated in Transcription
  misc_feature: MA Experiment 108435 PARAMETER Experiment Name: At_stm_Mutants_cDNA_P Parameter: Plant Line Value: wt Landsburg vs stm
  misc_feature: MA Experiment 108435 PARAMETER Experiment Name: At_stm_Mutants_cDNA_P Parameter: Tissue Value: Shoot Apical Meristem Region
  misc_feature: MA Experiment ID: 108462 Result: Up-regulated in Transcription
  misc_feature: MA Experiment 108462 PARAMETER Experiment Name: At_Germinating_Seeds_cDNA_P Parameter: Age (day) Value: 2 vs. 0
  misc_feature: MA Experiment 108462 PARAMETER Experiment Name: At_Germinating_Seeds_cDNA_P Parameter: Tissue Value: Germinating Seeds
  misc_feature: MA Experiment ID: 108463 Result: Up-regulated in Transcription
  misc_feature: MA Experiment 108463 PARAMETER Experiment Name: At_Germinating_Seeds_cDNA_P Parameter: Age (day) Value: 3 vs. 0
  misc_feature: MA Experiment 108463 PARAMETER Experiment Name: At_Germinating_Seeds_cDNA_P Parameter: Tissue Value: Germinating Seeds
  misc_feature: MA Experiment ID: 108464 Result: Up-regulated in Transcription
  misc_feature: MA Experiment 108464 PARAMETER Experiment Name: At_Germinating_Seeds_cDNA_P Parameter: Age (day) Value: 4 vs. 0
  misc_feature: MA Experiment 108464 PARAMETER Experiment Name: At_Germinating_Seeds_cDNA_P Parameter: Tissue Value: Germinating Seeds
  misc_feature: MA Experiment ID: 108488 Result: Up-regulated in Transcription
  misc_feature: MA Experiment ID: 20000113 Result: Down-regulated in Transcription
  misc_feature: MA Experiment 20000113 PARAMETER Experiment Name: At_42deg_Heat_cDNA_P Parameter: Temperature (deg C) Value: 42 vs. 22
  misc_feature: MA Experiment 20000113 PARAMETER Experiment Name: At_42deg_Heat_cDNA_P Parameter: Timepoint (hr) Value: 8
  misc_feature: MA Experiment 20000113 PARAMETER Experiment Name: At_42deg_Heat_cDNA_P Parameter: Tissue Value: Aerial
tttcgctctctcattcatcaaaaaaaacttgcacatcttctcagatcttcaagtttctcctctggtttctcatcatgaccgttgatattatgcgtttacctaagatggaagatcaaacggctatacaagaagctgcatcacaaggcttaaaaagcatggaacacttgattcgtgtcctctctaaccgtcccgaagaacgtaacgttgattgctctgagatcactgatttcacagtttctaagttcaagaaagttatctctcttcttaaccgttccggtcacgcccggtttagacgtggtccggttcattcccctccttcctcctccgttcctccaccggtgaaagtgacaactccggctcccactcagatctctgctccagcaccggttagcttcgttcaggcaaatcaacaaagcgtgacgttagatttcactagaccgagcgtttttggcgctaaaaccaagagctcggaggttgttgagtttgctaaagagagctttagcgtatcttctaactcttctttcatgtcttctgcgatcaccggtgatggaagtgtctctaaaggctcttcgatctttcttgctccggctccagcggtgccagtgacttcctccgggaaaccgccgctttctggtcttccttacaggaagagatgctttgaacatgaccactctgaaggcttttccggcaagatctctggctccggcaacggcaagtgccattgcaagaaaagccgaaaaaatcggatgaagagaaccgtgagagtaccggcggtaagtgcaaagatcgccgatataccaccagacgaatattcatggagaaagtatggacaaaaaccgatcaaaggctcaccacatccacggggttattacaagtgtagtacatttagaggatgtccagcgaggaaacacgtggaaagagctttggatgattcaacgatgttgattgtgacgtacgaaggagagcaccgtcatcaccagtccacgatgcaggagcatgtaactcctagcgtgagtggtttggtgtttggttcggcttga

SEQ ID NO: 104681 - protein, 345 aa, Arabidopsis thaliana
  peptide (1)..(345): Ceres Seq. ID no. 13615554
  misc_feature (266)..(326): Pfam Name: WRKY DNA -binding domain Pfam Description: WRKY DNA -binding domain
  misc_feature (25)..(345): Homolog of NCBI NO: 18400580 NR Description: WRKY family transcription factor [Arabidopsis >gi|29839677|sp|Q9SJA8|WR17_ARATH Probable WRKY transcription
  misc_feature (25)..(336): Homolog of NCBI NO: 25348152 NR Description: probable WRKY-type DNA binding protein [imported]
  misc_feature (25)..(345): Homolog of NCBI NO: 30689072 NR Description: WRKY family transcription factor [Arabidopsis
  misc_feature (25)..(345): Homolog of NCBI NO: 16604573 NR Description: putative putaive DNA-binding protein [Arabidopsis
  misc_feature (25)..(345): Homolog of NCBI NO: 21537078 NR Description: putaive DNA-binding protein [Arabidopsis thaliana]
  misc_feature (25)..(345): Homolog of NCBI NO: 22329054 NR Description: WRKY family transcription factor [Arabidopsis >gi|29839685|sp|Q9SV15|WR11_ARATH Probable WRKY transcription
  misc_feature (25)..(344): Homolog of NCBI NO: 4760596 NR Description: DNA-binding protein NtWRKY3 [Nicotiana tabacum]
  misc_feature (34)..(332): Homolog of NCBI NO: 38568048 NR Description: OSJNBa0065J03.18 [Oryza sativa (japonica
  misc_feature (112)..(324): Homolog of NCBI NO: 4894963 NR Description: DNA-binding protein WRKY3 [Avena sativa]
  misc_feature (24)..(60): Homolog of NCBI NO: 4894963 NR Description: DNA-binding protein WRKY3 [Avena sativa]
SLSHSSKKTCTSSQIFKFLLWFLIMTVDIMRLPKMEDQTAIQEAASQGLKSMEHLIRVLSNRPEERNVDCSEITDFTVSKFKKVISLLNRSGHARFRRGPVHSPPSSSVPPPVKVTTPAPTQISAPAPVSFVQANQQSVTLDFTRPSVFGAKTKSSEVVEFAKESFSVSSNSSFMSSAITGDGSVSKGSSIFLAPAPAVPVTSSGKPPLSGLPYRKRCFEHDHSEGFSGKISGSGNGKCHCKKSRKNRMKRTVRVPAVSAKIADIPPDEYSWRKYGQKPIKGSPHPRGYYKCSTFRGCPARKHVERALDDSTMLIVTYEGEHRHHQSTMQEHVTPSVSGLVFGSA

SEQ ID NO: 104682 - protein, 321 aa, Arabidopsis thaliana; identical to SEQ ID NO: 40359
  peptide (1)..(321): Ceres Seq. ID no. 13615555
  misc_feature (242)..(302): Pfam Name: WRKY DNA -binding domain Pfam Description: WRKY DNA -binding domain
  misc_feature (1)..(321): Homolog of NCBI NO: 18400580 NR Description: WRKY family transcription factor [Arabidopsis >gi|29839677|sp|Q9SJA8|WR17_ARATH Probable WRKY transcription
  misc_feature (1)..(312): Homolog of NCBI NO: 25348152 NR Description: probable WRKY-type DNA binding protein [imported]
  misc_feature (1)..(321): Homolog of NCBI NO: 30689072 NR Description: WRKY family transcription factor [Arabidopsis
  misc_feature (1)..(321): Homolog of NCBI NO: 16604573 NR Description: putative putaive DNA-binding protein [Arabidopsis
  misc_feature (1)..(321): Homolog of NCBI NO: 21537078 NR Description: putaive DNA-binding protein [Arabidopsis thaliana]
  misc_feature (1)..(321): Homolog of NCBI NO: 22329054 NR Description: WRKY family transcription factor [Arabidopsis >gi|29839685|sp|Q9SV15|WR11_ARATH Probable WRKY transcription
  misc_feature (1)..(320): Homolog of NCBI NO: 4760596 NR Description: DNA-binding protein NtWRKY3 [Nicotiana tabacum]
  misc_feature (10)..(308): Homolog of NCBI NO: 38568048 NR Description: OSJNBa0065J03.18 [Oryza sativa (japonica
  misc_feature (88)..(300): Homolog of NCBI NO: 4894963 NR Description: DNA-binding protein WRKY3 [Avena sativa]
  misc_feature (1)..(36): Homolog of NCBI NO: 4894963 NR Description: DNA-binding protein WRKY3 [Avena sativa]

SEQ ID NO: 104683 - protein, 316 aa, Arabidopsis thaliana; identical to SEQ ID NO: 40360
  peptide (1)..(316): Ceres Seq. ID no. 13615556
  misc_feature (237)..(297): Pfam Name: WRKY DNA -binding domain Pfam Description: WRKY DNA -binding domain
  misc_feature (1)..(316): Homolog of NCBI NO: 18400580 NR Description: WRKY family transcription factor [Arabidopsis >gi|29839677|sp|Q9SJA8|WR17_ARATH Probable WRKY transcription
  misc_feature (1)..(307): Homolog of NCBI NO: 25348152 NR Description: probable WRKY-type DNA binding protein [imported]
  misc_feature (1)..(316): Homolog of NCBI NO: 30689072 NR Description: WRKY family transcription factor [Arabidopsis
  misc_feature (1)..(316): Homolog of NCBI NO: 16604573 NR Description: putative putaive DNA-binding protein [Arabidopsis
  misc_feature (1)..(316): Homolog of NCBI NO: 21537078 NR Description: putaive DNA-binding protein [Arabidopsis thaliana]
  misc_feature (1)..(316): Homolog of NCBI NO: 22329054 NR Description: WRKY family transcription factor [Arabidopsis >gi|29839685|sp|Q9SV15|WR11_ARATH Probable WRKY transcription
  misc_feature (1)..(315): Homolog of NCBI NO: 4760596 NR Description: DNA-binding protein NtWRKY3 [Nicotiana tabacum]
  misc_feature (5)..(303): Homolog of NCBI NO: 38568048 NR Description: OSJNBa0065J03.18 [Oryza sativa (japonica
  misc_feature (83)..(295): Homolog of NCBI NO: 4894963 NR Description: DNA-binding protein WRKY3 [Avena sativa]
  misc_feature (1)..(31): Homolog of NCBI NO: 4894963 NR Description: DNA-binding protein WRKY3 [Avena sativa]

SEQ ID NO: 104684 - DNA, 1000 bp, Arabidopsis thaliana
  misc_feature (1)..(1000): Ceres Seq. ID no. 13615561
  misc_feature: MA Experiment ID: 20000184 Result: Up-regulated in Transcription
  misc_feature: MA Experiment 20000184 PARAMETER Experiment Name: At_Shoots__P Parameter: Age (day) Value: 7
  misc_feature: MA Experiment 20000184 PARAMETER Experiment Name: At_Shoots__P Parameter: Tissue Value: Shoots vs. Whole Plant
  misc_feature: MA Experiment ID: 20001451 Result: Down-regulated in Transcription
  misc_feature: MA Experiment 20001451 PARAMETER Experiment Name: At_Far-red-induction_P Parameter: Age (day) Value: 7
  misc_feature: MA Experiment 20001451 PARAMETER Experiment Name: At_Far-red-induction_P Parameter: Light Value: Far-red vs. White
  misc_feature: MA Experiment 20001451 PARAMETER Experiment Name: At_Far-red-induction_P Parameter: Organism Value: A. thaliana
  misc_feature: MA Experiment 20001451 PARAMETER Experiment Name: At_Far-red-induction_P Parameter: Plant Line Value: Columbia
  misc_feature: MA Experiment 20001451 PARAMETER Experiment Name: At_Far-red-induction_P Parameter: Timepoint (hr) Value: 24
  misc_feature: MA Experiment 20001451 PARAMETER Experiment Name: At_Far-red-induction_P Parameter: Tissue Value: Whole Plant
atgccgttgtcatggacatttaaagttgacccacaaaaaataactttcatcttcaatttcgaatcgataaccctaatttctcacagacgagcaagagaaagagccaaagccgtttcttcaggtaacttgaggatgtcgcgtgtgtatgttggtaatttggatccgcgagttactgaacgtgaactcgaggatgagtttcgttcctttggtgtgatcaggagtgtctgggttgctagaagacctcctggttacgcttttcttgattttgaagattcaagagatgcccgtgacgccatccgtgaagtagatggcaagaatggatggagggtagagcagtctcataaccgtggtggtggtggaggtcgtggtggtggtcgtggaggaggtgatggtggtcgtggacgtggtggttctgatttgaagtgctatgagtgtggtgagtctggtcactttgcacgtgaatgtcgttctcgtggtggttctggtggtaggcgtcgtagccgcagccgtagtcgcagtcctcctagatacagaaagagtcctacctatggaggacgaagaagttacagccctcgtgctagatctcctcctcctccaagacgtcgtagtccttctcctcgtggtcgcaactacagtaggtcaccaccaccttatagagcacgtgacgaggtgccatatgctaatggaaatggtctgaaagatgtgcgcagaagccggagctgagtgttacttgtctagatagcaaattatgggatcaggagacaactatttgcttgtgacgtcaagaggagaggaaattagtatctgtgaatttcactaagagaatatgttttagctgtgtggtggattggatatgcttgctacttttgaattgctggaaagcttcttattgcgtttggattatgaagccatagttgtatctgccgttaggtaaagtacttttaaatatctacccatgttcttaaaagacataaacaaaagctctgctaaaaacctatgc

SEQ ID NO: 104685 - protein, 240 aa, Arabidopsis thaliana
  peptide (1)..(240): Ceres Seq. ID no. 13615562
  misc_feature (48)..(105): Pfam Name: RNA recognition motif. (a.k.a. RRM, RBD, or RNP domain) Pfam Description: RNA recognition motif. (a.k.a. RRM, RBD, or RNP
  misc_feature (45)..(240): Homolog of NCBI NO: 15224171 NR Description: RSZp22 splicing factor -related [Arabidopsis
  misc_feature (45)..(240): Homolog of NCBI NO: 15236000 NR Description: splicing factor SRZ_22 [Arabidopsis thaliana]
  misc_feature (45)..(240): Homolog of NCBI NO: 25294318 NR Description: splicing factor RSZp22 [validated] - Arabidopsis
  misc_feature (45)..(225): Homolog of NCBI NO: 18395314 NR Description: splicing factor SRZ_21 [Arabidopsis thaliana]
  misc_feature (45)..(225): Homolog of NCBI NO: 25294317 NR Description: protein T23E23.2 [imported] - Arabidopsis >gi|9369411|gb|AAF87159.1|AC002423_24 T23E23.2 [Arabidopsis
  misc_feature (45)..(225): Homolog of NCBI NO: 25294319 NR Description: splicing factor RSZp21 [imported] - Arabidopsis
  misc_feature (22)..(240): Homolog of NCBI NO: 31222328 NR Description: ENSANGP00000018287 [Anopheles gambiae]
  misc_feature (47)..(234): Homolog of NCBI NO: 24582360 NR Description: CG10203-PA [Drosophila melanogaster] DXl6 protein [Drosophila melanogaster]
  misc_feature (46)..(226): Homolog of NCBI NO: 25144919 NR Description: pre-mRNA splicing SR Protein RSP-6 (20.5 kD)
  misc_feature (46)..(195): Homolog of NCBI NO: 29841408 NR Description: similar to NM_006276 splicing factor,
MPLSWTFKVDPQKITFIFNFESITLISHRRARERAKAVSSGNLRMSRVYVGNLDPRVTERELEDEFRSFGVIRSVWVARRPPGYAFLDFEDSRDARDAIREVDGKNGWRVEQSHNRGGGGGRGGGRGGGDGGRGRGGSDLKCYECGESGHFARECRSRGGSGGRRRSRSRSRSPPRYRKSPTYGGRRSYSPRARSPPPPRRRSPSPRGRNYSRSPPPYRARDEVPYANGNGLKDVRRSRS

SEQ ID NO: 104686 - protein, 196 aa, Arabidopsis thaliana; identical to SEQ ID NO: 26467
  peptide (1)..(196): Ceres Seq. ID no. 13615563
  misc_feature (4)..(61): Pfam Name: RNA recognition motif. (a.k.a. RRM, RBD, or RNP domain) Pfam Description: RNA recognition motif. (a.k.a. RRM, RBD, or RNP
  misc_feature (1)..(196): Homolog of NCBI NO: 15224171 NR Description: RSZp22 splicing factor -related [Arabidopsis
  misc_feature (1)..(196): Homolog of NCBI NO: 15236000 NR Description: splicing factor SRZ_22 [Arabidopsis thaliana]
  misc_feature (1)..(196): Homolog of NCBI NO: 25294318 NR Description: splicing factor RSZp22 [validated] - Arabidopsis
  misc_feature (1)..(181): Homolog of NCBI NO: 18395314 NR Description: splicing factor SRZ_21 [Arabidopsis thaliana]
  misc_feature (1)..(181): Homolog of NCBI NO: 25294317 NR Description: protein T23E23.2 [imported] - Arabidopsis >gi|9369411|gb|AAF87159.1|AC002423_24 T23E23.2 [Arabidopsis
  misc_feature (1)..(181): Homolog of NCBI NO: 25294319 NR Description: splicing factor RSZp21 [imported] - Arabidopsis
  misc_feature (1)..(196): Homolog of NCBI NO: 31222328 NR Description: ENSANGP00000018287 [Anopheles gambiae]
  misc_feature (3)..(190): Homolog of NCBI NO: 24582360 NR Description: CG10203-PA [Drosophila melanogaster] DXl6 protein [Drosophila melanogaster]
  misc_feature (2)..(182): Homolog of NCBI NO: 25144919 NR Description: pre-mRNA splicing SR Protein RSP-6 (20.5 kD)
  misc_feature (2)..(151): Homolog of NCBI NO: 29841408 NR Description: similar to NM_006276 splicing factor,

SEQ ID NO: 104687 - DNA, 1765 bp, Arabidopsis thaliana
  misc_feature (1)..(1765): Ceres Seq. ID no. 13615575
  misc_feature: MA Experiment ID: 108463 Result: Up-regulated in Transcription
  misc_feature: MA Experiment 108463 PARAMETER Experiment Name: At_Germinating_Seeds_cDNA_P Parameter: Age (day) Value: 3 vs. 0
  misc_feature: MA Experiment 108463 PARAMETER Experiment Name: At_Germinating_Seeds_cDNA_P Parameter: Tissue Value: Germinating Seeds
  misc_feature: MA Experiment ID: 20000090 Result: Down-regulated in Transcription
  misc_feature: MA Experiment ID: 20000184 Result: Up-regulated in Transcription
  misc_feature: MA Experiment 20000184 PARAMETER Experiment Name: At_Shoots__P Parameter: Age (day) Value: 7
  misc_feature: MA Experiment 20000184 PARAMETER Experiment Name: At_Shoots__P Parameter: Tissue Value: Shoots vs. Whole Plant
  misc_feature: MA Experiment ID: 20000264 Result: Up-regulated in Transcription
  misc_feature: MA Experiment 20000264 PARAMETER Experiment Name: At_Open_Flower_P Parameter: Age (day) Value: 21
  misc_feature: MA Experiment 20000264 PARAMETER Experiment Name: At_Open_Flower_P Parameter: Plant Line Value: WS
  misc_feature: MA Experiment 20000264 PARAMETER Experiment Name: At_Open_Flower_P Parameter: Tissue Value: Open Flower vs. Whole Plant
  misc_feature: MA Experiment ID: 20000438 Result: Up-regulated in Transcription
  misc_feature: MA Experiment 20000438 PARAMETER Experiment Name: At_Shoots__P Parameter: Age (day) Value: 14
  misc_feature: MA Experiment 20000438 PARAMETER Experiment Name: At_Shoots__P Parameter: Tissue Value: Shoots vs. Whole Plant
  misc_feature: MA Experiment ID: 20000439 Result: Down-regulated in Transcription
  misc_feature: MA Experiment 20000439 PARAMETER Experiment Name: At_Roots__P Parameter: Age (day) Value: 14 vs. 21
  misc_feature: MA Experiment 20000439 PARAMETER Experiment Name: At_Roots__P Parameter: Organism Value: A. thaliana
  misc_feature: MA Experiment 20000439 PARAMETER Experiment Name: At_Roots__P Parameter: Tissue Value: Roots vs. Whole Plant
  misc_feature: MA Experiment ID: 20001248 Result: Down-regulated in Transcription
  misc_feature: MA Experiment 20001248 PARAMETER Experiment Name: At_Far-red-induction_P Parameter: Age (day) Value: 7
  misc_feature: MA Experiment 20001248 PARAMETER Experiment Name: At_Far-red-induction_P Parameter: Light Value: Far-red vs. White
  misc_feature: MA Experiment 20001248 PARAMETER Experiment Name: At_Far-red-induction_P Parameter: Organism Value: A. thaliana
  misc_feature: MA Experiment 20001248 PARAMETER Experiment Name: At_Far-red-induction_P Parameter: Plant Line Value: Columbia
  misc_feature: MA Experiment 20001248 PARAMETER Experiment Name: At_Far-red-induction_P Parameter: Timepoint (hr) Value: 4
  misc_feature: MA Experiment 20001248 PARAMETER Experiment Name: At_Far-red-induction_P Parameter: Tissue Value: Whole Plant
  misc_feature: MA Experiment ID: 20001451 Result: Down-regulated in Transcription
  misc_feature: MA Experiment 20001451 PARAMETER Experiment Name: At_Far-red-induction_P Parameter: Age (day) Value: 7
  misc_feature: MA Experiment 20001451 PARAMETER Experiment Name: At_Far-red-induction_P Parameter: Light Value: Far-red vs. White
  misc_feature: MA Experiment 20001451 PARAMETER Experiment Name: At_Far-red-induction_P Parameter: Organism Value: A. thaliana
  misc_feature: MA Experiment 20001451 PARAMETER Experiment Name: At_Far-red-induction_P Parameter: Plant Line Value: Columbia
  misc_feature: MA Experiment 20001451 PARAMETER Experiment Name: At_Far-red-induction_P Parameter: Timepoint (hr) Value: 24
  misc_feature: MA Experiment 20001451 PARAMETER Experiment Name: At_Far-red-induction_P Parameter: Tissue Value: Whole Plant
ctaacattggattcgagctctctagtgaagaatccgccatggctgttccatttctaagctcttctctacaactcacacccacttctccgattctcttcactaaagtaacaccaacaccaataatccacaaccacagatcaacatgcactatacccacaaagcctcgtctacgtctcctccgccgctccgccgtcgctggaaccgccgtatctgatcaaacagaaggaggtggagatgttcttttaaaccctgaagaagagaaacgtgttgaggtggcggattatgattggacagaggaatggtatccattgtacttaactaaaaacgtccctgaagatgcgcctcttggcctcaccgtctacgatcgtcaaattgttttgtataaagacggtgaaggaacacttcgttgttacgaagatcggtgtcctcatcggttggctaagttgtctgaaggacaattgattgatgggagattggaatgtttgtatcatggttggcaatttgaaggagagggcaaatgtgtcaagattcctcagcttcctgcaagtgctaagattccaaaggctgcttgtgtgaagacgtatgaggtgaaggattcacaaggagttgtgtgggtgtggatgtcaacaaagacacctccaaaccctgagaagcttccttggtttgagaatttcgctagacccggttttttcgacatttcgactactcatgagcttccttatgaccattccattcttttagagaatctgatggatcctgctcatgttcctatctctcatgatagaacggatttcactgctaaaagagaagatgctcagcctttggttttcgaggtcacagagcgaagtaatcggggtttcgcagggacttggggccgagagaaagaaggtgggaaagggagtaatttacttcggtttgatgctccttgtgttctgcagaacaatcgagagttcgaggggaaggatggagtgaagaactatttttcagggctgtttctttgtagacctacagggcaagggaagtctatgcttattgttaggtttggggtcacaaaaagatcgcctttggtttcggtgttacctcaatggttctggcatcagaatgcctgcaaggtttttgaacaagacatggggtttctatcgtctcaaaatgaggttctgatgaaggagaaagtaccaactaaggacttgtatttgaatctaaagtcatcggacacatgggtcgctgaatatagaaagtggatggacaaagttggtcatgggatgccttaccatttcgggcataggaccatatctctccccaaagtccctcctgtcgtggaacatgccccggcagggctcattgcagctctctctgcttcttaccctgcaaaaggcggaattgggactatgcatgctcccaatttggctaaccggtacttcagacatattattcattgtagaagctgcagcaatgtgatcaaatcttttgagctctggaaaaatatcctctctgccacggcagtggctttgacggctttggccattctggtggttagtagacagtggaaggctgtcctgttaggttcagcagcattgtgctcagccgcagcttatacctgcttaagagctataaatctaaacaccaataacttcattagaacacacagaagactatgaaaatgtatagtgtcatgtttcctcttcttccaacaatatgtatttcatgaaataaatttttgcttgtaaacgcaattatataattcagaaggttccaatgtttgcca

SEQ ID NO: 104688 - protein, 551 aa, Arabidopsis thaliana
  peptide (1)..(551): Ceres Seq. ID no. 13615576
  misc_feature (99)..(201): Pfam Name: Rieske [2Fe-2S] domain Pfam Description: Rieske [2Fe-2S] domain
  misc_feature (13)..(551): Homolog of NCBI NO: 15224625 NR Description: Rieske [2Fe-2S] domain-containing protein
  misc_feature (13)..(551): Homolog of NCBI NO: 7488843 NR Description: Rieske [2Fe-2S] iron-sulfur protein tic55 -
  misc_feature (93)..(429): Homolog of NCBI NO: 23125858 NR Description: hypothetical protein [Nostoc punctiforme]
  misc_feature (93)..(429): Homolog of NCBI NO: 17232499 NR Description: similar to cell death suppressor protein Lls1
  misc_feature (24)..(427): Homolog of NCBI NO: 15451611 NR Description: Putative cell death suppressor protein [Oryza
  misc_feature (468)..(531): Homolog of NCBI NO: 15451611 NR Description: Putative cell death suppressor protein [Oryza
  misc_feature (13)..(396): Homolog of NCBI NO: 30088964 NR Description: lethal leaf spot 1-like protein [Vigna
  misc_feature (468)..(532): Homolog of NCBI NO: 30088964 NR Description: lethal leaf spot 1-like protein [Vigna
  misc_feature (13)..(399): Homolog of NCBI NO: 15230543 NR Description: Rieske [2Fe-2S] domain-containing protein
  misc_feature (468)..(545): Homolog of NCBI NO: 15230543 NR Description: Rieske [2Fe-2S] domain-containing protein
NIGFELSSEESAMAVPFLSSSLQLTPTSPILFTKVTPTPIIHNHRSTCTIPTKPRLRLLRRSAVAGTAVSDQTEGGGDVLLNPEEEKRVEVADYDWTEEWYPLYLTKNVPEDAPLGLTVYDRQIVLYKDGEGTLRCYEDRCPHRLAKLSEGQLIDGRLECLYHGWQFEGEGKCVKIPQLPASAKIPKAACVKTYEVKDSQGVVWVWMSTKTPPNPEKLPWFENFARPGFFDISTTHELPYDHSILLENLMDPAHVPISHDRTDFTAKREDAQPLVFEVTERSNRGFAGTWGREKEGGKGSNLLRFDAPCVLQNNREFEGKDGVKNYFSGLFLCRPTGQGKSMLIVRFGVTKRSPLVSVLPQWFWHQNACKVFEQDMGFLSSQNEVLMKEKVPTKDLYLNLKSSDTWVAEYRKWMDKVGHGMPYHFGHRTISLPKVPPVVEHAPAGLIAALSASYPAKGGIGTMHAPNLANRYFRHIIHCRSCSNVIKSFELWKNILSATAVALTALAILVVSRQWKAVLLGSAALCSAAAYTCLRAINLNTNNFIRTHRRL

SEQ ID NO: 104689 - protein, 539 aa, Arabidopsis thaliana
  peptide (1)..(539): Ceres Seq. ID no. 13615577
  misc_feature (87)..(189): Pfam Name: Rieske [2Fe-2S] domain Pfam Description: Rieske [2Fe-2S] domain
  misc_feature (1)..(539): Homolog of NCBI NO: 15224625 NR Description: Rieske [2Fe-2S] domain-containing protein
  misc_feature (1)..(539): Homolog of NCBI NO: 7488843 NR Description: Rieske [2Fe-2S] iron-sulfur protein tic55 -
  misc_feature (81)..(417): Homolog of NCBI NO: 23125858 NR Description: hypothetical protein [Nostoc punctiforme]
  misc_feature (81)..(417): Homolog of NCBI NO: 17232499 NR Description: similar to cell death suppressor protein Lls1
  misc_feature (12)..(415): Homolog of NCBI NO: 15451611 NR Description: Putative cell death suppressor protein [Oryza
  misc_feature (456)..(519): Homolog of NCBI NO: 15451611 NR Description: Putative cell death suppressor protein [Oryza
  misc_feature (1)..(384): Homolog of NCBI NO: 30088964 NR Description: lethal leaf spot 1-like protein [Vigna
  misc_feature (456)..(520): Homolog of NCBI NO: 30088964 NR Description: lethal leaf spot 1-like protein [Vigna
  misc_feature (1)..(387): Homolog of NCBI NO: 15230543 NR Description: Rieske [2Fe-2S] domain-containing protein
  misc_feature (456)..(533): Homolog of NCBI NO: 15230543 NR Description: Rieske [2Fe-2S] domain-containing protein
MAVPFLSSSLQLTPTSPILFTKVTPTPIIHNHRSTCTIPTKPRLRLLRRSAVAGTAVSDQTEGGGDVLLNPEEEKRVEVADYDWTEEWYPLYLTKNVPEDAPLGLTVYDRQIVLYKDGEGTLRCYEDRCPHRLAKLSEGQLIDGRLECLYHGWQFEGEGKCVKIPQLPASAKIPKAACVKTYEVKDSQGVVWVWMSTKTPPNPEKLPWFENFARPGFFDISTTHELPYDHSILLENLMDPAHVPISHDRTDFTAKREDAQPLVFEVTERSNRGFAGTWGREKEGGKGSNLLRFDAPCVLQNNREFEGKDGVKNYFSGLFLCRPTGQGKSMLIVRFGVTKRSPLVSVLPQWFWHQNACKVFEQDMGFLSSQNEVLMKEKVPTKDLYLNLKSSDTWVAEYRKWMDKVGHGMPYHFGHRTISLPKVPPVVEHAPAGLIAALSASYPAKGGIGTMHAPNLANRYFRHIIHCRSCSNVIKSFELWKNILSATAVALTALAILVVSRQWKAVLLGSAALCSAAAYTCLRAINLNTNNFIRTHRRL

SEQ ID NO: 104690 - protein, 345 aa, Arabidopsis thaliana
  peptide (1)..(345): Ceres Seq. ID no. 13615578
  misc_feature (1)..(345): Homolog of NCBI NO: 15224625 NR Description: Rieske [2Fe-2S] domain-containing protein
  misc_feature (1)..(345): Homolog of NCBI NO: 7488843 NR Description: Rieske [2Fe-2S] iron-sulfur protein tic55 -
  misc_feature (1)..(223): Homolog of NCBI NO: 23125858 NR Description: hypothetical protein [Nostoc punctiforme]
  misc_feature (1)..(223): Homolog of NCBI NO: 17232499 NR Description: similar to cell death suppressor protein Lls1
  misc_feature (1)..(221): Homolog of NCBI NO: 15451611 NR Description: Putative cell death suppressor protein [Oryza
  misc_feature (262)..(325): Homolog of NCBI NO: 15451611 NR Description: Putative cell death suppressor protein [Oryza
  misc_feature (1)..(190): Homolog of NCBI NO: 30088964 NR Description: lethal leaf spot 1-like protein [Vigna
  misc_feature (262)..(326): Homolog of NCBI NO: 30088964 NR Description: lethal leaf spot 1-like protein [Vigna
  misc_feature (1)..(193): Homolog of NCBI NO: 15230543 NR Description: Rieske [2Fe-2S] domain-containing protein
  misc_feature (262)..(339): Homolog of NCBI NO: 15230543 NR Description: Rieske [2Fe-2S] domain-containing protein
MSTKTPPNPEKLPWFENFARPGFFDISTTHELPYDHSILLENLMDPAHVPISHDRTDFTAKREDAQPLVFEVTERSNRGFAGTWGREKEGGKGSNLLRFDAPCVLQNNREFEGKDGVKNYFSGLFLCRPTGQGKSMLIVRFGVTKRSPLVSVLPQWFWHQNACKVFEQDMGFLSSQNEVLMKEKVPTKDLYLNLKSSDTWVAEYRKWMDKVGHGMPYHFGHRTISLPKVPPVVEHAPAGLIAALSASYPAKGGIGTMHAPNLANRYFRHIIHCRSCSNVIKSFELWKNILSATAVALTALAILVVSRQWKAVLLGSAALCSAAAYTCLRAINLNTNNFIRTHRRL

SEQ ID NO: 104691 - DNA, 1189 bp, Arabidopsis thaliana
  misc_feature (1)..(1189): Ceres Seq. ID no. 13615583
  misc_feature: MA Experiment ID: 108435 Result: Up-regulated in Transcription
  misc_feature: MA Experiment 108435 PARAMETER Experiment Name: At_stm_Mutants_cDNA_P Parameter: Plant Line Value: wt Landsburg vs stm
  misc_feature: MA Experiment 108435 PARAMETER Experiment Name: At_stm_Mutants_cDNA_P Parameter: Tissue Value: Shoot Apical Meristem Region
  misc_feature: MA Experiment ID: 108464 Result: Up-regulated in Transcription
  misc_feature: MA Experiment 108464 PARAMETER Experiment Name: At_Germinating_Seeds_cDNA_P Parameter: Age (day) Value: 4 vs. 0
  misc_feature: MA Experiment 108464 PARAMETER Experiment Name: At_Germinating_Seeds_cDNA_P Parameter: Tissue Value: Germinating Seeds
  misc_feature: MA Experiment ID: 108489 Result: Down-regulated in Transcription
  misc_feature: MA Experiment ID: 108605 Result: Up-regulated in Transcription
  misc_feature: MA Experiment 108605 PARAMETER Experiment Name: At_100uM_ABA_cDNA_P Parameter: Timepoint (hr) Value: 6
  misc_feature: MA Experiment 108605 PARAMETER Experiment Name: At_100uM_ABA_cDNA_P Parameter: Tissue Value: Aerial
  misc_feature: MA Experiment 108605 PARAMETER Experiment Name: At_100uM_ABA_cDNA_P Parameter: Treatment Value: 100uM ABA vs. No Treatment
  misc_feature: MA Experiment ID: 20000069 Result: Up-regulated in Transcription
  misc_feature: MA Experiment 20000069 PARAMETER Experiment Name: At_100uM_ABA_Mutants_cDNA_P Parameter: Plant Line Value: CS23
  misc_feature: MA Experiment 20000069 PARAMETER Experiment Name: At_100uM_ABA_Mutants_cDNA_P Parameter: Timepoint (hr) Value: 6
  misc_feature: MA Experiment 20000069 PARAMETER Experiment Name: At_100uM_ABA_Mutants_cDNA_P Parameter: Tissue Value: Aerial
  misc_feature: MA Experiment 20000069 PARAMETER Experiment Name: At_100uM_ABA_Mutants_cDNA_P Parameter: Treatment Value: 100uM ABA vs. No Treatment
  misc_feature: MA Experiment ID: 20000089 Result: Up-regulated in Transcription
  misc_feature: MA Experiment ID: 20000090 Result: Up-regulated in Transcription
  misc_feature: MA Experiment ID: 20000111 Result: Down-regulated in Transcription
  misc_feature: MA Experiment 20000111 PARAMETER Experiment Name: At_42deg_Heat_cDNA_P Parameter: Temperature (deg C) Value: 42 vs. 22
  misc_feature: MA Experiment 20000111 PARAMETER Experiment Name: At_42deg_Heat_cDNA_P Parameter: Timepoint (hr) Value: 6
  misc_feature: MA Experiment 20000111 PARAMETER Experiment Name: At_42deg_Heat_cDNA_P Parameter: Tissue Value: Aerial
  misc_feature: MA Experiment ID: 20000182 Result: Up-regulated in Transcription
  misc_feature: MA Experiment 20000182 PARAMETER Experiment Name: At_2mM_SA_P Parameter: Age (day) Value: 14
  misc_feature: MA Experiment 20000182 PARAMETER Experiment Name: At_2mM_SA_P Parameter: Organism Value: A. thaliana
  misc_feature: MA Experiment 20000182 PARAMETER Experiment Name: At_2mM_SA_P Parameter: Plant Line Value: WS
  misc_feature: MA Experiment 20000182 PARAMETER Experiment Name: At_2mM_SA_P Parameter: Timepoint (hr) Value: 6
  misc_feature: MA Experiment 20000182 PARAMETER Experiment Name: At_2mM_SA_P Parameter: Tissue Value: Aerial
  misc_feature: MA Experiment 20000182 PARAMETER Experiment Name: At_2mM_SA_P Parameter: Treatment Value: 2mM SA vs. No Treatment
  misc_feature: MA Experiment ID: 20000453 Result: Up-regulated in Transcription
  misc_feature: MA Experiment 20000453 PARAMETER Experiment Name: At_100uM_ABA_P Parameter: Age (day) Value: 15
  misc_feature: MA Experiment 20000453 PARAMETER Experiment Name: At_100uM_ABA_P Parameter: Organism Value: A. thaliana
  misc_feature: MA Experiment 20000453 PARAMETER Experiment Name: At_100uM_ABA_P Parameter: Plant Line Value: WS
  misc_feature: MA Experiment 20000453 PARAMETER Experiment Name: At_100uM_ABA_P Parameter: Timepoint (hr) Value: 24
  misc_feature: MA Experiment 20000453 PARAMETER Experiment Name: At_100uM_ABA_P Parameter: Tissue Value: Aerial
  misc_feature: MA Experiment 20000453 PARAMETER Experiment Name: At_100uM_ABA_P Parameter: Treatment Value: 100uM ABA vs. No Treatment
  misc_feature: MA Experiment ID: 20001911 Result: Down-regulated in Transcription
  misc_feature: MA Experiment 20001911 PARAMETER Experiment Name: At_Drought_Reproduction_P Parameter: Age (day) Value: 40
  misc_feature: MA Experiment 20001911 PARAMETER Experiment Name: At_Drought_Reproduction_P Parameter: Organism Value: A. thaliana
  misc_feature: MA Experiment 20001911 PARAMETER Experiment Name: At_Drought_Reproduction_P Parameter: Plant Line Value: WS
  misc_feature: MA Experiment 20001911 PARAMETER Experiment Name: At_Drought_Reproduction_P Parameter: Timepoint (day) Value: 10
  misc_feature: MA Experiment 20001911 PARAMETER Experiment Name: At_Drought_Reproduction_P Parameter: Tissue Value: Flowers
  misc_feature: MA Experiment 20001911 PARAMETER Experiment Name: At_Drought_Reproduction_P Parameter: Treatment Value: Drought vs. No Drought
atgaatttggtcttcgctataatctcacgttacattaaattggctcctgtgaacctaaatttatggactatgatcccaacaccaatccgttcgaccttcatttctccggtaaacttccgaaaagagaagtctcggcttcagcttctaaagttgtagagaagaaatggttagtgaaagatgagaagagaaatatgctacaagatgaaataaaccgggttaattcggagaacaagaagctaaccgaaatgttagcaagagtctgtgagaagtactatgctcttaataatcttatggaggagttgcagagtcgaaagagtcctgaaagtgttaactttcagaacaaacagctaacggggaaacgaaaacaagaacttgatgagtttgttagctccccaattggactcagtctcggaccaatcgagaacatcaccaacgataaagcgacggtttcaaccgcttactttgctgctgagaagtctgacacaagcttgactgtgaaagatggatatcaatggaggaaatacgggcaaaagattacgagagataatccatctcctagagcttacttcagatgctcgttttcaccgtcttgtctagtcaagaagaaggtgcaacgaagtgcagaagatccatctttcttggtagccacttacgaagggacacataaccacaccggaccacatgcaagtgtgtccaggacagtgaaacttgatctagttcaaggtgggcttgaaccagttgaggaaaagaaagagagagggacgattcaagaggttttggtgcaacaaatggcttcttcgttgaccaaagatcctaagttcactgcagctcttgcgactgctatttccgggagattgatagagcattcaagaacatgaaagttctctagaacatgtatatttctgttttgttctattttgttgctcattcctagtaaaaaggtaaagatttgtttgatcttgattaggaggcatagatgtcaattttaatgtgtgtgtatataattacatcaaatctaagtatccaaaaagggtcacccccattttatcttatgttgaaagagttttgttatagctcggtgtaagtatggtagattgacgctgcttcgacagtttatgtatcttccaatgttatcttgttcagttgtttgtattaacttccattagagaagaatgtgatgccattacag

SEQ ID NO: 104692 - protein, 271 aa, Arabidopsis thaliana
  peptide (1)..(271): Ceres Seq. ID no. 13615584
  misc_feature (145)..(205): Pfam Name: WRKY DNA -binding domain Pfam Description: WRKY DNA -binding domain
  misc_feature (1)..(271): Homolog of NCBI NO: 15224660 NR Description: WRKY family transcription factor [Arabidopsis >gi|20978792|sp|Q9SK33|WR60_ARATH Probable WRKY transcription
  misc_feature (1)..(271): Homolog of NCBI NO: 17980964 NR Description: WRKY transcription factor 60 [Arabidopsis
  misc_feature (1)..(271): Homolog of NCBI NO: 21592591 NR Description: putative WRKY-type DNA binding protein
  misc_feature (118)..(271): Homolog of NCBI NO: 13506731 NR Description: WRKY DNA-binding protein 18 [Arabidopsis thaliana]
  misc_feature (118)..(271): Homolog of NCBI NO: 18417877 NR Description: WRKY family transcription factor [Arabidopsis
  misc_feature (1)..(126): Homolog of NCBI NO: 13506731 NR Description: WRKY DNA-binding protein 18 [Arabidopsis thaliana]
  misc_feature (1)..(126): Homolog of NCBI NO: 18417877 NR Description: WRKY family transcription factor [Arabidopsis
  misc_feature (118)..(264): Homolog of NCBI NO: 7486317 NR Description: hypothetical protein F28M20.10 - Arabidopsis >gi|3281848|emb|CAA19743.1| putative protein [Arabidopsis >gi|7270083|emb|CAB79898.1| putative protein [Arabidopsis
  misc_feature (20)..(126): Homolog of NCBI NO: 7486317 NR Description: hypothetical protein F28M20.10 - Arabidopsis >gi|3281848|emb|CAA19743.1| putative protein [Arabidopsis >gi|7270083|emb|CAB79898.1| putative protein [Arabidopsis
  misc_feature (17)..(111): Homolog of NCBI NO: 6472585 NR Description: WIZZ [Nicotiana tabacum]
MDYDPNTNPFDLHFSGKLPKREVSASASKVVEKKWLVKDEKRNMLQDEINRVNSENKKLTEMLARVCEKYYALNNLMEELQSRKSPESVNFQNKQLTGKRKQELDEFVSSPIGLSLGPIENITNDKATVSTAYFAAEKSDTSLTVKDGYQWRKYGQKITRDNPSPRAYFRCSFSPSCLVKKKVQRSAEDPSFLVATYEGTHNHTGPHASVSRTVKLDLVQGGLEPVEEKKERGTIQEVLVQQMASSLTKDPKFTAALATAISGRLIEHSRT

SEQ ID NO: 104693 - protein, 228 aa, Arabidopsis thaliana
  peptide (1)..(228): Ceres Seq. ID no. 13615585
  misc_feature (102)..(162): Pfam Name: WRKY DNA -binding domain Pfam Description: WRKY DNA -binding domain
  misc_feature (1)..(228): Homolog of NCBI NO: 15224660 NR Description: WRKY family transcription factor [Arabidopsis >gi|20978792|sp|Q9SK33|WR60_ARATH Probable WRKY transcription
  misc_feature (1)..(228): Homolog of NCBI NO: 17980964 NR Description: WRKY transcription factor 60 [Arabidopsis
  misc_feature (1)..(228): Homolog of NCBI NO: 21592591 NR Description: putative WRKY-type DNA binding protein
  misc_feature (75)..(228): Homolog of NCBI NO: 13506731 NR Description: WRKY DNA-binding protein 18 [Arabidopsis thaliana]
  misc_feature (75)..(228): Homolog of NCBI NO: 18417877 NR Description: WRKY family transcription factor [Arabidopsis
  misc_feature (1)..(83): Homolog of NCBI NO: 13506731 NR Description: WRKY DNA-binding protein 18 [Arabidopsis thaliana]
  misc_feature (1)..(83): Homolog of NCBI NO: 18417877 NR Description: WRKY family transcription factor [Arabidopsis
  misc_feature (75)..(221): Homolog of NCBI NO: 7486317 NR Description: hypothetical protein F28M20.10 - Arabidopsis >gi|3281848|emb|CAA19743.1| putative protein [Arabidopsis >gi|7270083|emb|CAB79898.1| putative protein [Arabidopsis
  misc_feature (1)..(83): Homolog of NCBI NO: 7486317 NR Description: hypothetical protein F28M20.10 - Arabidopsis >gi|3281848|emb|CAA19743.1| putative protein [Arabidopsis >gi|7270083|emb|CAB79898.1| putative protein [Arabidopsis
  misc_feature (1)..(68): Homolog of NCBI NO: 6472585 NR Description: WIZZ [Nicotiana tabacum]
MLQDEINRVNSENKKLTEMLARVCEKYYALNNLMEELQSRKSPESVNFQNKQLTGKRKQELDEFVSSPIGLSLGPIENITNDKATVSTAYFAAEKSDTSLTVKDGYQWRKYGQKITRDNPSPRAYFRCSFSPSCLVKKKVQRSAEDPSFLVATYEGTHNHTGPHASVSRTVKLDLVQGGLEPVEEKKERGTIQEVLVQQMASSLTKDPKFTAALATAISGRLIEHSRT

SEQ ID NO: 104694 - protein, 210 aa, Arabidopsis thaliana
  peptide (1)..(210): Ceres Seq. ID no. 13615586
  misc_feature (84)..(144): Pfam Name: WRKY DNA -binding domain Pfam Description: WRKY DNA -binding domain
  misc_feature (1)..(210): Homolog of NCBI NO: 15224660 NR Description: WRKY family transcription factor [Arabidopsis >gi|20978792|sp|Q9SK33|WR60_ARATH Probable WRKY transcription
  misc_feature (1)..(210): Homolog of NCBI NO: 17980964 NR Description: WRKY transcription factor 60 [Arabidopsis
  misc_feature (1)..(210): Homolog of NCBI NO: 21592591 NR Description: putative WRKY-type DNA binding protein
  misc_feature (57)..(210): Homolog of NCBI NO: 13506731 NR Description: WRKY DNA-binding protein 18 [Arabidopsis thaliana]
  misc_feature (57)..(210): Homolog of NCBI NO: 18417877 NR Description: WRKY family transcription factor [Arabidopsis
  misc_feature (1)..(65): Homolog of NCBI NO: 13506731 NR Description: WRKY DNA-binding protein 18 [Arabidopsis thaliana]
  misc_feature (1)..(65): Homolog of NCBI NO: 18417877 NR Description: WRKY family transcription factor [Arabidopsis
  misc_feature (57)..(203): Homolog of NCBI NO: 7486317 NR Description: hypothetical protein F28M20.10 - Arabidopsis >gi|3281848|emb|CAA19743.1| putative protein [Arabidopsis >gi|7270083|emb|CAB79898.1| putative protein [Arabidopsis
  misc_feature (1)..(65): Homolog of NCBI NO: 7486317 NR Description: hypothetical protein F28M20.10 - Arabidopsis >gi|3281848|emb|CAA19743.1| putative protein [Arabidopsis >gi|7270083|emb|CAB79898.1| putative protein [Arabidopsis
  misc_feature (1)..(50): Homolog of NCBI NO: 6472585 NR Description: WIZZ [Nicotiana tabacum]
MLARVCEKYYALNNLMEELQSRKSPESVNFQNKQLTGKRKQELDEFVSSPIGLSLGPIENITNDKATVSTAYFAAEKSDTSLTVKDGYQWRKYGQKITRDNPSPRAYFRCSFSPSCLVKKKVQRSAEDPSFLVATYEGTHNHTGPHASVSRTVKLDLVQGGLEPVEEKKERGTIQEVLVQQMASSLTKDPKFTAALATAISGRLIEHSRT

SEQ ID NO: 104695 - DNA, 1127 bp, Arabidopsis thaliana
  misc_feature (1)..(1127): Ceres Seq. ID no. 13615595
  misc_feature: MA Experiment ID: 20000093 Result: Up-regulated in Transcription
  misc_feature: MA Experiment 20000093 PARAMETER Experiment Name: At_42deg_Heat_cDNA_P Parameter: Temperature (deg C) Value: 42 vs. 22
  misc_feature: MA Experiment 20000093 PARAMETER Experiment Name: At_42deg_Heat_cDNA_P Parameter: Timepoint (hr) Value: 0.5
  misc_feature: MA Experiment 20000093 PARAMETER Experiment Name: At_42deg_Heat_cDNA_P Parameter: Tissue Value: Aerial
  misc_feature: MA Experiment ID: 20000112 Result: Up-regulated in Transcription
  misc_feature: MA Experiment 20000112 PARAMETER Experiment Name: At_42deg_Heat_cDNA_P Parameter: Temperature (deg C) Value: 42 vs. 22
  misc_feature: MA Experiment 20000112 PARAMETER Experiment Name: At_42deg_Heat_cDNA_P Parameter: Timepoint (hr) Value: 2
  misc_feature: MA Experiment 20000112 PARAMETER Experiment Name: At_42deg_Heat_cDNA_P Parameter: Tissue Value: Aerial
  misc_feature: MA Experiment ID: 20000113 Result: Up-regulated in Transcription
  misc_feature: MA Experiment 20000113 PARAMETER Experiment Name: At_42deg_Heat_cDNA_P Parameter: Temperature (deg C) Value: 42 vs. 22
  misc_feature: MA Experiment 20000113 PARAMETER Experiment Name: At_42deg_Heat_cDNA_P Parameter: Timepoint (hr) Value: 8
  misc_feature: MA Experiment 20000113 PARAMETER Experiment Name: At_42deg_Heat_cDNA_P Parameter: Tissue Value: Aerial
  misc_feature: MA Experiment ID: 20000171 Result: Up-regulated in Transcription
  misc_feature: MA Experiment 20000171 PARAMETER Experiment Name: At_42deg_Heat_P Parameter: Age (day) Value: 14
  misc_feature: MA Experiment 20000171 PARAMETER Experiment Name: At_42deg_Heat_P Parameter: Organism Value: A. thaliana
  misc_feature: MA Experiment 20000171 PARAMETER Experiment Name: At_42deg_Heat_P Parameter: Plant Line Value: WS
  misc_feature: MA Experiment 20000171 PARAMETER Experiment Name: At_42deg_Heat_P Parameter: Temperature (deg C) Value: 42 vs. 22
  misc_feature: MA Experiment 20000171 PARAMETER Experiment Name: At_42deg_Heat_P Parameter: Timepoint (hr) Value: 1
  misc_feature: MA Experiment 20000171 PARAMETER Experiment Name: At_42deg_Heat_P Parameter: Tissue Value: Aerial
  misc_feature: MA Experiment ID: 20000173 Result: Up-regulated in Transcription
  misc_feature: MA Experiment 20000173 PARAMETER Experiment Name: At_42deg_Heat_P Parameter: Age (day) Value: 14
  misc_feature: MA Experiment 20000173 PARAMETER Experiment Name: At_42deg_Heat_P Parameter: Organism Value: A. thaliana
  misc_feature: MA Experiment 20000173 PARAMETER Experiment Name: At_42deg_Heat_P Parameter: Plant Line Value: WS
  misc_feature: MA Experiment 20000173 PARAMETER Experiment Name: At_42deg_Heat_P Parameter: Temperature (deg C) Value: 42 vs. 22
  misc_feature: MA Experiment 20000173 PARAMETER Experiment Name: At_42deg_Heat_P Parameter: Timepoint (hr) Value: 6
  misc_feature: MA Experiment 20000173 PARAMETER Experiment Name: At_42deg_Heat_P Parameter: Tissue Value: Aerial
  misc_feature: MA Experiment ID: 20000179 Result: Up-regulated in Transcription
  misc_feature: MA Experiment 20000179 PARAMETER Experiment Name: At_Germinating_Seeds_P Parameter: Age (hr) Value: 6 vs. 0
  misc_feature: MA Experiment 20000179 PARAMETER Experiment Name: At_Germinating_Seeds_P Parameter: Tissue Value: Germinating Seeds
  misc_feature: MA Experiment ID: 20000180 Result: Up-regulated in Transcription
  misc_feature: MA Experiment 20000180 PARAMETER Experiment Name: At_Germinating_Seeds_P Parameter: Age (hr) Value: 24 vs. 0
  misc_feature: MA Experiment 20000180 PARAMETER Experiment Name: At_Germinating_Seeds_P Parameter: Tissue Value: Germinating Seeds
  misc_feature: MA Experiment ID: 20000794 Result: Down-regulated in Transcription
  misc_feature: MA Experiment 20000794 PARAMETER Experiment Name: At_Petals_P Parameter: Age (day) Value: 23-25 days
  misc_feature: MA Experiment 20000794 PARAMETER Experiment Name: At_Petals_P Parameter: Plant Line Value: WS
  misc_feature: MA Experiment 20000794 PARAMETER Experiment Name: At_Petals_P Parameter: Tissue Value: Petals vs. Whole plant
  misc_feature: MA Experiment ID: 20001248 Result: Down-regulated in Transcription
  misc_feature: MA Experiment 20001248 PARAMETER Experiment Name: At_Far-red-induction_P Parameter: Age (day) Value: 7
  misc_feature: MA Experiment 20001248 PARAMETER Experiment Name: At_Far-red-induction_P Parameter: Light Value: Far-red vs. White
  misc_feature: MA Experiment 20001248 PARAMETER Experiment Name: At_Far-red-induction_P Parameter: Organism Value: A. thaliana
  misc_feature: MA Experiment 20001248 PARAMETER Experiment Name: At_Far-red-induction_P Parameter: Plant Line Value: Columbia
  misc_feature: MA Experiment 20001248 PARAMETER Experiment Name: At_Far-red-induction_P Parameter: Timepoint (hr) Value: 4
  misc_feature: MA Experiment 20001248 PARAMETER Experiment Name: At_Far-red-induction_P Parameter: Tissue Value: Whole Plant
  misc_feature: MA Experiment ID: 20001450 Result: Down-regulated in Transcription
  misc_feature: MA Experiment 20001450 PARAMETER Experiment Name: At_Far-red-induction_P Parameter: Age (day) Value: 7
  misc_feature: MA Experiment 20001450 PARAMETER Experiment Name: At_Far-red-induction_P Parameter: Light Value: Far-red vs. White
  misc_feature: MA Experiment 20001450 PARAMETER Experiment Name: At_Far-red-induction_P Parameter: Organism Value: A. thaliana
  misc_feature: MA Experiment 20001450 PARAMETER Experiment Name: At_Far-red-induction_P Parameter: Plant Line Value: Columbia
  misc_feature: MA Experiment 20001450 PARAMETER Experiment Name: At_Far-red-induction_P Parameter: Timepoint (hr) Value: 8
  misc_feature: MA Experiment 20001450 PARAMETER Experiment Name: At_Far-red-induction_P Parameter: Tissue Value: Whole Plant
aaaagcacgaggaaggatcaaatcggaaacttaacagaatttagctaccaattactgtctccggcgagatctcaatttgatccttcacggtggcgtcgacgtccgggcaacaacaagctctctcgagaagaaagccattatcatcatcatcatcatcttcatcatctcctcctccgtcttcctcacctgttcgagctcctgcggcgaagaaaccgagtccggaatacccattttggcagcagaactggtttatcggtctgctattcgtgatggctttaggattcttctgtctcgctatcttcctttacctaagtctcgatcctgattccggttacacgtctgcctccgccgctgcttctggtaaagaaggtgtcgagattacttatggaagtgcgatcaagttgatgcacgagaaaactaaatttcgattacattctcacgatgtgccgtatggatccggcagtggtcagcaatcagtcactggttttccaggcgtcgttgattccaacagctattggattgttaaacctgtgcctgggacaacagaaaagcaaggtgatgctgtcaagagtggagcaaccattaggttgcagcatatgaagaccagaaaatggcttcacagtcacttgcatgcatctcctatatcagggaacttagaggttagctgctttggagatgatacaaattccgatactggggatcactggaagcttataattgaaggaagtgggaagacatggaaacaggaccaaagagtccgtcttcaacacatagacactagtggctacctccatagccatgacaagaagtaccaacgtatagctggtggtcagcaagaggtgtgtggaattcgggagaagaaggcggataacatttggttggcagcagaaggagtctaccttccccttaatgagagcagcaagtaaggttaagagtgaaaaaacttctctggaggactttgaatcttatctcttactctctaaactcacaatcaagaaaatagagatatatatttcttaattttcgattggtaatacttttagtggcacgaatatatcttgttttggtagatattctgcatttatctcttttttaggtcacccttaagagacactatcttattatcc

SEQ ID NO: 104696 - protein, 218 aa, Arabidopsis thaliana; identical to SEQ ID NO: 25607
  peptide (1)..(218): Ceres Seq. ID no. 13615596
  misc_feature (96)..(151): Pfam Name: MIR domain Pfam Description: MIR domain
  misc_feature (1)..(218): Homolog of NCBI NO: 18400721 NR Description: expressed protein [Arabidopsis thaliana]
  misc_feature (1)..(218): Homolog of NCBI NO: 21593658 NR Description: unknown [Arabidopsis thaliana]
  misc_feature (46)..(218): Homolog of NCBI NO: 25412278 NR Description: hypothetical protein At2g25110 [imported] -
  misc_feature (24)..(217): Homolog of NCBI NO: 24644197 NR Description: CG11999-PA [Drosophila melanogaster]
  misc_feature (37)..(218): Homolog of NCBI NO: 29840881 NR Description: similar to GenBank Accession Number AE003603
  misc_feature (37)..(217): Homolog of NCBI NO: 31241809 NR Description: ENSANGP00000013320 [Anopheles gambiae]
  misc_feature (26)..(218): Homolog of NCBI NO: 14141195 NR Description: stromal cell-derived factor 2 precursor [Homo
  misc_feature (26)..(218): Homolog of NCBI NO: 30584855 NR Description: Homo sapiens stromal cell-derived factor 2
  misc_feature (26)..(215): Homolog of NCBI NO: 26344334 NR Description: unnamed protein product [Mus musculus]
  misc_feature (30)..(217): Homolog of NCBI NO: 30582727 NR Description: dihydropyrimidinase-like 2 [Homo sapiens]

SEQ ID NO: 104697 - protein, 173 aa, Arabidopsis thaliana; identical to SEQ ID NO: 25608
  peptide (1)..(173): Ceres Seq. ID no. 13615597
  misc_feature (51)..(106): Pfam Name: MIR domain Pfam Description: MIR domain
  misc_feature (1)..(173): Homolog of NCBI NO: 18400721 NR Description: expressed protein [Arabidopsis thaliana]
  misc_feature (1)..(173): Homolog of NCBI NO: 21593658 NR Description: unknown [Arabidopsis thaliana]
  misc_feature (1)..(173): Homolog of NCBI NO: 25412278 NR Description: hypothetical protein At2g25110 [imported] -
  misc_feature (1)..(172): Homolog of NCBI NO: 24644197 NR Description: CG11999-PA [Drosophila melanogaster]
  misc_feature (1)..(173): Homolog of NCBI NO: 29840881 NR Description: similar to GenBank Accession Number AE003603
  misc_feature (1)..(172): Homolog of NCBI NO: 31241809 NR Description: ENSANGP00000013320 [Anopheles gambiae]
  misc_feature (1)..(173): Homolog of NCBI NO: 14141195 NR Description: stromal cell-derived factor 2 precursor [Homo
  misc_feature (1)..(173): Homolog of NCBI NO: 30584855 NR Description: Homo sapiens stromal cell-derived factor 2
  misc_feature (1)..(170): Homolog of NCBI NO: 26344334 NR Description: unnamed protein product [Mus musculus]
  misc_feature (1)..(172): Homolog of NCBI NO: 30582727 NR Description: dihydropyrimidinase-like 2 [Homo sapiens]

SEQ ID NO: 104698 - protein, 109 aa, Arabidopsis thaliana; identical to SEQ ID NO: 25609
  peptide (1)..(109): Ceres Seq. ID no. 13615598
  misc_feature (1)..(42): Pfam Name: MIR domain Pfam Description: MIR domain
  misc_feature (1)..(109): Homolog of NCBI NO: 18400721 NR Description: expressed protein [Arabidopsis thaliana]
  misc_feature (1)..(109): Homolog of NCBI NO: 21593658 NR Description: unknown [Arabidopsis thaliana]
  misc_feature (1)..(109): Homolog of NCBI NO: 25412278 NR Description: hypothetical protein At2g25110 [imported] -
  misc_feature (1)..(108): Homolog of NCBI NO: 24644197 NR Description: CG11999-PA [Drosophila melanogaster]
  misc_feature (1)..(109): Homolog of NCBI NO: 29840881 NR Description: similar to GenBank Accession Number AE003603
  misc_feature (1)..(108): Homolog of NCBI NO: 31241809 NR Description: ENSANGP00000013320 [Anopheles gambiae]
  misc_feature (1)..(109): Homolog of NCBI NO: 14141195 NR Description: stromal cell-derived factor 2 precursor [Homo
  misc_feature (1)..(109): Homolog of NCBI NO: 30584855 NR Description: Homo sapiens stromal cell-derived factor 2
  misc_feature (1)..(106): Homolog of NCBI NO: 26344334 NR Description: unnamed protein product [Mus musculus]
  misc_feature (1)..(108): Homolog of NCBI NO: 30582727 NR Description: dihydropyrimidinase-like 2 [Homo sapiens]

SEQ ID NO: 104699 - DNA, 1632 bp, Arabidopsis thaliana
  misc_feature (1)..(1632): Ceres Seq. ID no. 13615615
  misc_feature: MA Experiment ID: 108461 Result: Up-regulated in Transcription
  misc_feature: MA Experiment 108461 PARAMETER Experiment Name: At_Germinating_Seeds_cDNA_P Parameter: Age (day) Value: 1 vs. 0
  misc_feature: MA Experiment 108461 PARAMETER Experiment Name: At_Germinating_Seeds_cDNA_P Parameter: Tissue Value: Germinating Seeds
  misc_feature: MA Experiment ID: 108573 Result: Up-regulated in Transcription
  misc_feature: MA Experiment 108573 PARAMETER Experiment Name: At_Drought_cDNA_P Parameter: Timepoint (hr) Value: 6
  misc_feature: MA Experiment 108573 PARAMETER Experiment Name: At_Drought_cDNA_P Parameter: Tissue Value: Aerial
  misc_feature: MA Experiment 108573 PARAMETER Experiment Name: At_Drought_cDNA_P Parameter: Treatment Value: Drought vs. No Drought
  misc_feature: MA Experiment ID: 108595 Result: Down-regulated in Transcription
  misc_feature: MA Experiment 108595 PARAMETER Experiment Name: At_Ler-pi_Ovule_cDNA_P Parameter: Plant Line Value: null
  misc_feature: MA Experiment ID: 108608 Result: Down-regulated in Transcription
  misc_feature: MA Experiment 108608 PARAMETER Experiment Name: At_100uM_ABA_cDNA_P Parameter: Timepoint (hr) Value: 1
  misc_feature: MA Experiment 108608 PARAMETER Experiment Name: At_100uM_ABA_cDNA_P Parameter: Tissue Value: Aerial
  misc_feature: MA Experiment 108608 PARAMETER Experiment Name: At_100uM_ABA_cDNA_P Parameter: Treatment Value: 100uM ABA vs. No Treatment
  misc_feature: MA Experiment ID: 20000069 Result: Up-regulated in Transcription
  misc_feature: MA Experiment 20000069 PARAMETER Experiment Name: At_100uM_ABA_Mutants_cDNA_P Parameter: Plant Line Value: CS23
  misc_feature: MA Experiment 20000069 PARAMETER Experiment Name: At_100uM_ABA_Mutants_cDNA_P Parameter: Timepoint (hr) Value: 6
  misc_feature: MA Experiment 20000069 PARAMETER Experiment Name: At_100uM_ABA_Mutants_cDNA_P Parameter: Tissue Value: Aerial
  misc_feature: MA Experiment 20000069 PARAMETER Experiment Name: At_100uM_ABA_Mutants_cDNA_P Parameter: Treatment Value: 100uM ABA vs. No Treatment
  misc_feature: MA Experiment ID: 20000087 Result: Up-regulated in Transcription
  misc_feature: MA Experiment 20000087 PARAMETER Experiment Name: At_100uM_ABA_Mutants_cDNA_P Parameter: Plant Line Value: WS
  misc_feature: MA Experiment 20000087 PARAMETER Experiment Name: At_100uM_ABA_Mutants_cDNA_P Parameter: Timepoint (hr) Value: 6
  misc_feature: MA Experiment 20000087 PARAMETER Experiment Name: At_100uM_ABA_Mutants_cDNA_P Parameter: Tissue Value: Aerial
  misc_feature: MA Experiment 20000087 PARAMETER Experiment Name: At_100uM_ABA_Mutants_cDNA_P Parameter: Treatment Value: 100uM ABA vs. No Treatment
  misc_feature: MA Experiment ID: 20000089 Result: Up-regulated in Transcription
  misc_feature: MA Experiment ID: 20000090 Result: Up-regulated in Transcription
  misc_feature: MA Experiment ID: 20000112 Result: Down-regulated in Transcription
  misc_feature: MA Experiment 20000112 PARAMETER Experiment Name: At_42deg_Heat_cDNA_P Parameter: Temperature (deg C) Value: 42 vs. 22
  misc_feature: MA Experiment 20000112 PARAMETER Experiment Name: At_42deg_Heat_cDNA_P Parameter: Timepoint (hr) Value: 2
  misc_feature: MA Experiment 20000112 PARAMETER Experiment Name: At_42deg_Heat_cDNA_P Parameter: Tissue Value: Aerial
  misc_feature: MA Experiment ID: 20000117 Result: Up-regulated in Transcription
  misc_feature: MA Experiment 20000117 PARAMETER Experiment Name: At_100uM_ABA_Mutants_cDNA_P Parameter: Plant Line Value: Columbia
  misc_feature: MA Experiment 20000117 PARAMETER Experiment Name: At_100uM_ABA_Mutants_cDNA_P Parameter: Timepoint (hr) Value: 6
  misc_feature: MA Experiment 20000117 PARAMETER Experiment Name: At_100uM_ABA_Mutants_cDNA_P Parameter: Tissue Value: Aerial
  misc_feature: MA Experiment 20000117 PARAMETER Experiment Name: At_100uM_ABA_Mutants_cDNA_P Parameter: Treatment Value: 100uM ABA vs. No Treatment
gttaaaagctctcacacaaccaccgttctccgtcacggtggcgctttattctctcatcggagcgcctcaccggtggcagacggtgtcgttgttcctctcctaaaacctccatcaatcaccatctctttacacagagctctaaccaaaatcttcgagagatggggcagagtatgagctgtggaagtcgaccggagcacggaatattcgcctctgtacagtgcggcgatatcatcactatccgtcgtgtgatggcgacggagcctagtctgttgaatcaaactactccttatgatcgtcactctgttcttcatgtcgctgctgctaatggtcagatcgagattttgtcattgcttttggaacgatttacgaatccagatttgttgaatcgtcacaagcagactccgttaatgttggctgcgatgtatggaagaatctcttgtgtgaagaagctagctgaagttggagctaatattttgatgtttgattctgtgaatcgaagaacatgtttgcattacgctgcttattatggacatgctaattgtgttcaagctattctctctgctgctcaatcaagtcctgttgctgtccattggggatatgcgagatttgtgaacataagagatgataaaggagcgactccgttgcatttagctgctcgacagagacgacctgaatgtgtgaatgttttgttggatagtggttctcttgtttgtgcatctactagtgtatatggttctccaggaagcacacctcttcatttagcagctagaagtggatctatagattgtgtcagaaagttgcttgcttggggtgctgatcgtcttcaacgagacgcttctgggagaataccttatgtggttgcgatgaagcataagcatggagcatgtggagccttacttaatccgtcctctgcagagccacttgtttggccatcaccattaaagttcatcagtgagcttaatgacgaggcgaaacttctcttagagcaggctttaatggaggctaacagggagagagagaaaaccatcctcaaaggaacagcttattccttaccatcaccctctttctctgacacggatgataacatgtccgaggtgagtgatacggaactgtgctgcatttgctttgagcaagtatgtacaattgaagttaaagactgtggtcaccaaatgtgtgcacaatgcacacttgcactgtgctgtcacaacaaaccaaacccaacgacctcaaccgtgactccaccggtctgtccgttctgtagaagcaccattgcatgtttagtcgtcgcccagaacaacaacaacaacaacgaaaagagcaaaagcctagatgatgttgttgttgttgatcgtgaggcaggtgatgttagctcctccaaattcagaaaacatagaagatcaataaaccttggcgaagaaagcagcagcttcatgggactatcaactattggatcattcggtaggataaccggccgtggctcgggaaggatcgcagccgaaaacgagctgatggacaaaccaatattgtgagggatcgattccgttttaagggacattttggggcatgggggagcaataaaaaagatgaggggatgaaattgtgagaatgtataaaatatagatgaatttatgt

SEQ ID NO: 104700 - protein, 456 aa, Arabidopsis thaliana; identical to SEQ ID NO: 21329
  peptide (1)..(456): Ceres Seq. ID no. 13615616
  misc_feature (112)..(145): Pfam Name: Ankyrin repeat Pfam Description: Ankyrin repeat
  misc_feature (1)..(456): Homolog of NCBI NO: 30684032 NR Description: RING zinc finger ankyrin protein -related thaliana] >gi|14596109|gb|AAK68782.1| putative RING zinc finger protein [Arabidopsis thaliana] >gi|20148259|gb|AAM10020.1|
  misc_feature (31)..(456): Homolog of NCBI NO: 25408016 NR Description: probable RING zinc finger ankyrin protein - Arabidopsis thaliana >gi|3927831|gb|AAC79588.1| putative RING finger ankyrin protein [Arabidopsis thaliana]
  misc_feature (1)..(454): Homolog of NCBI NO: 14279688 NR Description: receptor-like kinase Xa21-binding protein 3
  misc_feature (1)..(389): Homolog of NCBI NO: 34906062 NR Description: putative receptor-like kinase Xa21-binding
  misc_feature (1)..(216): Homolog of NCBI NO: 16226319 NR Description: At2g28840/F8N16.13 [Arabidopsis thaliana]
  misc_feature (279)..(454): Homolog of NCBI NO: 25044835 NR Description: RING zinc finger protein [Ananas comosus]
  misc_feature (125)..(429): Homolog of NCBI NO: 37573164 NR Description: receptor-like kinase Xa21-binding protein 3-like
  misc_feature (1)..(134): Homolog of NCBI NO: 37573164 NR Description: receptor-like kinase Xa21-binding protein 3-like
  misc_feature (1)..(207): Homolog of NCBI NO: 15240746 NR Description: expressed protein [Arabidopsis thaliana]
  misc_feature (315)..(371): Homolog of NCBI NO: 15240746 NR Description: expressed protein [Arabidopsis thaliana]

SEQ ID NO: 104701 - protein, 452 aa, Arabidopsis thaliana; identical to SEQ ID NO: 21330
  peptide (1)..(452): Ceres Seq. ID no. 13615617
  misc_feature (108)..(141): Pfam Name: Ankyrin repeat Pfam Description: Ankyrin repeat
  misc_feature (1)..(452): Homolog of NCBI NO: 30684032 NR Description: RING zinc finger ankyrin protein -related thaliana] >gi|14596109|gb|AAK68782.1| putative RING zinc finger protein [Arabidopsis thaliana] >gi|20148259|gb|AAM10020.1|
  misc_feature (27)..(452): Homolog of NCBI NO: 25408016 NR Description: probable RING zinc finger ankyrin protein - Arabidopsis thaliana >gi|3927831|gb|AAC79588.1| putative RING finger ankyrin protein [Arabidopsis thaliana]
  misc_feature (1)..(450): Homolog of NCBI NO: 14279688 NR Description: receptor-like kinase Xa21-binding protein 3
  misc_feature (1)..(385): Homolog of NCBI NO: 34906062 NR Description: putative receptor-like kinase Xa21-binding
  misc_feature (1)..(212): Homolog of NCBI NO: 16226319 NR Description: At2g28840/F8N16.13 [Arabidopsis thaliana]
  misc_feature (275)..(450): Homolog of NCBI NO: 25044835 NR Description: RING zinc finger protein [Ananas comosus]
  misc_feature (121)..(425): Homolog of NCBI NO: 37573164 NR Description: receptor-like kinase Xa21-binding protein 3-like
  misc_feature (1)..(130): Homolog of NCBI NO: 37573164 NR Description: receptor-like kinase Xa21-binding protein 3-like
  misc_feature (1)..(203): Homolog of NCBI NO: 15240746 NR Description: expressed protein [Arabidopsis thaliana]
  misc_feature (311)..(367): Homolog of NCBI NO: 15240746 NR Description: expressed protein [Arabidopsis thaliana]

SEQ ID NO: 104702 - protein, 426 aa, Arabidopsis thaliana; identical to SEQ ID NO: 21331
  peptide (1)..(426): Ceres Seq. ID no. 13615618
  misc_feature (82)..(115): Pfam Name: Ankyrin repeat Pfam Description: Ankyrin repeat
  misc_feature (1)..(426): Homolog of NCBI NO: 30684032 NR Description: RING zinc finger ankyrin protein -related thaliana] >gi|14596109|gb|AAK68782.1| putative RING zinc finger protein [Arabidopsis thaliana] >gi|20148259|gb|AAM10020.1|
  misc_feature (1)..(426): Homolog of NCBI NO: 25408016 NR Description: probable RING zinc finger ankyrin protein - Arabidopsis thaliana >gi|3927831|gb|AAC79588.1| putative RING finger ankyrin protein [Arabidopsis thaliana]
  misc_feature (1)..(424): Homolog of NCBI NO: 14279688 NR Description: receptor-like kinase Xa21-binding protein 3
  misc_feature (1)..(359): Homolog of NCBI NO: 34906062 NR Description: putative receptor-like kinase Xa21-binding
  misc_feature (1)..(186): Homolog of NCBI NO: 16226319 NR Description: At2g28840/F8N16.13 [Arabidopsis thaliana]
  misc_feature (249)..(424): Homolog of NCBI NO: 25044835 NR Description: RING zinc finger protein [Ananas comosus]
  misc_feature (95)..(399): Homolog of NCBI NO: 37573164 NR Description: receptor-like kinase Xa21-binding protein 3-like
  misc_feature (1)..(104): Homolog of NCBI NO: 37573164 NR Description: receptor-like kinase Xa21-binding protein 3-like
  misc_feature (1)..(177): Homolog of NCBI NO: 15240746 NR Description: expressed protein [Arabidopsis thaliana]
  misc_feature (285)..(341): Homolog of NCBI NO: 15240746 NR Description: expressed protein [Arabidopsis thaliana]

SEQ ID NO: 104703 - DNA, 689 bp, Arabidopsis thaliana
  misc_feature (1)..(689): Ceres Seq. ID no. 13615619
  misc_feature: MA Experiment ID: 108434 Result: Down-regulated in Transcription
  misc_feature: MA Experiment 108434 PARAMETER Experiment Name: At_Root_Tips_cDNA_P Parameter: Tissue Value: Root Tips
  misc_feature: MA Experiment ID: 108435 Result: Down-regulated in Transcription
  misc_feature: MA Experiment 108435 PARAMETER Experiment Name: At_stm_Mutants_cDNA_P Parameter: Plant Line Value: wt Landsburg vs stm
  misc_feature: MA Experiment 108435 PARAMETER Experiment Name: At_stm_Mutants_cDNA_P Parameter: Tissue Value: Shoot Apical Meristem Region
  misc_feature: MA Experiment ID: 108462 Result: Up-regulated in Transcription
  misc_feature: MA Experiment 108462 PARAMETER Experiment Name: At_Germinating_Seeds_cDNA_P Parameter: Age (day) Value: 2 vs. 0
  misc_feature: MA Experiment 108462 PARAMETER Experiment Name: At_Germinating_Seeds_cDNA_P Parameter: Tissue Value: Germinating Seeds
  misc_feature: MA Experiment ID: 108469 Result: Down-regulated in Transcription
  misc_feature: MA Experiment ID: 108489 Result: Down-regulated in Transcription
  misc_feature: MA Experiment ID: 108572 Result: Down-regulated in Transcription
  misc_feature: MA Experiment 108572 PARAMETER Experiment Name: At_Drought_cDNA_P Parameter: Timepoint (hr) Value: 1
  misc_feature: MA Experiment 108572 PARAMETER Experiment Name: At_Drought_cDNA_P Parameter: Tissue Value: Aerial
  misc_feature: MA Experiment 108572 PARAMETER Experiment Name: At_Drought_cDNA_P Parameter: Treatment Value: Drought vs. No Drought
  misc_feature: MA Experiment ID: 108573 Result: Down-regulated in Transcription
  misc_feature: MA Experiment 108573 PARAMETER Experiment Name: At_Drought_cDNA_P Parameter: Timepoint (hr) Value: 6
  misc_feature: MA Experiment 108573 PARAMETER Experiment Name: At_Drought_cDNA_P Parameter: Tissue Value: Aerial
  misc_feature: MA Experiment 108573 PARAMETER Experiment Name: At_Drought_cDNA_P Parameter: Treatment Value: Drought vs. No Drought
  misc_feature: MA Experiment ID: 108577 Result: Down-regulated in Transcription
  misc_feature: MA Experiment 108577 PARAMETER Experiment Name: At_42deg_Heat_cDNA_P Parameter: Temperature (deg C) Value: 42 vs. 22
  misc_feature: MA Experiment 108577 PARAMETER Experiment Name: At_42deg_Heat_cDNA_P Parameter: Timepoint (hr) Value: 6
  misc_feature: MA Experiment 108577 PARAMETER Experiment Name: At_42deg_Heat_cDNA_P Parameter: Tissue Value: Aerial
  misc_feature: MA Experiment ID: 108579 Result: Up-regulated in Transcription
  misc_feature: MA Experiment 108579 PARAMETER Experiment Name: At_4deg_Cold_cDNA_P Parameter: Temperature (deg C) Value: 4 vs. 22
  misc_feature: MA Experiment 108579 PARAMETER Experiment Name: At_4deg_Cold_cDNA_P Parameter: Timepoint (hr) Value: 6
  misc_feature: MA Experiment 108579 PARAMETER Experiment Name: At_4deg_Cold_cDNA_P Parameter: Tissue Value: Aerial
  misc_feature: MA Experiment ID: 108605 Result: Down-regulated in Transcription
  misc_feature: MA Experiment 108605 PARAMETER Experiment Name: At_100uM_ABA_cDNA_P Parameter: Timepoint (hr) Value: 6
  misc_feature: MA Experiment 108605 PARAMETER Experiment Name: At_100uM_ABA_cDNA_P Parameter: Tissue Value: Aerial
  misc_feature: MA Experiment 108605 PARAMETER Experiment Name: At_100uM_ABA_cDNA_P Parameter: Treatment Value: 100uM ABA vs. No Treatment
  misc_feature: MA Experiment ID: 108668 Result: Down-regulated in Transcription
  misc_feature: MA Experiment 108668 PARAMETER Experiment Name: At_2mM_SA_cDNA_P Parameter: Plant Line Value: WS
  misc_feature: MA Experiment 108668 PARAMETER Experiment Name: At_2mM_SA_cDNA_P Parameter: Timepoint (hr) Value: 6
  misc_feature: MA Experiment 108668 PARAMETER Experiment Name: At_2mM_SA_cDNA_P Parameter: Treatment Value: 2mM SA vs. No Treatment
  misc_feature: MA Experiment ID: 20000069 Result: Up-regulated in Transcription
  misc_feature: MA Experiment 20000069 PARAMETER Experiment Name: At_100uM_ABA_Mutants_cDNA_P Parameter: Plant Line Value: CS23
  misc_feature: MA Experiment 20000069 PARAMETER Experiment Name: At_100uM_ABA_Mutants_cDNA_P Parameter: Timepoint (hr) Value: 6
  misc_feature: MA Experiment 20000069 PARAMETER Experiment Name: At_100uM_ABA_Mutants_cDNA_P Parameter: Tissue Value: Aerial
  misc_feature: MA Experiment 20000069 PARAMETER Experiment Name: At_100uM_ABA_Mutants_cDNA_P Parameter: Treatment Value: 100uM ABA vs. No Treatment
  misc_feature: MA Experiment ID: 20000070 Result: Up-regulated in Transcription
  misc_feature: MA Experiment 20000070 PARAMETER Experiment Name: At_100uM_ABA_Mutants_cDNA_P Parameter: Plant Line Value: CS24
  misc_feature: MA Experiment 20000070 PARAMETER Experiment Name: At_100uM_ABA_Mutants_cDNA_P Parameter: Timepoint (hr) Value: 6
  misc_feature: MA Experiment 20000070 PARAMETER Experiment Name: At_100uM_ABA_Mutants_cDNA_P Parameter: Tissue Value: Aerial
  misc_feature: MA Experiment 20000070 PARAMETER Experiment Name: At_100uM_ABA_Mutants_cDNA_P Parameter: Treatment Value: 100uM ABA vs. No Treatment
  misc_feature: MA Experiment ID: 20000071 Result: Up-regulated in Transcription
  misc_feature: MA Experiment 20000071 PARAMETER Experiment Name: At_100uM_ABA_Mutants_cDNA_P Parameter: Plant Line Value: CS8104
  misc_feature: MA Experiment 20000071 PARAMETER Experiment Name: At_100uM_ABA_Mutants_cDNA_P Parameter: Timepoint (hr) Value: 6
  misc_feature: MA Experiment 20000071 PARAMETER Experiment Name: At_100uM_ABA_Mutants_cDNA_P Parameter: Tissue Value: Aerial
  misc_feature: MA Experiment 20000071 PARAMETER Experiment Name: At_100uM_ABA_Mutants_cDNA_P Parameter: Treatment Value: 100uM ABA vs. No Treatment
  misc_feature: MA Experiment ID: 20000072 Result: Up-regulated in Transcription
  misc_feature: MA Experiment 20000072 PARAMETER Experiment Name: At_100uM_ABA_Mutants_cDNA_P Parameter: Plant Line Value: CS8105
  misc_feature: MA Experiment 20000072 PARAMETER Experiment Name: At_100uM_ABA_Mutants_cDNA_P Parameter: Timepoint (hr) Value: 6
  misc_feature: MA Experiment 20000072 PARAMETER Experiment Name: At_100uM_ABA_Mutants_cDNA_P Parameter: Tissue Value: Aerial
  misc_feature: MA Experiment 20000072 PARAMETER Experiment Name: At_100uM_ABA_Mutants_cDNA_P Parameter: Treatment Value: 100uM ABA vs. No Treatment
  misc_feature: MA Experiment ID: 20000086 Result: Up-regulated in Transcription
  misc_feature: MA Experiment 20000086 PARAMETER Experiment Name: At_100uM_ABA_Mutants_cDNA_P Parameter: Plant Line Value: CS22
  misc_feature: MA Experiment 20000086 PARAMETER Experiment Name: At_100uM_ABA_Mutants_cDNA_P Parameter: Timepoint (hr) Value: 6
  misc_feature: MA Experiment 20000086 PARAMETER Experiment Name: At_100uM_ABA_Mutants_cDNA_P Parameter: Tissue Value: Aerial
  misc_feature: MA Experiment 20000086 PARAMETER Experiment Name: At_100uM_ABA_Mutants_cDNA_P Parameter: Treatment Value: 100uM ABA vs. No Treatment
  misc_feature: MA Experiment ID: 20000087 Result: Up-regulated in Transcription
  misc_feature: MA Experiment 20000087 PARAMETER Experiment Name: At_100uM_ABA_Mutants_cDNA_P Parameter: Plant Line Value: WS
  misc_feature: MA Experiment 20000087 PARAMETER Experiment Name: At_100uM_ABA_Mutants_cDNA_P Parameter: Timepoint (hr) Value: 6
  misc_feature: MA Experiment 20000087 PARAMETER Experiment Name: At_100uM_ABA_Mutants_cDNA_P Parameter: Tissue Value: Aerial
  misc_feature: MA Experiment 20000087 PARAMETER Experiment Name: At_100uM_ABA_Mutants_cDNA_P Parameter: Treatment Value: 100uM ABA vs. No Treatment
  misc_feature: MA Experiment ID: 20000089 Result: Up-regulated in Transcription
  misc_feature: MA Experiment ID: 20000090 Result: Up-regulated in Transcription
  misc_feature: MA Experiment ID: 20000111 Result: Down-regulated in Transcription
  misc_feature: MA Experiment 20000111 PARAMETER Experiment Name: At_42deg_Heat_cDNA_P Parameter: Temperature (deg C) Value: 42 vs. 22
  misc_feature: MA Experiment 20000111 PARAMETER Experiment Name: At_42deg_Heat_cDNA_P Parameter: Timepoint (hr) Value: 6
  misc_feature: MA Experiment 20000111 PARAMETER Experiment Name: At_42deg_Heat_cDNA_P Parameter: Tissue Value: Aerial
  misc_feature: MA Experiment ID: 20000112 Result: Down-regulated in Transcription
  misc_feature: MA Experiment 20000112 PARAMETER Experiment Name: At_42deg_Heat_cDNA_P Parameter: Temperature (deg C) Value: 42 vs. 22
  misc_feature: MA Experiment 20000112 PARAMETER Experiment Name: At_42deg_Heat_cDNA_P Parameter: Timepoint (hr) Value: 2
  misc_feature: MA Experiment 20000112 PARAMETER Experiment Name: At_42deg_Heat_cDNA_P Parameter: Tissue Value: Aerial
  misc_feature: MA Experiment ID: 20000113 Result: Down-regulated in Transcription
  misc_feature: MA Experiment 20000113 PARAMETER Experiment Name: At_42deg_Heat_cDNA_P Parameter: Temperature (deg C) Value: 42 vs. 22
  misc_feature: MA Experiment 20000113 PARAMETER Experiment Name: At_42deg_Heat_cDNA_P Parameter: Timepoint (hr) Value: 8
  misc_feature: MA Experiment 20000113 PARAMETER Experiment Name: At_42deg_Heat_cDNA_P Parameter: Tissue Value: Aerial
  misc_feature: MA Experiment ID: 20000117 Result: Up-regulated in Transcription
  misc_feature: MA Experiment 20000117 PARAMETER Experiment Name: At_100uM_ABA_Mutants_cDNA_P Parameter: Plant Line Value: Columbia
  misc_feature: MA Experiment 20000117 PARAMETER Experiment Name: At_100uM_ABA_Mutants_cDNA_P Parameter: Timepoint (hr) Value: 6
  misc_feature: MA Experiment 20000117 PARAMETER Experiment Name: At_100uM_ABA_Mutants_cDNA_P Parameter: Tissue Value: Aerial
  misc_feature: MA Experiment 20000117 PARAMETER Experiment Name: At_100uM_ABA_Mutants_cDNA_P Parameter: Treatment Value: 100uM ABA vs. No Treatment
  misc_feature: MA Experiment ID: 20000166 Result: Up-regulated in Transcription
  misc_feature: MA Experiment 20000166 PARAMETER Experiment Name: At_100uM_ABA_P Parameter: Age (day) Value: 14
  misc_feature: MA Experiment 20000166 PARAMETER Experiment Name: At_100uM_ABA_P Parameter: Organism Value: A. thaliana
  misc_feature: MA Experiment 20000166 PARAMETER Experiment Name: At_100uM_ABA_P Parameter: Plant Line Value: WS
  misc_feature: MA Experiment 20000166 PARAMETER Experiment Name: At_100uM_ABA_P Parameter: Timepoint (hr) Value: 1
  misc_feature: MA Experiment 20000166 PARAMETER Experiment Name: At_100uM_ABA_P Parameter: Tissue Value: Aerial
  misc_feature: MA Experiment 20000166 PARAMETER Experiment Name: At_100uM_ABA_P Parameter: Treatment Value: 100uM ABA vs. No Treatment
  misc_feature: MA Experiment ID: 20000173 Result: Down-regulated in Transcription
  misc_feature: MA Experiment 20000173 PARAMETER Experiment Name: At_42deg_Heat_P Parameter: Age (day) Value: 14
  misc_feature: MA Experiment 20000173 PARAMETER Experiment Name: At_42deg_Heat_P Parameter: Organism Value: A. thaliana
  misc_feature: MA Experiment 20000173 PARAMETER Experiment Name: At_42deg_Heat_P Parameter: Plant Line Value: WS
  misc_feature: MA Experiment 20000173 PARAMETER Experiment Name: At_42deg_Heat_P Parameter: Temperature (deg C) Value: 42 vs. 22
  misc_feature: MA Experiment 20000173 PARAMETER Experiment Name: At_42deg_Heat_P Parameter: Timepoint (hr) Value: 6
  misc_feature: MA Experiment 20000173 PARAMETER Experiment Name: At_42deg_Heat_P Parameter: Tissue Value: Aerial
  misc_feature: MA Experiment ID: 20000182 Result: Down-regulated in Transcription
  misc_feature: MA Experiment 20000182 PARAMETER Experiment Name: At_2mM_SA_P Parameter: Age (day) Value: 14
  misc_feature: MA Experiment 20000182 PARAMETER Experiment Name: At_2mM_SA_P Parameter: Organism Value: A. thaliana
  misc_feature: MA Experiment 20000182 PARAMETER Experiment Name: At_2mM_SA_P Parameter: Plant Line Value: WS
  misc_feature: MA Experiment 20000182 PARAMETER Experiment Name: At_2mM_SA_P Parameter: Timepoint (hr) Value: 6
  misc_feature: MA Experiment 20000182 PARAMETER Experiment Name: At_2mM_SA_P Parameter: Tissue Value: Aerial
  misc_feature: MA Experiment 20000182 PARAMETER Experiment Name: At_2mM_SA_P Parameter: Treatment Value: 2mM SA vs. No Treatment
  misc_feature: MA Experiment ID: 20000184 Result: Down-regulated in Transcription
  misc_feature: MA Experiment 20000184 PARAMETER Experiment Name: At_Shoots__P Parameter: Age (day) Value: 7
  misc_feature: MA Experiment 20000184 PARAMETER Experiment Name: At_Shoots__P Parameter: Tissue Value: Shoots vs. Whole Plant
  misc_feature: MA Experiment ID: 20000185 Result: Down-regulated in Transcription
  misc_feature: MA Experiment 20000185 PARAMETER Experiment Name: At_Roots__P Parameter: Age (day) Value: 7 vs. 21
  misc_feature: MA Experiment 20000185 PARAMETER Experiment Name: At_Roots__P Parameter: Organism Value: A. thaliana
  misc_feature: MA Experiment 20000185 PARAMETER Experiment Name: At_Roots__P Parameter: Tissue Value: Roots vs. Whole Plant
  misc_feature: MA Experiment ID: 20000224 Result: Up-regulated in Transcription
  misc_feature: MA Experiment ID: 20000234 Result: Up-regulated in Transcription
  misc_feature: MA Experiment 20000234 PARAMETER Experiment Name: At_Siliques_P Parameter: Age (day) Value: 21
  misc_feature: MA Experiment 20000234 PARAMETER Experiment Name: At_Siliques_P Parameter: Organism Value: A. thaliana
  misc_feature: MA Experiment 20000234 PARAMETER Experiment Name: At_Siliques_P Parameter: Plant Line Value: WS
  misc_feature: MA Experiment 20000234 PARAMETER Experiment Name: At_Siliques_P Parameter: Tissue Value: Less Than 5mm Siliques vs. Whole Plant
  misc_feature: MA Experiment ID: 20000235 Result: Up-regulated in Transcription
  misc_feature: MA Experiment 20000235 PARAMETER Experiment Name: At_Siliques_P Parameter: Age (day) Value: 21
  misc_feature: MA Experiment 20000235 PARAMETER Experiment Name: At_Siliques_P Parameter: Organism Value: A. thaliana
  misc_feature: MA Experiment 20000235 PARAMETER Experiment Name: At_Siliques_P Parameter: Plant Line Value: WS
  misc_feature: MA Experiment 20000235 PARAMETER Experiment Name: At_Siliques_P Parameter: Tissue Value: 5-10mm Siliques vs. Whole Plant
  misc_feature: MA Experiment ID: 20000308 Result: Up-regulated in Transcription
  misc_feature: MA Experiment 20000308 PARAMETER Experiment Name: At_100mM_NaCl__P Parameter: Age (day) Value: 17
  misc_feature: MA Experiment 20000308 PARAMETER Experiment Name: At_100mM_NaCl__P Parameter: Organism Value: A. thaliana
  misc_feature: MA Experiment 20000308 PARAMETER Experiment Name: At_100mM_NaCl__P Parameter: Plant Line Value: WS
  misc_feature: MA Experiment 20000308 PARAMETER Experiment Name: At_100mM_NaCl__P Parameter: Timepoint (hr) Value: 72
  misc_feature: MA Experiment 20000308 PARAMETER Experiment Name: At_100mM_NaCl__P Parameter: Tissue Value: Whole Plant
  misc_feature: MA Experiment 20000308 PARAMETER Experiment Name: At_100mM_NaCl__P Parameter: Treatment Value: 100mM NaCl vs. No Treatment
  misc_feature: MA Experiment ID: 20000437 Result: Up-regulated in Transcription
  misc_feature: MA Experiment 20000437 PARAMETER Experiment Name: At_Drought_P Parameter: Age (day) Value: 8
  misc_feature: MA Experiment 20000437 PARAMETER Experiment Name: At_Drought_P Parameter: Organism Value: A. thaliana
  misc_feature: MA Experiment 20000437 PARAMETER Experiment Name: At_Drought_P Parameter: Plant Line Value: WS
  misc_feature: MA Experiment 20000437 PARAMETER Experiment Name: At_Drought_P Parameter: Timepoint (hr) Value: 24
  misc_feature: MA Experiment 20000437 PARAMETER Experiment Name: At_Drought_P Parameter: Tissue Value: Whole Plant
  misc_feature: MA Experiment 20000437 PARAMETER Experiment Name: At_Drought_P Parameter: Treatment Value: Drought vs. No Drought
  misc_feature: MA Experiment ID: 20000438 Result: Down-regulated in Transcription
  misc_feature: MA Experiment 20000438 PARAMETER Experiment Name: At_Shoots__P Parameter: Age (day) Value: 14
  misc_feature: MA Experiment 20000438 PARAMETER Experiment Name: At_Shoots__P Parameter: Tissue Value: Shoots vs. Whole Plant
  misc_feature: MA Experiment ID: 20000439 Result: Down-regulated in Transcription
  misc_feature: MA Experiment 20000439 PARAMETER Experiment Name: At_Roots__P Parameter: Age (day) Value: 14 vs. 21
  misc_feature: MA Experiment 20000439 PARAMETER Experiment Name: At_Roots__P Parameter: Organism Value: A. thaliana
  misc_feature: MA Experiment 20000439 PARAMETER Experiment Name: At_Roots__P Parameter: Tissue Value: Roots vs. Whole Plant
  misc_feature: MA Experiment ID: 20000441 Result: Down-regulated in Transcription
  misc_feature: MA Experiment 20000441 PARAMETER Experiment Name: At_1uM_BR-BRZ__P Parameter: Tissue Value: Shoot Apices
  misc_feature: MA Experiment 20000441 PARAMETER Experiment Name: At_1uM_BR-BRZ__P Parameter: Treatment Value: 1uM BR vs. No Treatment
  misc_feature: MA Experiment ID: 20000443 Result: Down-regulated in Transcription
  misc_feature: MA Experiment 20000443 PARAMETER Experiment Name: At_1uM_BR-BRZ__P Parameter: Tissue Value: Shoot Apices
  misc_feature: MA Experiment 20000443 PARAMETER Experiment Name: At_1uM_BR-BRZ__P Parameter: Treatment Value: 1uM BRZ vs. No Treatment
  misc_feature: MA Experiment ID: 20000495 Result: Down-regulated in Transcription
  misc_feature: MA Experiment 20000495 PARAMETER Experiment Name: At_Guard_Cells_P Parameter: Harvest Date Value: 8/2/2002
  misc_feature: MA Experiment 20000495 PARAMETER Experiment Name: At_Guard_Cells_P Parameter: Organism Value: A. thaliana
  misc_feature: MA Experiment 20000495 PARAMETER Experiment Name: At_Guard_Cells_P Parameter: Tissue Value: Guard Cells vs. Leaves
  misc_feature: MA Experiment ID: 20000794 Result: Down-regulated in Transcription
  misc_feature: MA Experiment 20000794 PARAMETER Experiment Name: At_Petals_P Parameter: Age (day) Value: 23-25 days
  misc_feature: MA Experiment 20000794 PARAMETER Experiment Name: At_Petals_P Parameter: Plant Line Value: WS
  misc_feature: MA Experiment 20000794 PARAMETER Experiment Name: At_Petals_P Parameter: Tissue Value: Petals vs. Whole plant
  misc_feature: MA Experiment ID: 20001247 Result: Down-regulated in Transcription
  misc_feature: MA Experiment 20001247 PARAMETER Experiment Name: At_Far-red-induction_P Parameter: Age (day) Value: 7
  misc_feature: MA Experiment 20001247 PARAMETER Experiment Name: At_Far-red-induction_P Parameter: Light Value: Far-red vs. White
  misc_feature: MA Experiment 20001247 PARAMETER Experiment Name: At_Far-red-induction_P Parameter: Organism Value: A. thaliana
  misc_feature: MA Experiment 20001247 PARAMETER Experiment Name: At_Far-red-induction_P Parameter: Plant Line Value: Columbia
  misc_feature: MA Experiment 20001247 PARAMETER Experiment Name: At_Far-red-induction_P Parameter: Timepoint (hr) Value: 1
  misc_feature: MA Experiment 20001247 PARAMETER Experiment Name: At_Far-red-induction_P Parameter: Tissue Value: Whole Plant
  misc_feature: MA Experiment ID: 20001248 Result: Up-regulated in Transcription
  misc_feature: MA Experiment 20001248 PARAMETER Experiment Name: At_Far-red-induction_P Parameter: Age (day) Value: 7
  misc_feature: MA Experiment 20001248 PARAMETER Experiment Name: At_Far-red-induction_P Parameter: Light Value: Far-red vs. White
  misc_feature: MA Experiment 20001248 PARAMETER Experiment Name: At_Far-red-induction_P Parameter: Organism Value: A. thaliana
  misc_feature: MA Experiment 20001248 PARAMETER Experiment Name: At_Far-red-induction_P Parameter: Plant Line Value: Columbia
  misc_feature: MA Experiment 20001248 PARAMETER Experiment Name: At_Far-red-induction_P Parameter: Timepoint (hr) Value: 4
  misc_feature: MA Experiment 20001248 PARAMETER Experiment Name: At_Far-red-induction_P Parameter: Tissue Value: Whole Plant
  misc_feature: MA Experiment ID: 20001557 Result: Up-regulated in Transcription
  misc_feature: MA Experiment 20001557 PARAMETER Experiment Name: At_Drought_Soil_Dry_P Parameter: Age (day) Value: 27
  misc_feature: MA Experiment 20001557 PARAMETER Experiment Name: At_Drought_Soil_Dry_P Parameter: Organism Value: A. thaliana
  misc_feature: MA Experiment 20001557 PARAMETER Experiment Name: At_Drought_Soil_Dry_P Parameter: Plant Line Value: WS
  misc_feature: MA Experiment 20001557 PARAMETER Experiment Name: At_Drought_Soil_Dry_P Parameter: Post Timepoint (hr) Value: 3
  misc_feature: MA Experiment 20001557 PARAMETER Experiment Name: At_Drought_Soil_Dry_P Parameter: Post-Treatment Value: Re-Water vs. No Drought
  misc_feature: MA Experiment 20001557 PARAMETER Experiment Name: At_Drought_Soil_Dry_P Parameter: Timepoint (day) Value: 13
  misc_feature: MA Experiment 20001557 PARAMETER Experiment Name: At_Drought_Soil_Dry_P Parameter: Treatment Value: Drought vs. No Drought
  misc_feature: MA Experiment ID: 20001905 Result: Down-regulated in Transcription
  misc_feature: MA Experiment 20001905 PARAMETER Experiment Name: At_Drought_Reproduction_P Parameter: Age (day) Value: 40
  misc_feature: MA Experiment 20001905 PARAMETER Experiment Name: At_Drought_Reproduction_P Parameter: Organism Value: A. thaliana
  misc_feature: MA Experiment 20001905 PARAMETER Experiment Name: At_Drought_Reproduction_P Parameter: Plant Line Value: WS
  misc_feature: MA Experiment 20001905 PARAMETER Experiment Name: At_Drought_Reproduction_P Parameter: Timepoint (day) Value: 10
  misc_feature: MA Experiment 20001905 PARAMETER Experiment Name: At_Drought_Reproduction_P Parameter: Tissue Value: Rosettes
  misc_feature: MA Experiment 20001905 PARAMETER Experiment Name: At_Drought_Reproduction_P Parameter: Treatment Value: Drought vs. No Drought
atccaccgttaaaagcccctttatatcccaagaaataggtgaacttgttacagaacaagcaaagatcaaagagaaaaatatcccaaaaccaaaaacagaggaagaaagaagaagaaaagatgccttcaagcacattctccgggactgttagcacgccgaagctgtcggtggcagtggacatgggaaacccttttctcaatctcaccgttgatgccttcctcaagatcggagctgttggagtcactaaatctcttgcagaagacacttacaaggccatcgacaaagggagtctctccaagagcactttggagcatgcgcttaagaagttgtgtaaagaaggtgtttactggggagctgctggtggagtgtacattggaacagaatacggaatcgaacgtatccgtggcagcagagattggaaaaacgcaatgttagcaggcgcggcgacaggagcagtgctctcagcggttggtaagaaaggcaaagacactattgtgatcgatgccattcttggtggcgcgcttgcaaccgcttctcagttcgttaacaatcattatttctactgattctccatcttcctttagggaccaatttggttcatatggtgtggattcctttgtttactctttaaataataataaaaaacaatgtagtgtttttgaaatgaatacattcgagtattgttgacg

SEQ ID NO: 104704 - protein, 148 aa, Arabidopsis thaliana; identical to SEQ ID NO: 28418
  peptide (1)..(148): Ceres Seq. ID no. 13615620
  misc_feature (18)..(146): Pfam Name: Tim17/Tim22/Tim23 family Pfam Description: Tim17/Tim22/Tim23 family
  misc_feature (1)..(148): Homolog of NCBI NO: 15226998 NR Description: membrane channel protein -related [Arabidopsis
  misc_feature (1)..(148): Homolog of NCBI NO: 21536521 NR Description: putative membrane channel protein [Arabidopsis
  misc_feature (1)..(143): Homolog of NCBI NO: 7488792 NR Description: core protein - garden pea
  misc_feature (1)..(143): Homolog of NCBI NO: 3758827 NR Description: amino acid selective channel protein [Hordeum
  misc_feature (101)..(143): Homolog of NCBI NO: 34906056 NR Description: P0698H10.23 [Oryza sativa (japonica
  misc_feature (1)..(38): Homolog of NCBI NO: 34906056 NR Description: P0698H10.23 [Oryza sativa (japonica
  misc_feature (20)..(144): Homolog of NCBI NO: 7485023 NR Description: hypothetical protein - Arabidopsis thaliana pore protein homolog [Arabidopsis thaliana]
  misc_feature (44)..(143): Homolog of NCBI NO: 16555405 NR Description: stress-inducible membrane pore protein [Bromus
  misc_feature (37)..(146): Homolog of NCBI NO: 34905526 NR Description: B1146F03.20 [Oryza sativa (japonica
  misc_feature (55)..(144): Homolog of NCBI NO: 18414605 NR Description: pore protein homolog [Arabidopsis thaliana]

SEQ ID NO: 104705 - protein, 128 aa, Arabidopsis thaliana; identical to SEQ ID NO: 28419
  peptide (1)..(128): Ceres Seq. ID no. 13615621
  misc_feature (1)..(126): Pfam Name: Tim17/Tim22/Tim23 family Pfam Description: Tim17/Tim22/Tim23 family
  misc_feature (1)..(128): Homolog of NCBI NO: 15226998 NR Description: membrane channel protein -related [Arabidopsis
  misc_feature (1)..(128): Homolog of NCBI NO: 21536521 NR Description: putative membrane channel protein [Arabidopsis
  misc_feature (1)..(123): Homolog of NCBI NO: 7488792 NR Description: core protein - garden pea
  misc_feature (1)..(123): Homolog of NCBI NO: 3758827 NR Description: amino acid selective channel protein [Hordeum
  misc_feature (81)..(123): Homolog of NCBI NO: 34906056 NR Description: P0698H10.23 [Oryza sativa (japonica
  misc_feature (1)..(18): Homolog of NCBI NO: 34906056 NR Description: P0698H10.23 [Oryza sativa (japonica
  misc_feature (1)..(124): Homolog of NCBI NO: 7485023 NR Description: hypothetical protein - Arabidopsis thaliana pore protein homolog [Arabidopsis thaliana]
  misc_feature (24)..(123): Homolog of NCBI NO: 16555405 NR Description: stress-inducible membrane pore protein [Bromus
  misc_feature (17)..(126): Homolog of NCBI NO: 34905526 NR Description: B1146F03.20 [Oryza sativa (japonica
  misc_feature (35)..(124): Homolog of NCBI NO: 18414605 NR Description: pore protein homolog [Arabidopsis thaliana]

SEQ ID NO: 104706 - protein, 74 aa, Arabidopsis thaliana; identical to SEQ ID NO: 28420
  peptide (1)..(74): Ceres Seq. ID no. 13615622

SEQ ID NO: 104707 - DNA, 1517 bp, Arabidopsis thaliana
  misc_feature (1)..(1517): Ceres Seq. ID no. 13615623
  misc_feature: MA Experiment ID: 108461 Result: Up-regulated in Transcription
  misc_feature: MA Experiment 108461 PARAMETER Experiment Name: At_Germinating_Seeds_cDNA_P Parameter: Age (day) Value: 1 vs. 0
  misc_feature: MA Experiment 108461 PARAMETER Experiment Name: At_Germinating_Seeds_cDNA_P Parameter: Tissue Value: Germinating Seeds
  misc_feature: MA Experiment ID: 108577 Result: Down-regulated in Transcription
  misc_feature: MA Experiment 108577 PARAMETER Experiment Name: At_42deg_Heat_cDNA_P Parameter: Temperature (deg C) Value: 42 vs. 22
  misc_feature: MA Experiment 108577 PARAMETER Experiment Name: At_42deg_Heat_cDNA_P Parameter: Timepoint (hr) Value: 6
  misc_feature: MA Experiment 108577 PARAMETER Experiment Name: At_42deg_Heat_cDNA_P Parameter: Tissue Value: Aerial
  misc_feature: MA Experiment ID: 20000171 Result: Down-regulated in Transcription
  misc_feature: MA Experiment 20000171 PARAMETER Experiment Name: At_42deg_Heat_P Parameter: Age (day) Value: 14
  misc_feature: MA Experiment 20000171 PARAMETER Experiment Name: At_42deg_Heat_P Parameter: Organism Value: A. thaliana
  misc_feature: MA Experiment 20000171 PARAMETER Experiment Name: At_42deg_Heat_P Parameter: Plant Line Value: WS
  misc_feature: MA Experiment 20000171 PARAMETER Experiment Name: At_42deg_Heat_P Parameter: Temperature (deg C) Value: 42 vs. 22
  misc_feature: MA Experiment 20000171 PARAMETER Experiment Name: At_42deg_Heat_P Parameter: Timepoint (hr) Value: 1
  misc_feature: MA Experiment 20000171 PARAMETER Experiment Name: At_42deg_Heat_P Parameter: Tissue Value: Aerial
  misc_feature: MA Experiment ID: 20000173 Result: Down-regulated in Transcription
  misc_feature: MA Experiment 20000173 PARAMETER Experiment Name: At_42deg_Heat_P Parameter: Age (day) Value: 14
  misc_feature: MA Experiment 20000173 PARAMETER Experiment Name: At_42deg_Heat_P Parameter: Organism Value: A. thaliana
  misc_feature: MA Experiment 20000173 PARAMETER Experiment Name: At_42deg_Heat_P Parameter: Plant Line Value: WS
  misc_feature: MA Experiment 20000173 PARAMETER Experiment Name: At_42deg_Heat_P Parameter: Temperature (deg C) Value: 42 vs. 22
  misc_feature: MA Experiment 20000173 PARAMETER Experiment Name: At_42deg_Heat_P Parameter: Timepoint (hr) Value: 6
  misc_feature: MA Experiment 20000173 PARAMETER Experiment Name: At_42deg_Heat_P Parameter: Tissue Value: Aerial
  misc_feature: MA Experiment ID: 20000179 Result: Up-regulated in Transcription
  misc_feature: MA Experiment 20000179 PARAMETER Experiment Name: At_Germinating_Seeds_P Parameter: Age (hr) Value: 6 vs. 0
  misc_feature: MA Experiment 20000179 PARAMETER Experiment Name: At_Germinating_Seeds_P Parameter: Tissue Value: Germinating Seeds
  misc_feature: MA Experiment ID: 20000180 Result: Up-regulated in Transcription
  misc_feature: MA Experiment 20000180 PARAMETER Experiment Name: At_Germinating_Seeds_P Parameter: Age (hr) Value: 24 vs. 0
  misc_feature: MA Experiment 20000180 PARAMETER Experiment Name: At_Germinating_Seeds_P Parameter: Tissue Value: Germinating Seeds
  misc_feature: MA Experiment ID: 20000234 Result: Up-regulated in Transcription
  misc_feature: MA Experiment 20000234 PARAMETER Experiment Name: At_Siliques_P Parameter: Age (day) Value: 21
  misc_feature: MA Experiment 20000234 PARAMETER Experiment Name: At_Siliques_P Parameter: Organism Value: A. thaliana
  misc_feature: MA Experiment 20000234 PARAMETER Experiment Name: At_Siliques_P Parameter: Plant Line Value: WS
  misc_feature: MA Experiment 20000234 PARAMETER Experiment Name: At_Siliques_P Parameter: Tissue Value: Less Than 5mm Siliques vs. Whole Plant
  misc_feature: MA Experiment ID: 20000264 Result: Up-regulated in Transcription
  misc_feature: MA Experiment 20000264 PARAMETER Experiment Name: At_Open_Flower_P Parameter: Age (day) Value: 21
  misc_feature: MA Experiment 20000264 PARAMETER Experiment Name: At_Open_Flower_P Parameter: Plant Line Value: WS
  misc_feature: MA Experiment 20000264 PARAMETER Experiment Name: At_Open_Flower_P Parameter: Tissue Value: Open Flower vs. Whole Plant
  misc_feature: MA Experiment ID: 20000265 Result: Up-regulated in Transcription
  misc_feature: MA Experiment 20000265 PARAMETER Experiment Name: At_Open_Flower_P Parameter: Age (day) Value: 21
  misc_feature: MA Experiment 20000265 PARAMETER Experiment Name: At_Open_Flower_P Parameter: Plant Line Value: WS
  misc_feature: MA Experiment 20000265 PARAMETER Experiment Name: At_Open_Flower_P Parameter: Tissue Value: Closed Flower vs. Whole Plant
  misc_feature: MA Experiment ID: 20000286 Result: Up-regulated in Transcription
  misc_feature: MA Experiment 20000286 PARAMETER Experiment Name: At_Open_Flower_P Parameter: Age (day) Value: 21
  misc_feature: MA Experiment 20000286 PARAMETER Experiment Name: At_Open_Flower_P Parameter: Plant Line Value: WS
  misc_feature: MA Experiment 20000286 PARAMETER Experiment Name: At_Open_Flower_P Parameter: Tissue Value: Half Open vs. Whole Plant
  misc_feature: MA Experiment ID: 20000794 Result: Up-regulated in Transcription
  misc_feature: MA Experiment 20000794 PARAMETER Experiment Name: At_Petals_P Parameter: Age (day) Value: 23-25 days
  misc_feature: MA Experiment 20000794 PARAMETER Experiment Name: At_Petals_P Parameter: Plant Line Value: WS
  misc_feature: MA Experiment 20000794 PARAMETER Experiment Name: At_Petals_P Parameter: Tissue Value: Petals vs. Whole plant
aattagcttgttcacaaggaaatgcctcaaaagaggaaagacgattgattcatctcaaccttctcgtcttctttcggacaacaatgtcacaaaaagtctgatcctttctctttagatttggcttcgagaaatggctcgcgatcggcgggaaggtctggagatcaaggtggtgaatccaccggcggcggcgacaaacaatgtggctgtagaaacgtctccggcgacggcgacgaggagacggagacaacaacaacgagcttcgttcgctgagtttagaccgtttaagctttggtttccatggcttgttccagctatcgtggtggctaacattgcccttttcgccatttcgatgtttattaacaattgtcctaagaactcggcttattgcttagctaggtttcttgggagatttgcttttcagcctatgaaagagaatcctcttctgggtccttcttctttgacattggagaagatgggggctttagatgtatcaatggtggttcataagcacgaggtgtggcgcttgttcacttgtatatggctacatgctggggtttttcatgttcttgccaacatgttgagccttatcttcattggcattcgacttgagcaagaatttggatttgtacgcattggattgctttatatgatatctggatttggtggaagtttgttatcttctctatttaaccgggctggtatatccgttggtgcctctggagcattattcggcttgcttggtgctatgctttcagagcttctcactaattggactatttacgctaataagtttgcagctcttttgacactcatcttcatcatagccattaatttagcagtaggtattcttccacatgtagacaactttgcccatcttggaggattcacatcagggtttcttctaggctttgttttcttgatacgtcctcagtatggatacttcaaccagcggaacaatcctcggggttatgctgcaccgtctgctaaatccaaacacaagccataccaatacgttctttggatcacctctttagtgcttttaatagcaggatataccgctggactcgtagtgcttcttcgaggaacggatctaaacaagcattgttcatggtgccattatctcagctgtattcctacgtcgctttggagctgtaaatctcaaaatgtctactgtgagtcgagccaaattgggcagcagatgaacttgacatgtatcacgaatgggaaaacagagatgtacaagctctctaacgatataccgtctcggattcagcagttgtgttcccaattgtgcagatgaataccactaaacgtctaatttttatactcttgtagaaagttaggaatgtgtcttgaggaagagaagattgttcatttaacatgatcatgcacttgtggattcttctttctgatcattgtttgtttccacttcttgttttattgttgcatatgtattgaccatgatctatgtaatgagaacataggtgaagagaaagttgaacaaagtttttgttctt

SEQ ID NO: 104708 - protein, 389 aa, Arabidopsis thaliana
  peptide (1)..(389): Ceres Seq. ID no. 13615624
  misc_feature (1)..(389): Homolog of NCBI NO: 30693911 NR Description: membrane protein, Rhomboid family [Arabidopsis
  misc_feature (1)..(264): Homolog of NCBI NO: 30684102 NR Description: membrane protein, Rhomboid family [Arabidopsis
  misc_feature (28)..(389): Homolog of NCBI NO: 11357824 NR Description: hypothetical protein F5K20.80 - Arabidopsis >gi|7629998|emb|CAB88340.1| putative protein [Arabidopsis
  misc_feature (112)..(264): Homolog of NCBI NO: 7487872 NR Description: hypothetical protein At2g29050 [imported] - thaliana >gi|3461845|gb|AAC33231.1| hypothetical protein
  misc_feature (1)..(111): Homolog of NCBI NO: 7487872 NR Description: hypothetical protein At2g29050 [imported] - thaliana >gi|3461845|gb|AAC33231.1| hypothetical protein
  misc_feature (54)..(341): Homolog of NCBI NO: 15221690 NR Description: membrane protein, Rhomboid family [Arabidopsis
  misc_feature (165)..(316): Homolog of NCBI NO: 7487872 NR Description: hypothetical protein At2g29050 [imported] - thaliana >gi|3461845|gb|AAC33231.1| hypothetical protein
  misc_feature (54)..(341): Homolog of NCBI NO: 15240744 NR Description: membrane protein, Rhomboid family [Arabidopsis
  misc_feature (54)..(343): Homolog of NCBI NO: 294845 NR Description: membrane protein [Saccharum hybrid cultivar
  misc_feature (91)..(298): Homolog of NCBI NO: 34895778 NR Description: putative membrane protein [Oryza sativa (japonica group)] >gi|12328478|dbj|BAB21138.1| putative membrane protein
MARDRREGLEIKVVNPPAAATNNVAVETSPATATRRRRQQQRASFAEFRPFKLWFPWLVPAIVVANIALFAISMFINNCPKNSAYCLARFLGRFAFQPMKENPLLGPSSLTLEKMGALDVSMVVHKHEVWRLFTCIWLHAGVFHVLANMLSLIFIGIRLEQEFGFVRIGLLYMISGFGGSLLSSLFNRAGISVGASGALFGLLGAMLSELLTNWTIYANKFAALLTLIFIIAINLAVGILPHVDNFAHLGGFTSGFLLGFVFLIRPQYGYFNQRNNPRGYAAPSAKSKHKPYQYVLWITSLVLLIAGYTAGLVVLLRGTDLNKHCSWCHYLSCIPTSLWSCKSQNVYCESSQIGQQMNLTCITNGKTEMYKLSNDIPSRIQQLCSQLCR

SEQ ID NO: 104709 - protein, 316 aa, Arabidopsis thaliana
  peptide (1)..(316): Ceres Seq. ID no. 13615625
  misc_feature (1)..(316): Homolog of NCBI NO: 30693911 NR Description: membrane protein, Rhomboid family [Arabidopsis
  misc_feature (1)..(191): Homolog of NCBI NO: 30684102 NR Description: membrane protein, Rhomboid family [Arabidopsis
  misc_feature (1)..(316): Homolog of NCBI NO: 11357824 NR Description: hypothetical protein F5K20.80 - Arabidopsis >gi|7629998|emb|CAB88340.1| putative protein [Arabidopsis
  misc_feature (39)..(191): Homolog of NCBI NO: 7487872 NR Description: hypothetical protein At2g29050 [imported] - thaliana >gi|3461845|gb|AAC33231.1| hypothetical protein
  misc_feature (1)..(38): Homolog of NCBI NO: 7487872 NR Description: hypothetical protein At2g29050 [imported] - thaliana >gi|3461845|gb|AAC33231.1| hypothetical protein
  misc_feature (1)..(268): Homolog of NCBI NO: 15221690 NR Description: membrane protein, Rhomboid family [Arabidopsis
  misc_feature (92)..(243): Homolog of NCBI NO: 7487872 NR Description: hypothetical protein At2g29050 [imported] - thaliana >gi|3461845|gb|AAC33231.1| hypothetical protein
  misc_feature (1)..(268): Homolog of NCBI NO: 15240744 NR Description: membrane protein, Rhomboid family [Arabidopsis
  misc_feature (1)..(270): Homolog of NCBI NO: 294845 NR Description: membrane protein [Saccharum hybrid cultivar
  misc_feature (18)..(225): Homolog of NCBI NO: 34895778 NR Description: putative membrane protein [Oryza sativa (japonica group)] >gi|12328478|dbj|BAB21138.1| putative membrane protein
MFINNCPKNSAYCLARFLGRFAFQPMKENPLLGPSSLTLEKMGALDVSMVVHKHEVWRLFTCIWLHAGVFHVLANMLSLIFIGIRLEQEFGFVRIGLLYMISGFGGSLLSSLFNRAGISVGASGALFGLLGAMLSELLTNWTIYANKFAALLTLIFIIAINLAVGILPHVDNFAHLGGFTSGFLLGFVFLIRPQYGYFNQRNNPRGYAAPSAKSKHKPYQYVLWITSLVLLIAGYTAGLVVLLRGTDLNKHCSWCHYLSCIPTSLWSCKSQNVYCESSQIGQQMNLTCITNGKTEMYKLSNDIPSRIQQLCSQLCR

SEQ ID NO: 104710 - protein, 291 aa, Arabidopsis thaliana
  peptide (1)..(291): Ceres Seq. ID no. 13615626
  misc_feature (1)..(291): Homolog of NCBI NO: 30693911 NR Description: membrane protein, Rhomboid family [Arabidopsis
  misc_feature (1)..(166): Homolog of NCBI NO: 30684102 NR Description: membrane protein, Rhomboid family [Arabidopsis
  misc_feature (1)..(291): Homolog of NCBI NO: 11357824 NR Description: hypothetical protein F5K20.80 - Arabidopsis >gi|7629998|emb|CAB88340.1| putative protein [Arabidopsis
  misc_feature (14)..(166): Homolog of NCBI NO: 7487872 NR Description: hypothetical protein At2g29050 [imported] - thaliana >gi|3461845|gb|AAC33231.1| hypothetical protein
  misc_feature (1)..(13): Homolog of NCBI NO: 7487872 NR Description: hypothetical protein At2g29050 [imported] - thaliana >gi|3461845|gb|AAC33231.1| hypothetical protein
  misc_feature (1)..(243): Homolog of NCBI NO: 15221690 NR Description: membrane protein, Rhomboid family [Arabidopsis
  misc_feature (67)..(218): Homolog of NCBI NO: 7487872 NR Description: hypothetical protein At2g29050 [imported] - thaliana >gi|3461845|gb|AAC33231.1| hypothetical protein
  misc_feature (1)..(243): Homolog of NCBI NO: 15240744 NR Description: membrane protein, Rhomboid family [Arabidopsis
  misc_feature (1)..(245): Homolog of NCBI NO: 294845 NR Description: membrane protein [Saccharum hybrid cultivar
  misc_feature (1)..(200): Homolog of NCBI NO: 34895778 NR Description: putative membrane protein [Oryza sativa (japonica group)] >gi|12328478|dbj|BAB21138.1| putative membrane protein
MKENPLLGPSSLTLEKMGALDVSMVVHKHEVWRLFTCIWLHAGVFHVLANMLSLIFIGIRLEQEFGFVRIGLLYMISGFGGSLLSSLFNRAGISVGASGALFGLLGAMLSELLTNWTIYANKFAALLTLIFIIAINLAVGILPHVDNFAHLGGFTSGFLLGFVFLIRPQYGYFNQRNNPRGYAAPSAKSKHKPYQYVLWITSLVLLIAGYTAGLVVLLRGTDLNKHCSWCHYLSCIPTSLWSCKSQNVYCESSQIGQQMNLTCITNGKTEMYKLSNDIPSRIQQLCSQLCR

SEQ ID NO: 104711 - DNA, 543 bp, Arabidopsis thaliana
  misc_feature (1)..(543): Ceres Seq. ID no. 13615631
  misc_feature: MA Experiment ID: 108434 Result: Up-regulated in Transcription
  misc_feature: MA Experiment 108434 PARAMETER Experiment Name: At_Root_Tips_cDNA_P Parameter: Tissue Value: Root Tips
  misc_feature: MA Experiment ID: 108462 Result: Down-regulated in Transcription
  misc_feature: MA Experiment 108462 PARAMETER Experiment Name: At_Germinating_Seeds_cDNA_P Parameter: Age (day) Value: 2 vs. 0
  misc_feature: MA Experiment 108462 PARAMETER Experiment Name: At_Germinating_Seeds_cDNA_P Parameter: Tissue Value: Germinating Seeds
  misc_feature: MA Experiment ID: 108463 Result: Down-regulated in Transcription
  misc_feature: MA Experiment 108463 PARAMETER Experiment Name: At_Germinating_Seeds_cDNA_P Parameter: Age (day) Value: 3 vs. 0
  misc_feature: MA Experiment 108463 PARAMETER Experiment Name: At_Germinating_Seeds_cDNA_P Parameter: Tissue Value: Germinating Seeds
  misc_feature: MA Experiment ID: 108464 Result: Down-regulated in Transcription
  misc_feature: MA Experiment 108464 PARAMETER Experiment Name: At_Germinating_Seeds_cDNA_P Parameter: Age (day) Value: 4 vs. 0
  misc_feature: MA Experiment 108464 PARAMETER Experiment Name: At_Germinating_Seeds_cDNA_P Parameter: Tissue Value: Germinating Seeds
  misc_feature: MA Experiment ID: 108569 Result: Down-regulated in Transcription
  misc_feature: MA Experiment 108569 PARAMETER Experiment Name: At_0.001%_MeJA__cDNA_P Parameter: Timepoint (hr) Value: 6
  misc_feature: MA Experiment 108569 PARAMETER Experiment Name: At_0.001%_MeJA__cDNA_P Parameter: Tissue Value: Aerial
  misc_feature: MA Experiment 108569 PARAMETER Experiment Name: At_0.001%_MeJA__cDNA_P Parameter: Treatment Value: 0.001% MeJA vs. No Treatment
  misc_feature: MA Experiment ID: 108573 Result: Down-regulated in Transcription
  misc_feature: MA Experiment 108573 PARAMETER Experiment Name: At_Drought_cDNA_P Parameter: Timepoint (hr) Value: 6
  misc_feature: MA Experiment 108573 PARAMETER Experiment Name: At_Drought_cDNA_P Parameter: Tissue Value: Aerial
  misc_feature: MA Experiment 108573 PARAMETER Experiment Name: At_Drought_cDNA_P Parameter: Treatment Value: Drought vs. No Drought
  misc_feature: MA Experiment ID: 20000087 Result: Up-regulated in Transcription
  misc_feature: MA Experiment 20000087 PARAMETER Experiment Name: At_100uM_ABA_Mutants_cDNA_P Parameter: Plant Line Value: WS
  misc_feature: MA Experiment 20000087 PARAMETER Experiment Name: At_100uM_ABA_Mutants_cDNA_P Parameter: Timepoint (hr) Value: 6
  misc_feature: MA Experiment 20000087 PARAMETER Experiment Name: At_100uM_ABA_Mutants_cDNA_P Parameter: Tissue Value: Aerial
  misc_feature: MA Experiment 20000087 PARAMETER Experiment Name: At_100uM_ABA_Mutants_cDNA_P Parameter: Treatment Value: 100uM ABA vs. No Treatment
  misc_feature: MA Experiment ID: 20000180 Result: Down-regulated in Transcription
  misc_feature: MA Experiment 20000180 PARAMETER Experiment Name: At_Germinating_Seeds_P Parameter: Age (hr) Value: 24 vs. 0
  misc_feature: MA Experiment 20000180 PARAMETER Experiment Name: At_Germinating_Seeds_P Parameter: Tissue Value: Germinating Seeds
  misc_feature: MA Experiment ID: 20000184 Result: Down-regulated in Transcription
  misc_feature: MA Experiment 20000184 PARAMETER Experiment Name: At_Shoots__P Parameter: Age (day) Value: 7
  misc_feature: MA Experiment 20000184 PARAMETER Experiment Name: At_Shoots__P Parameter: Tissue Value: Shoots vs. Whole Plant
  misc_feature: MA Experiment ID: 20000227 Result: Up-regulated in Transcription
  misc_feature: MA Experiment 20000227 PARAMETER Experiment Name: At_Root-Tips-vs-Tops_P Parameter: Tissue Value: Root Tips vs. Root Tops
  misc_feature: MA Experiment ID: 20000495 Result: Up-regulated in Transcription
  misc_feature: MA Experiment 20000495 PARAMETER Experiment Name: At_Guard_Cells_P Parameter: Harvest Date Value: 8/2/2002
  misc_feature: MA Experiment 20000495 PARAMETER Experiment Name: At_Guard_Cells_P Parameter: Organism Value: A. thaliana
  misc_feature: MA Experiment 20000495 PARAMETER Experiment Name: At_Guard_Cells_P Parameter: Tissue Value: Guard Cells vs. Leaves
  misc_feature: MA Experiment ID: 20000496 Result: Up-regulated in Transcription
  misc_feature: MA Experiment 20000496 PARAMETER Experiment Name: At_Guard_Cells_P Parameter: Harvest Date Value: 7/19/2002
  misc_feature: MA Experiment 20000496 PARAMETER Experiment Name: At_Guard_Cells_P Parameter: Organism Value: Canola
  misc_feature: MA Experiment 20000496 PARAMETER Experiment Name: At_Guard_Cells_P Parameter: Tissue Value: Guard Cells vs. Leaves
  misc_feature: MA Experiment ID: 20001558 Result: Up-regulated in Transcription
  misc_feature: MA Experiment 20001558 PARAMETER Experiment Name: At_Drought_Soil_Dry_P Parameter: Age (day) Value: 27
  misc_feature: MA Experiment 20001558 PARAMETER Experiment Name: At_Drought_Soil_Dry_P Parameter: Organism Value: A. thaliana
  misc_feature: MA Experiment 20001558 PARAMETER Experiment Name: At_Drought_Soil_Dry_P Parameter: Plant Line Value: WS
  misc_feature: MA Experiment 20001558 PARAMETER Experiment Name: At_Drought_Soil_Dry_P Parameter: Post Timepoint (hr) Value: 6
  misc_feature: MA Experiment 20001558 PARAMETER Experiment Name: At_Drought_Soil_Dry_P Parameter: Post-Treatment Value: Re-Water vs. No Drought
  misc_feature: MA Experiment 20001558 PARAMETER Experiment Name: At_Drought_Soil_Dry_P Parameter: Timepoint (day) Value: 13
  misc_feature: MA Experiment 20001558 PARAMETER Experiment Name: At_Drought_Soil_Dry_P Parameter: Treatment Value: Drought vs. No Drought
aaggatttatgatcttcaaattcaagtatgaattataaagtttcgatttttacgaatcattaattttgtattcaggtactgctaaaaaaatggcttctcctattcccgtcggcgttactaaggaacaggcgtttagtatggcacaaacggagatggagtatcgcgtggaactctttaacaagcttgctcaaacatgctttaataaatgtgtggataaaaggtacaaggaagctgagctaaacatgggtgagaatagttgcatcgaccgttgtgtttccaagtactggcaggtaaatggaatggttggacagcttctaagtgctggcaagcctcccgtgtaatccagtttaaaggcaattattacagaccaaaaagctcatggagggaacacaactctgttctttgtttttctaaagtttaaggcaatcttgtttttattgtcaagaaagttgcatcacatttttggcgctgatttggacaaattatgcaattccatgtgaacccattattattacctaaggggtgaaatgaaataacaaatcg

SEQ ID NO: 104712 - protein, 83 aa, Arabidopsis thaliana; identical to SEQ ID NO: 27029
  peptide (1)..(83): Ceres Seq. ID no. 13615632
  misc_feature (13)..(79): Pfam Name: Tim10/DDP family zinc finger Pfam Description: Tim10/DDP family zinc finger
  misc_feature (1)..(83): Homolog of NCBI NO: 18402072 NR Description: small zinc finger-related protein (TIM10) thaliana] >gi|12230205|sp|Q9ZW33|IM10_ARATH Mitochondrial import membrane translocase subunit Tim10 >gi|25408033|pir||D84697
  misc_feature (1)..(83): Homolog of NCBI NO: 5107088 NR Description: small zinc finger-like protein [Pinus taeda]
  misc_feature (5)..(81): Homolog of NCBI NO: 5107180 NR Description: small zinc finger-like protein [Lycopersicon
  misc_feature (7)..(82): Homolog of NCBI NO: 38175439 NR Description: small zinc finger-like protein [Oryza sativa
  misc_feature (2)..(69): Homolog of NCBI NO: 34897366 NR Description: putative zinc finger protein [Oryza sativa]
  misc_feature (9)..(74): Homolog of NCBI NO: 6321793 NR Description: May act cooperatively with Mrs5p in mitochondrial import or other related essential mitochondrial processes; Mrs11p
  misc_feature (9)..(74): Homolog of NCBI NO: 12230195 NR Description: Mitochondrial import inner membrane translocase
  misc_feature (13)..(74): Homolog of NCBI NO: 19114054 NR Description: putative mitochondrial intermembrane protein homolog [Schizosaccharomyces pombe] >gi|11359186|pir||T50144
  misc_feature (18)..(77): Homolog of NCBI NO: 6912708 NR Description: translocase of inner mitochondrial membrane 10 translocase of inner mitochondrial membrane 10 (yeast) homolog
  misc_feature (1)..(78): Homolog of NCBI NO: 31204893 NR Description: ENSANGP00000016855 [Anopheles gambiae]

SEQ ID NO: 104713 - protein, 67 aa, Arabidopsis thaliana; identical to SEQ ID NO: 27031
  peptide (1)..(67): Ceres Seq. ID no. 13615633
  misc_feature (1)..(63): Pfam Name: Tim10/DDP family zinc finger Pfam Description: Tim10/DDP family zinc finger
  misc_feature (1)..(67): Homolog of NCBI NO: 18402072 NR Description: small zinc finger-related protein (TIM10) thaliana] >gi|12230205|sp|Q9ZW33|IM10_ARATH Mitochondrial import membrane translocase subunit Tim10 >gi|25408033|pir||D84697
  misc_feature (1)..(67): Homolog of NCBI NO: 5107088 NR Description: small zinc finger-like protein [Pinus taeda]
  misc_feature (1)..(65): Homolog of NCBI NO: 5107180 NR Description: small zinc finger-like protein [Lycopersicon
  misc_feature (1)..(66): Homolog of NCBI NO: 38175439 NR Description: small zinc finger-like protein [Oryza sativa
  misc_feature (1)..(53): Homolog of NCBI NO: 34897366 NR Description: putative zinc finger protein [Oryza sativa]
  misc_feature (1)..(58): Homolog of NCBI NO: 6321793 NR Description: May act cooperatively with Mrs5p in mitochondrial import or other related essential mitochondrial processes; Mrs11p
  misc_feature (1)..(58): Homolog of NCBI NO: 12230195 NR Description: Mitochondrial import inner membrane translocase
  misc_feature (1)..(58): Homolog of NCBI NO: 19114054 NR Description: putative mitochondrial intermembrane protein homolog [Schizosaccharomyces pombe] >gi|11359186|pir||T50144
  misc_feature (2)..(61): Homolog of NCBI NO: 6912708 NR Description: translocase of inner mitochondrial membrane 10 translocase of inner mitochondrial membrane 10 (yeast) homolog
  misc_feature (1)..(62): Homolog of NCBI NO: 31204893 NR Description: ENSANGP00000016855 [Anopheles gambiae]

SEQ ID NO: 104714 - protein, 62 aa, Arabidopsis thaliana; identical to SEQ ID NO: 35976
  peptide (1)..(62): Ceres Seq. ID no. 13615634
  misc_feature (1)..(58): Pfam Name: Tim10/DDP family zinc finger Pfam Description: Tim10/DDP family zinc finger
  misc_feature (1)..(62): Homolog of NCBI NO: 18402072 NR Description: small zinc finger-related protein (TIM10) thaliana] >gi|12230205|sp|Q9ZW33|IM10_ARATH Mitochondrial import membrane translocase subunit Tim10 >gi|25408033|pir||D84697
  misc_feature (1)..(62): Homolog of NCBI NO: 5107088 NR Description: small zinc finger-like protein [Pinus taeda]
  misc_feature (1)..(60): Homolog of NCBI NO: 5107180 NR Description: small zinc finger-like protein [Lycopersicon
  misc_feature (1)..(61): Homolog of NCBI NO: 38175439 NR Description: small zinc finger-like protein [Oryza sativa
  misc_feature (1)..(48): Homolog of NCBI NO: 34897366 NR Description: putative zinc finger protein [Oryza sativa]
  misc_feature (1)..(53): Homolog of NCBI NO: 6321793 NR Description: May act cooperatively with Mrs5p in mitochondrial import or other related essential mitochondrial processes; Mrs11p
  misc_feature (1)..(53): Homolog of NCBI NO: 12230195 NR Description: Mitochondrial import inner membrane translocase
  misc_feature (1)..(53): Homolog of NCBI NO: 19114054 NR Description: putative mitochondrial intermembrane protein homolog [Schizosaccharomyces pombe] >gi|11359186|pir||T50144
  misc_feature (1)..(56): Homolog of NCBI NO: 6912708 NR Description: translocase of inner mitochondrial membrane 10 translocase of inner mitochondrial membrane 10 (yeast) homolog
  misc_feature (1)..(57): Homolog of NCBI NO: 31204893 NR Description: ENSANGP00000016855 [Anopheles gambiae]

SEQ ID NO: 104715 - DNA, 1671 bp, Arabidopsis thaliana
  misc_feature (1)..(1671): Ceres Seq. ID no. 13615635
  misc_feature: MA Experiment ID: 108434 Result: Up-regulated in Transcription
  misc_feature: MA Experiment 108434 PARAMETER Experiment Name: At_Root_Tips_cDNA_P Parameter: Tissue Value: Root Tips
  misc_feature: MA Experiment ID: 108595 Result: Down-regulated in Transcription
  misc_feature: MA Experiment 108595 PARAMETER Experiment Name: At_Ler-pi_Ovule_cDNA_P Parameter: Plant Line Value: null
  misc_feature: MA Experiment ID: 20000111 Result: Down-regulated in Transcription
  misc_feature: MA Experiment 20000111 PARAMETER Experiment Name: At_42deg_Heat_cDNA_P Parameter: Temperature (deg C) Value: 42 vs. 22
  misc_feature: MA Experiment 20000111 PARAMETER Experiment Name: At_42deg_Heat_cDNA_P Parameter: Timepoint (hr) Value: 6
  misc_feature: MA Experiment 20000111 PARAMETER Experiment Name: At_42deg_Heat_cDNA_P Parameter: Tissue Value: Aerial
  misc_feature: MA Experiment ID: 20000113 Result: Down-regulated in Transcription
  misc_feature: MA Experiment 20000113 PARAMETER Experiment Name: At_42deg_Heat_cDNA_P Parameter: Temperature (deg C) Value: 42 vs. 22
  misc_feature: MA Experiment 20000113 PARAMETER Experiment Name: At_42deg_Heat_cDNA_P Parameter: Timepoint (hr) Value: 8
  misc_feature: MA Experiment 20000113 PARAMETER Experiment Name: At_42deg_Heat_cDNA_P Parameter: Tissue Value: Aerial
  misc_feature: MA Experiment ID: 20000173 Result: Down-regulated in Transcription
  misc_feature: MA Experiment 20000173 PARAMETER Experiment Name: At_42deg_Heat_P Parameter: Age (day) Value: 14
  misc_feature: MA Experiment 20000173 PARAMETER Experiment Name: At_42deg_Heat_P Parameter: Organism Value: A. thaliana
  misc_feature: MA Experiment 20000173 PARAMETER Experiment Name: At_42deg_Heat_P Parameter: Plant Line Value: WS
  misc_feature: MA Experiment 20000173 PARAMETER Experiment Name: At_42deg_Heat_P Parameter: Temperature (deg C) Value: 42 vs. 22
  misc_feature: MA Experiment 20000173 PARAMETER Experiment Name: At_42deg_Heat_P Parameter: Timepoint (hr) Value: 6
  misc_feature: MA Experiment 20000173 PARAMETER Experiment Name: At_42deg_Heat_P Parameter: Tissue Value: Aerial
  misc_feature: MA Experiment ID: 20000179 Result: Up-regulated in Transcription
  misc_feature: MA Experiment 20000179 PARAMETER Experiment Name: At_Germinating_Seeds_P Parameter: Age (hr) Value: 6 vs. 0
  misc_feature: MA Experiment 20000179 PARAMETER Experiment Name: At_Germinating_Seeds_P Parameter: Tissue Value: Germinating Seeds
  misc_feature: MA Experiment ID: 20000180 Result: Up-regulated in Transcription
  misc_feature: MA Experiment 20000180 PARAMETER Experiment Name: At_Germinating_Seeds_P Parameter: Age (hr) Value: 24 vs. 0
  misc_feature: MA Experiment 20000180 PARAMETER Experiment Name: At_Germinating_Seeds_P Parameter: Tissue Value: Germinating Seeds
  misc_feature: MA Experiment ID: 20001911 Result: Down-regulated in Transcription
  misc_feature: MA Experiment 20001911 PARAMETER Experiment Name: At_Drought_Reproduction_P Parameter: Age (day) Value: 40
  misc_feature: MA Experiment 20001911 PARAMETER Experiment Name: At_Drought_Reproduction_P Parameter: Organism Value: A. thaliana
  misc_feature: MA Experiment 20001911 PARAMETER Experiment Name: At_Drought_Reproduction_P Parameter: Plant Line Value: WS
  misc_feature: MA Experiment 20001911 PARAMETER Experiment Name: At_Drought_Reproduction_P Parameter: Timepoint (day) Value: 10
  misc_feature: MA Experiment 20001911 PARAMETER Experiment Name: At_Drought_Reproduction_P Parameter: Tissue Value: Flowers
  misc_feature: MA Experiment 20001911 PARAMETER Experiment Name: At_Drought_Reproduction_P Parameter: Treatment Value: Drought vs. No Drought
agattcaaacttgttcatcgaaattttgcttgaagattcgaatcgagaagtccgtggaagaggaagaagaagaagatgtctgtgcaagagtatttagacaagcatatgctttctcggaaaatcgaagacgccgttaatgccgccgtaagggctaaaacctcagatcccgttctcttcatcgctaatcatctgaagaaagctgtatcatctgtgataacgaaggttaaagcacgacagatccttgacagcagaggaattccaacagttgaagttgatctgcacacgaacaaaggcgtttttcgtgcttctgttcccagtggtgattcttctggaacgtatgaagctattgagctacgtgatggagacaaaggaatgtatcttggaaacagtgtggctaaagctgttaagaacataaatgaaaaaatttctgaggcgttgattggtatggacccaaaacttcagggtcagatagatcaggctatgatagatttggataaaactgaaaagaagagtgaacttggtgctaatgctatacttgctgtgtcaattgcggcatgcaaggctggagctgctgagaaagaggtccctttgtgcaagcatctttctgatcttagtggcagagcaaacatggtgttacctgtacctgcgttcactgttttgagtggtgggaagcatgcttcgaatacttttgccattcaggaaattatgattctcccaattggagcaagtagatttgaggaggccctgcaatggggatctgagacatatcatcatttaaaggctgtcatttcagaaaagaatggtggtttgggatgtaatgttggtgaagatggtggtcttgctccagatatctcgagcctcaaggaaggtttggagcttgtaaaagaagctatcaaccgaacagggtacaatgataagataaagatagccattgatattgccgccactaatttttgtttaggtaccaagtatgatttagatatcaagtctccaaataaatctgggcaaaatttcaagtcagcggaagatatgatagatatgtacaaagaaatttgtaatgattatccaattgtgtctatagaagacccttttgacaaggaggactgggaacacaccaagtatttttcgagtcttggaatatgtcaggtggtaggtgacgatttgttgatgtcaaattcaaaacgagttgagcgtgccatacaggagtcttcttgtaatgctcttcttctcaaggtgaatcagattggtacagtaacagaagccattgaagtagtgaaaatggcaagggatgcccagtggggtgtggtgacatctcatagatgtggagaaacagaggactctttcatctctgacttatctgtgggtctcgcaacaggtgtgattaaagctggtgctccttgcagaggagaacgtactatgaagtataaccagttgctacggatagaggaagagcttggggatcaagcagtgtatgctggagaagattggaagctatctctctaaacaaaatgcacatgtgatattaattgttacacttctcgtcttacttcattgttctcgagtctatttctcacgcagacaaattcttgtgtcttgaaagttcaaattttttgttgtttttgccaaatttaagaacaaacagaagtaaagagtgttaaacatgttttttac

SEQ ID NO: 104716 - protein, 475 aa, Arabidopsis thaliana; identical to SEQ ID NO: 42943
  peptide (1)..(475): Ceres Seq. ID no. 13615636
  misc_feature (184)..(475): Pfam Name: Enolase, C-terminal TIM barrel domain Pfam Description: Enolase, C-terminal TIM barrel domain
  misc_feature (1)..(475): Homolog of NCBI NO: 15227561 NR Description: enolase (2-phospho-D-glycerate hydroylase) [Arabidopsis thaliana] >gi|25291623|pir||G84697 hypothetical
  misc_feature (1)..(472): Homolog of NCBI NO: 34902014 NR Description: unknown protein [Oryza sativa (japonica
  misc_feature (2)..(472): Homolog of NCBI NO: 29650775 NR Description: enolase [Dunaliella salina]
  misc_feature (47)..(472): Homolog of NCBI NO: 37590349 NR Description: Unknown (protein for MGC:73152) [Danio rerio]
  misc_feature (47)..(472): Homolog of NCBI NO: 8919731 NR Description: enolase [Spinacia oleracea]
  misc_feature (47)..(472): Homolog of NCBI NO: 37589645 NR Description: Unknown (protein for MGC:73056) [Danio rerio]
  misc_feature (47)..(472): Homolog of NCBI NO: 6015090 NR Description: Gamma enolase (2-phospho-D-glycerate hydro-lyase)
  misc_feature (50)..(472): Homolog of NCBI NO: 7436883 NR Description: phosphopyruvate hydratase (EC 4.2.1.11) - common
  misc_feature (46)..(472): Homolog of NCBI NO: 3023702 NR Description: Enolase (2-phosphoglycerate dehydratase)
  misc_feature (47)..(472): Homolog of NCBI NO: 28277353 NR Description: Similar to enolase 3, beta muscle [Xenopus laevis]

SEQ ID NO: 104717 - protein, 465 aa, Arabidopsis thaliana; identical to SEQ ID NO: 42944
  peptide (1)..(465): Ceres Seq. ID no. 13615637
  misc_feature (174)..(465): Pfam Name: Enolase, C-terminal TIM barrel domain Pfam Description: Enolase, C-terminal TIM barrel domain
  misc_feature (1)..(465): Homolog of NCBI NO: 15227561 NR Description: enolase (2-phospho-D-glycerate hydroylase) [Arabidopsis thaliana] >gi|25291623|pir||G84697 hypothetical
  misc_feature (1)..(462): Homolog of NCBI NO: 34902014 NR Description: unknown protein [Oryza sativa (japonica
  misc_feature (1)..(462): Homolog of NCBI NO: 29650775 NR Description: enolase [Dunaliella salina]
  misc_feature (37)..(462): Homolog of NCBI NO: 37590349 NR Description: Unknown (protein for MGC:73152) [Danio rerio]
  misc_feature (37)..(462): Homolog of NCBI NO: 8919731 NR Description: enolase [Spinacia oleracea]
  misc_feature (37)..(462): Homolog of NCBI NO: 37589645 NR Description: Unknown (protein for MGC:73056) [Danio rerio]
  misc_feature (37)..(462): Homolog of NCBI NO: 6015090 NR Description: Gamma enolase (2-phospho-D-glycerate hydro-lyase)
  misc_feature (40)..(462): Homolog of NCBI NO: 7436883 NR Description: phosphopyruvate hydratase (EC 4.2.1.11) - common
  misc_feature (36)..(462): Homolog of NCBI NO: 3023702 NR Description: Enolase (2-phosphoglycerate dehydratase)
  misc_feature (37)..(462): Homolog of NCBI NO: 28277353 NR Description: Similar to enolase 3, beta muscle [Xenopus laevis]

SEQ ID NO: 104718 - protein, 376 aa, Arabidopsis thaliana; identical to SEQ ID NO: 42945
  peptide (1)..(376): Ceres Seq. ID no. 13615638
  misc_feature (85)..(376): Pfam Name: Enolase, C-terminal TIM barrel domain Pfam Description: Enolase, C-terminal TIM barrel domain
  misc_feature (1)..(376): Homolog of NCBI NO: 15227561 NR Description: enolase (2-phospho-D-glycerate hydroylase) [Arabidopsis thaliana] >gi|25291623|pir||G84697 hypothetical
  misc_feature (1)..(373): Homolog of NCBI NO: 34902014 NR Description: unknown protein [Oryza sativa (japonica
  misc_feature (1)..(373): Homolog of NCBI NO: 29650775 NR Description: enolase [Dunaliella salina]
  misc_feature (1)..(373): Homolog of NCBI NO: 37590349 NR Description: Unknown (protein for MGC:73152) [Danio rerio]
  misc_feature (1)..(373): Homolog of NCBI NO: 8919731 NR Description: enolase [Spinacia oleracea]
  misc_feature (1)..(373): Homolog of NCBI NO: 37589645 NR Description: Unknown (protein for MGC:73056) [Danio rerio]
  misc_feature (1)..(373): Homolog of NCBI NO: 6015090 NR Description: Gamma enolase (2-phospho-D-glycerate hydro-lyase)
  misc_feature (1)..(373): Homolog of NCBI NO: 7436883 NR Description: phosphopyruvate hydratase (EC 4.2.1.11) - common
  misc_feature (1)..(373): Homolog of NCBI NO: 3023702 NR Description: Enolase (2-phosphoglycerate dehydratase)
  misc_feature (1)..(373): Homolog of NCBI NO: 28277353 NR Description: Similar to enolase 3, beta muscle [Xenopus laevis]

SEQ ID NO: 104719 - DNA, 1131 bp, Arabidopsis thaliana
  misc_feature (1)..(1131): Ceres Seq. ID no. 13615639
  misc_feature: MA Experiment ID: 108434 Result: Up-regulated in Transcription
  misc_feature: MA Experiment 108434 PARAMETER Experiment Name: At_Root_Tips_cDNA_P Parameter: Tissue Value: Root Tips
  misc_feature: MA Experiment ID: 108461 Result: Up-regulated in Transcription
  misc_feature: MA Experiment 108461 PARAMETER Experiment Name: At_Germinating_Seeds_cDNA_P Parameter: Age (day) Value: 1 vs. 0
  misc_feature: MA Experiment 108461 PARAMETER Experiment Name: At_Germinating_Seeds_cDNA_P Parameter: Tissue Value: Germinating Seeds
  misc_feature: MA Experiment ID: 108463 Result: Down-regulated in Transcription
  misc_feature: MA Experiment 108463 PARAMETER Experiment Name: At_Germinating_Seeds_cDNA_P Parameter: Age (day) Value: 3 vs. 0
  misc_feature: MA Experiment 108463 PARAMETER Experiment Name: At_Germinating_Seeds_cDNA_P Parameter: Tissue Value: Germinating Seeds
  misc_feature: MA Experiment ID: 108464 Result: Down-regulated in Transcription
  misc_feature: MA Experiment 108464 PARAMETER Experiment Name: At_Germinating_Seeds_cDNA_P Parameter: Age (day) Value: 4 vs. 0
  misc_feature: MA Experiment 108464 PARAMETER Experiment Name: At_Germinating_Seeds_cDNA_P Parameter: Tissue Value: Germinating Seeds
  misc_feature: MA Experiment ID: 108501 Result: Up-regulated in Transcription
  misc_feature: MA Experiment 108501 PARAMETER Experiment Name: At_ap2_floral_buds_cDNA_P Parameter: Plant Line Value: ap2 (Ler.)
  misc_feature: MA Experiment 108501 PARAMETER Experiment Name: At_ap2_floral_buds_cDNA_P Parameter: Tissue Value: Closed Flower
  misc_feature: MA Experiment ID: 108573 Result: Down-regulated in Transcription
  misc_feature: MA Experiment 108573 PARAMETER Experiment Name: At_Drought_cDNA_P Parameter: Timepoint (hr) Value: 6
  misc_feature: MA Experiment 108573 PARAMETER Experiment Name: At_Drought_cDNA_P Parameter: Tissue Value: Aerial
  misc_feature: MA Experiment 108573 PARAMETER Experiment Name: At_Drought_cDNA_P Parameter: Treatment Value: Drought vs. No Drought
  misc_feature: MA Experiment ID: 108585 Result: Down-regulated in Transcription
  misc_feature: MA Experiment 108585 PARAMETER Experiment Name: At_5mM_NaNP_cDNA_P Parameter: Timepoint (hr) Value: 6
  misc_feature: MA Experiment 108585 PARAMETER Experiment Name: At_5mM_NaNP_cDNA_P Parameter: Tissue Value: Aerial
  misc_feature: MA Experiment 108585 PARAMETER Experiment Name: At_5mM_NaNP_cDNA_P Parameter: Treatment Value: null
  misc_feature: MA Experiment ID: 108595 Result: Down-regulated in Transcription
  misc_feature: MA Experiment 108595 PARAMETER Experiment Name: At_Ler-pi_Ovule_cDNA_P Parameter: Plant Line Value: null
  misc_feature: MA Experiment ID: 20000090 Result: Up-regulated in Transcription
  misc_feature: MA Experiment ID: 20000111 Result: Down-regulated in Transcription
  misc_feature: MA Experiment 20000111 PARAMETER Experiment Name: At_42deg_Heat_cDNA_P Parameter: Temperature (deg C) Value: 42 vs. 22
  misc_feature: MA Experiment 20000111 PARAMETER Experiment Name: At_42deg_Heat_cDNA_P Parameter: Timepoint (hr) Value: 6
  misc_feature: MA Experiment 20000111 PARAMETER Experiment Name: At_42deg_Heat_cDNA_P Parameter: Tissue Value: Aerial
  misc_feature: MA Experiment ID: 20000113 Result: Down-regulated in Transcription
  misc_feature: MA Experiment 20000113 PARAMETER Experiment Name: At_42deg_Heat_cDNA_P Parameter: Temperature (deg C) Value: 42 vs. 22
  misc_feature: MA Experiment 20000113 PARAMETER Experiment Name: At_42deg_Heat_cDNA_P Parameter: Timepoint (hr) Value: 8
  misc_feature: MA Experiment 20000113 PARAMETER Experiment Name: At_42deg_Heat_cDNA_P Parameter: Tissue Value: Aerial
  misc_feature: MA Experiment ID: 20000574 Result: Down-regulated in Transcription
  misc_feature: MA Experiment 20000574 PARAMETER Experiment Name: At_100uM_ABA_Mutants__P Parameter: Organism Value: A. thaliana
  misc_feature: MA Experiment 20000574 PARAMETER Experiment Name: At_100uM_ABA_Mutants__P Parameter: Plant Line Value: CS23 vs. Ler wt
  misc_feature: MA Experiment 20000574 PARAMETER Experiment Name: At_100uM_ABA_Mutants__P Parameter: Timepoint (hr) Value: N/A
  misc_feature: MA Experiment 20000574 PARAMETER Experiment Name: At_100uM_ABA_Mutants__P Parameter: Tissue Value: Whole Plant
  misc_feature: MA Experiment 20000574 PARAMETER Experiment Name: At_100uM_ABA_Mutants__P Parameter: Treatment Value: None
atcacttcccgctaacaattgcaatctcctcccagaaatttcaacagctctaaaaaccctaaccgtttcgattcacactctaacctttcgataatttcccagaagatgttggagcttcgtttagttcaaggttctctactgaagaaggttctagaagcggtcaaagatctggtgaacgatgcgaacttcgactgttcgaccacagggttctcgcttcaagctatggattcgagccatgtcgcgttggtgtctcttttgcttagatctgaaggtttcgagcactatagatgcgataggaacctctctatgggaatgaatcttggtaatatgtctaagatgctgaaatgtgctggaaatgatgatatcatcaccatcaaagctgatgatggtagcgacactgttactttcatgtttgagagtcccacacaagacaagattgcagattttgagatgaagctgatggatatcgacagtgagcatttaggaattcctgatgctgagtaccactcgattgtgagaatgccttctggtgaattttccaggatatgcaaagatctcagtagcattggtgacacagttgtgatctcggtaacaaaagaaggggtgaagttttcaacagcaggtgatatcgggacagcaaacattgtgctcaggcagaatactaccgtcgacaaacctgaagatgctattgtgatagagatgaacgagcctgtttcgctttcatttgcattgaggtacatgaactccttcacaaaggctactccattgtcggaaactgtgaccatcagtttgtcctctgagttaccggtcgtggtggagtacaaggtggctgagatgggttacattcgatactatctggcgcctaagattgaagaagaagaagacaccaaaccagaataatgatgaatgtttgatagtcttcgttcgagtcctttgttgaaatgtctgtcttgattcagttgttttctggatttactatcttaaggcaatgctaaactagataatcgtatgatgtttgtctttctgaaatttggaaaagcttgtttataacacttttcatctgtttgttaaacattgaagaaaaagaagacacgaagccctaaaacacgtttgtttgtggcttctgcaacc

SEQ ID NO: 104720 - protein, 264 aa, Arabidopsis thaliana
  peptide (1)..(264): Ceres Seq. ID no. 13615640
  misc_feature (127)..(254): Pfam Name: Proliferating cell nuclear antigen, C-terminal domain Pfam Description: Proliferating cell nuclear antigen, C-terminal
  misc_feature (1)..(264): Homolog of NCBI NO: 15227564 NR Description: proliferating cell nuclear antigen, PCNA -related thaliana] >gi|6225833|sp|Q9ZW35|PCN2_ARATH Proliferating cell
  misc_feature (1)..(263): Homolog of NCBI NO: 15222379 NR Description: proliferating cellular nuclear antigen thaliana] >gi|13124422|sp|Q9M7Q7|PCN1_ARATH Proliferating nuclear antigen 1 (PCNA 1) >gi|8778558|gb|AAF79566.1|AC022464_24
  misc_feature (1)..(263): Homolog of NCBI NO: 7207994 NR Description: proliferating cellular nuclear antigen
  misc_feature (1)..(262): Homolog of NCBI NO: 2499441 NR Description: PROLIFERATING CELL NUCLEAR ANTIGEN (PCNA)
  misc_feature (1)..(263): Homolog of NCBI NO: 6225836 NR Description: Proliferating cell nuclear antigen (PCNA) proliferating cell nuclear antigen [Nicotiana tabacum] proliferating cell nuclear antigen [Nicotiana tabacum]
  misc_feature (1)..(263): Homolog of NCBI NO: 10946427 NR Description: proliferating cell nuclear antigen [Nicotiana
  misc_feature (1)..(263): Homolog of NCBI NO: 129692 NR Description: PROLIFERATING CELL NUCLEAR ANTIGEN (PCNA) (CYCLIN)
  misc_feature (1)..(263): Homolog of NCBI NO: 3947727 NR Description: proliferating cell nuclear antigen [Nicotiana
  misc_feature (1)..(263): Homolog of NCBI NO: 25005275 NR Description: proliferating cell nuclear antigen [Lycopersicon
  misc_feature (1)..(263): Homolog of NCBI NO: 100160 NR Description: proliferating cell nuclear antigen (clone 4.10) -
MLELRLVQGSLLKKVLEAVKDLVNDANFDCSTTGFSLQAMDSSHVALVSLLLRSEGFEHYRCDRNLSMGMNLGNMSKMLKCAGNDDIITIKADDGSDTVTFMFESPTQDKIADFEMKLMDIDSEHLGIPDAEYHSIVRMPSGEFSRICKDLSSIGDTVVISVTKEGVKFSTAGDIGTANIVLRQNTTVDKPEDAIVIEMNEPVSLSFALRYMNSFTKATPLSETVTISLSSELPVVVEYKVAEMGYIRYYLAPKIEEEEDTKPE

SEQ ID NO: 104721 - protein, 225 aa, Arabidopsis thaliana
  peptide (1)..(225): Ceres Seq. ID no. 13615641
  misc_feature (88)..(215): Pfam Name: Proliferating cell nuclear antigen, C-terminal domain Pfam Description: Proliferating cell nuclear antigen, C-terminal
  misc_feature (1)..(225): Homolog of NCBI NO: 15227564 NR Description: proliferating cell nuclear antigen, PCNA -related thaliana] >gi|6225833|sp|Q9ZW35|PCN2_ARATH Proliferating cell
  misc_feature (1)..(224): Homolog of NCBI NO: 15222379 NR Description: proliferating cellular nuclear antigen thaliana] >gi|13124422|sp|Q9M7Q7|PCN1_ARATH Proliferating nuclear antigen 1 (PCNA 1) >gi|8778558|gb|AAF79566.1|AC022464_24
  misc_feature (1)..(224): Homolog of NCBI NO: 7207994 NR Description: proliferating cellular nuclear antigen
  misc_feature (1)..(223): Homolog of NCBI NO: 2499441 NR Description: PROLIFERATING CELL NUCLEAR ANTIGEN (PCNA)
  misc_feature (1)..(224): Homolog of NCBI NO: 6225836 NR Description: Proliferating cell nuclear antigen (PCNA) proliferating cell nuclear antigen [Nicotiana tabacum] proliferating cell nuclear antigen [Nicotiana tabacum]
  misc_feature (1)..(224): Homolog of NCBI NO: 10946427 NR Description: proliferating cell nuclear antigen [Nicotiana
  misc_feature (1)..(224): Homolog of NCBI NO: 129692 NR Description: PROLIFERATING CELL NUCLEAR ANTIGEN (PCNA) (CYCLIN)
  misc_feature (1)..(224): Homolog of NCBI NO: 3947727 NR Description: proliferating cell nuclear antigen [Nicotiana
  misc_feature (1)..(224): Homolog of NCBI NO: 25005275 NR Description: proliferating cell nuclear antigen [Lycopersicon
  misc_feature (1)..(224): Homolog of NCBI NO: 100160 NR Description: proliferating cell nuclear antigen (clone 4.10) -
MDSSHVALVSLLLRSEGFEHYRCDRNLSMGMNLGNMSKMLKCAGNDDIITIKADDGSDTVTFMFESPTQDKIADFEMKLMDIDSEHLGIPDAEYHSIVRMPSGEFSRICKDLSSIGDTVVISVTKEGVKFSTAGDIGTANIVLRQNTTVDKPEDAIVIEMNEPVSLSFALRYMNSFTKATPLSETVTISLSSELPVVVEYKVAEMGYIRYYLAPKIEEEEDTKPE

SEQ ID NO: 104722 - protein, 197 aa, Arabidopsis thaliana
  peptide (1)..(197): Ceres Seq. ID no. 13615642
  misc_feature (60)..(187): Pfam Name: Proliferating cell nuclear antigen, C-terminal domain Pfam Description: Proliferating cell nuclear antigen, C-terminal
  misc_feature (1)..(197): Homolog of NCBI NO: 15227564 NR Description: proliferating cell nuclear antigen, PCNA -related thaliana] >gi|6225833|sp|Q9ZW35|PCN2_ARATH Proliferating cell
  misc_feature (1)..(196): Homolog of NCBI NO: 15222379 NR Description: proliferating cellular nuclear antigen thaliana] >gi|13124422|sp|Q9M7Q7|PCN1_ARATH Proliferating nuclear antigen 1 (PCNA 1) >gi|8778558|gb|AAF79566.1|AC022464_24
  misc_feature (1)..(196): Homolog of NCBI NO: 7207994 NR Description: proliferating cellular nuclear antigen
  misc_feature (1)..(195): Homolog of NCBI NO: 2499441 NR Description: PROLIFERATING CELL NUCLEAR ANTIGEN (PCNA)
  misc_feature (1)..(196): Homolog of NCBI NO: 6225836 NR Description: Proliferating cell nuclear antigen (PCNA) proliferating cell nuclear antigen [Nicotiana tabacum] proliferating cell nuclear antigen [Nicotiana tabacum]
  misc_feature (1)..(196): Homolog of NCBI NO: 10946427 NR Description: proliferating cell nuclear antigen [Nicotiana
  misc_feature (1)..(196): Homolog of NCBI NO: 129692 NR Description: PROLIFERATING CELL NUCLEAR ANTIGEN (PCNA) (CYCLIN)
  misc_feature (1)..(196): Homolog of NCBI NO: 3947727 NR Description: proliferating cell nuclear antigen [Nicotiana
  misc_feature (1)..(196): Homolog of NCBI NO: 25005275 NR Description: proliferating cell nuclear antigen [Lycopersicon
  misc_feature (1)..(196): Homolog of NCBI NO: 100160 NR Description: proliferating cell nuclear antigen (clone 4.10) -
MGMNLGNMSKMLKCAGNDDIITIKADDGSDTVTFMFESPTQDKIADFEMKLMDIDSEHLGIPDAEYHSIVRMPSGEFSRICKDLSSIGDTVVISVTKEGVKFSTAGDIGTANIVLRQNTTVDKPEDAIVIEMNEPVSLSFALRYMNSFTKATPLSETVTISLSSELPVVVEYKVAEMGYIRYYLAPKIEEEEDTKPE

SEQ ID NO: 104723 - DNA, 1671 bp, Arabidopsis thaliana
  misc_feature (1)..(1671): Ceres Seq. ID no. 13615647
  misc_feature: MA Experiment ID: 108434 Result: Down-regulated in Transcription
  misc_feature: MA Experiment 108434 PARAMETER Experiment Name: At_Root_Tips_cDNA_P Parameter: Tissue Value: Root Tips
  misc_feature: MA Experiment ID: 108461 Result: Up-regulated in Transcription
  misc_feature: MA Experiment 108461 PARAMETER Experiment Name: At_Germinating_Seeds_cDNA_P Parameter: Age (day) Value: 1 vs. 0
  misc_feature: MA Experiment 108461 PARAMETER Experiment Name: At_Germinating_Seeds_cDNA_P Parameter: Tissue Value: Germinating Seeds
  misc_feature: MA Experiment ID: 108462 Result: Up-regulated in Transcription
  misc_feature: MA Experiment 108462 PARAMETER Experiment Name: At_Germinating_Seeds_cDNA_P Parameter: Age (day) Value: 2 vs. 0
  misc_feature: MA Experiment 108462 PARAMETER Experiment Name: At_Germinating_Seeds_cDNA_P Parameter: Tissue Value: Germinating Seeds
  misc_feature: MA Experiment ID: 108463 Result: Up-regulated in Transcription
  misc_feature: MA Experiment 108463 PARAMETER Experiment Name: At_Germinating_Seeds_cDNA_P Parameter: Age (day) Value: 3 vs. 0
  misc_feature: MA Experiment 108463 PARAMETER Experiment Name: At_Germinating_Seeds_cDNA_P Parameter: Tissue Value: Germinating Seeds
  misc_feature: MA Experiment ID: 108464 Result: Up-regulated in Transcription
  misc_feature: MA Experiment 108464 PARAMETER Experiment Name: At_Germinating_Seeds_cDNA_P Parameter: Age (day) Value: 4 vs. 0
  misc_feature: MA Experiment 108464 PARAMETER Experiment Name: At_Germinating_Seeds_cDNA_P Parameter: Tissue Value: Germinating Seeds
aacgaggctgtggagaaaagaaccaaaggtgactgttgttagagatgaggaatgcagagctcatcttcatcccaacaccaactgttggtcatcttgttccgtttcttgaatttgctaggcgtctcattgagcaggatgatagaatccgtatcaccttcctcttgatgaagcaacaaggtcagtctcatctggattcctatgttaagacaatttcctcgtctctgccgtttgttagatttattgatgtccctgagttagaggagaaaccaacacttggtacacagtctgtggaagcctatgtgtacgattttattgaaacaaatgtccctcttgtgcaaaatataatcatgggtatcctatcttctcctgcatttgatggagttacggtcaagggattcgttgctgattttttctgtctcccgatgattgatgttgcaaaagatgcaagtcttcctttttatgtgttcttgacttcaaattccggattcctagctatgatgcagtatctggcatatggacataagaaagatacctcagtttttgcaagaaactctgaagaaatgttgtcaattcctggatttgtaaaccctgtcccagccaaagtactgccgtcagctctgtttattgaggatggttatgatgctgacgttaaactggctatattgtttacaaaggctaatggaatcctagtgaatacctcctttgatattgagcctacctctctgaatcattttcttggagaagagaattacccttctgtttatgctgttggccccatatttaacccgaaggcccatcctcatccagatcaagacctcgcctgttgtgacgagtcgatgaaatggcttgatgctcaacccgaggcatcagttgtattcctttgttttgggagtatgggtagcttaagaggtcctctagtgaaggaaatagcacatggacttgagctatgtcagtatagattcctctggtcactccgcacagaagaagtgacaaatgatgatcttttgccagagggattcatggaccgtgtcagtggacggggaatgatatgcggttggtctcctcaggtggaaatactggcccataaagcagtgggaggttttgtttctcattgtggatggaactcaatagtagagagtttatggtttggtgtgccaattgtgacatggccaatgtatgcagagcaacagctcaatgcgtttctgatggtgaaggaactgaagctcgcagtggagctgaaactcgattatagtgtacatagtggtgagattgtaagtgcaaacgagatagagacagcgatttcttgtgtaatgaacaaggataataatgttgtgaggaaacgagtgatggatatctcgcagatgatccagagagctacgaagaatggtggatcttcgtttgccgcaattgagaaattcatacatgacgtgataggaaccaggacttagcctttcttatcggattctccataaactgtaacctgattatgcaacagtcctttgaatctgctttgtttctaatatttttttctattcttttgtcatcagctttgcttttaactttgtctgtgttgattcctttatctaccaagctgtgagtttctttgttagccaatgctgcatttcttctgttatggattttgttcaaaattgggtacatctcttattcttt

SEQ ID NO: 104724 - protein, 467 aa, Arabidopsis thaliana
  peptide (1)..(467): Ceres Seq. ID no. 13615648
  misc_feature (4)..(466): Pfam Name: UDP-glucoronosyl and UDP-glucosyl transferase Pfam Description: UDP-glucoronosyl and UDP-glucosyl transferase
  misc_feature (1)..(467): Homolog of NCBI NO: 15227606 NR Description: UDP-glycosyltransferase family [Arabidopsis
  misc_feature (1)..(467): Homolog of NCBI NO: 21555082 NR Description: putative flavonol 3-O-glucosyltransferase
  misc_feature (1)..(466): Homolog of NCBI NO: 15227610 NR Description: UDP-glycosyltransferase family [Arabidopsis
  misc_feature (1)..(464): Homolog of NCBI NO: 15222344 NR Description: UDP-glycosyltransferase family [Arabidopsis
  misc_feature (4)..(464): Homolog of NCBI NO: 15222348 NR Description: UDP-glycosyltransferase family [Arabidopsis
  misc_feature (1)..(462): Homolog of NCBI NO: 30680040 NR Description: glycosyltransferase family [Arabidopsis thaliana]
  misc_feature (1)..(459): Homolog of NCBI NO: 15227613 NR Description: glycosyltransferase family [Arabidopsis thaliana]
  misc_feature (1)..(463): Homolog of NCBI NO: 15227616 NR Description: glycosyltransferase family [Arabidopsis thaliana]
  misc_feature (21)..(462): Homolog of NCBI NO: 21954072 NR Description: putative UDP-glucose glucosyltransferase
  misc_feature (1)..(463): Homolog of NCBI NO: 20146091 NR Description: glucosyltransferase NTGT3 [Nicotiana tabacum]
MRNAELIFIPTPTVGHLVPFLEFARRLIEQDDRIRITFLLMKQQGQSHLDSYVKTISSSLPFVRFIDVPELEEKPTLGTQSVEAYVYDFIETNVPLVQNIIMGILSSPAFDGVTVKGFVADFFCLPMIDVAKDASLPFYVFLTSNSGFLAMMQYLAYGHKKDTSVFARNSEEMLSIPGFVNPVPAKVLPSALFIEDGYDADVKLAILFTKANGILVNTSFDIEPTSLNHFLGEENYPSVYAVGPIFNPKAHPHPDQDLACCDESMKWLDAQPEASVVFLCFGSMGSLRGPLVKEIAHGLELCQYRFLWSLRTEEVTNDDLLPEGFMDRVSGRGMICGWSPQVEILAHKAVGGFVSHCGWNSIVESLWFGVPIVTWPMYAEQQLNAFLMVKELKLAVELKLDYSVHSGEIVSANEIETAISCVMNKDNNVVRKRVMDISQMIQRATKNGGSSFAAIEKFIHDVIGTRT

SEQ ID NO: 104725 - protein, 427 aa, Arabidopsis thaliana
  peptide (1)..(427): Ceres Seq. ID no. 13615649
  misc_feature (1)..(426): Pfam Name: UDP-glucoronosyl and UDP-glucosyl transferase Pfam Description: UDP-glucoronosyl and UDP-glucosyl transferase
  misc_feature (1)..(427): Homolog of NCBI NO: 15227606 NR Description: UDP-glycosyltransferase family [Arabidopsis
  misc_feature (1)..(427): Homolog of NCBI NO: 21555082 NR Description: putative flavonol 3-O-glucosyltransferase
  misc_feature (1)..(426): Homolog of NCBI NO: 15227610 NR Description: UDP-glycosyltransferase family [Arabidopsis
  misc_feature (1)..(424): Homolog of NCBI NO: 15222344 NR Description: UDP-glycosyltransferase family [Arabidopsis
  misc_feature (1)..(424): Homolog of NCBI NO: 15222348 NR Description: UDP-glycosyltransferase family [Arabidopsis
  misc_feature (1)..(422): Homolog of NCBI NO: 30680040 NR Description: glycosyltransferase family [Arabidopsis thaliana]
  misc_feature (1)..(419): Homolog of NCBI NO: 15227613 NR Description: glycosyltransferase family [Arabidopsis thaliana]
  misc_feature (1)..(423): Homolog of NCBI NO: 15227616 NR Description: glycosyltransferase family [Arabidopsis thaliana]
  misc_feature (1)..(422): Homolog of NCBI NO: 21954072 NR Description: putative UDP-glucose glucosyltransferase
  misc_feature (1)..(423): Homolog of NCBI NO: 20146091 NR Description: glucosyltransferase NTGT3 [Nicotiana tabacum]
MKQQGQSHLDSYVKTISSSLPFVRFIDVPELEEKPTLGTQSVEAYVYDFIETNVPLVQNIIMGILSSPAFDGVTVKGFVADFFCLPMIDVAKDASLPFYVFLTSNSGFLAMMQYLAYGHKKDTSVFARNSEEMLSIPGFVNPVPAKVLPSALFIEDGYDADVKLAILFTKANGILVNTSFDIEPTSLNHFLGEENYPSVYAVGPIFNPKAHPHPDQDLACCDESMKWLDAQPEASVVFLCFGSMGSLRGPLVKEIAHGLELCQYRFLWSLRTEEVTNDDLLPEGFMDRVSGRGMICGWSPQVEILAHKAVGGFVSHCGWNSIVESLWFGVPIVTWPMYAEQQLNAFLMVKELKLAVELKLDYSVHSGEIVSANEIETAISCVMNKDNNVVRKRVMDISQMIQRATKNGGSSFAAIEKFIHDVIGTRT

SEQ ID NO: 104726 - protein, 366 aa, Arabidopsis thaliana
  peptide (1)..(366): Ceres Seq. ID no. 13615650
  misc_feature (1)..(365): Pfam Name: UDP-glucoronosyl and UDP-glucosyl transferase Pfam Description: UDP-glucoronosyl and UDP-glucosyl transferase
  misc_feature (1)..(366): Homolog of NCBI NO: 15227606 NR Description: UDP-glycosyltransferase family [Arabidopsis
  misc_feature (1)..(366): Homolog of NCBI NO: 21555082 NR Description: putative flavonol 3-O-glucosyltransferase
  misc_feature (1)..(365): Homolog of NCBI NO: 15227610 NR Description: UDP-glycosyltransferase family [Arabidopsis
  misc_feature (1)..(363): Homolog of NCBI NO: 15222344 NR Description: UDP-glycosyltransferase family [Arabidopsis
  misc_feature (1)..(363): Homolog of NCBI NO: 15222348 NR Description: UDP-glycosyltransferase family [Arabidopsis
  misc_feature (1)..(361): Homolog of NCBI NO: 30680040 NR Description: glycosyltransferase family [Arabidopsis thaliana]
  misc_feature (1)..(358): Homolog of NCBI NO: 15227613 NR Description: glycosyltransferase family [Arabidopsis thaliana]
  misc_feature (1)..(362): Homolog of NCBI NO: 15227616 NR Description: glycosyltransferase family [Arabidopsis thaliana]
  misc_feature (1)..(361): Homolog of NCBI NO: 21954072 NR Description: putative UDP-glucose glucosyltransferase
  misc_feature (1)..(362): Homolog of NCBI NO: 20146091 NR Description: glucosyltransferase NTGT3 [Nicotiana tabacum]
MGILSSPAFDGVTVKGFVADFFCLPMIDVAKDASLPFYVFLTSNSGFLAMMQYLAYGHKKDTSVFARNSEEMLSIPGFVNPVPAKVLPSALFIEDGYDADVKLAILFTKANGILVNTSFDIEPTSLNHFLGEENYPSVYAVGPIFNPKAHPHPDQDLACCDESMKWLDAQPEASVVFLCFGSMGSLRGPLVKEIAHGLELCQYRFLWSLRTEEVTNDDLLPEGFMDRVSGRGMICGWSPQVEILAHKAVGGFVSHCGWNSIVESLWFGVPIVTWPMYAEQQLNAFLMVKELKLAVELKLDYSVHSGEIVSANEIETAISCVMNKDNNVVRKRVMDISQMIQRATKNGGSSFAAIEKFIHDVIGTRT

SEQ ID NO: 104727 - DNA, 1527 bp, Arabidopsis thaliana
  misc_feature (1)..(1527): Ceres Seq. ID no. 13615651
  misc_feature: MA Experiment ID: 108434 Result: Down-regulated in Transcription
  misc_feature: MA Experiment 108434 PARAMETER Experiment Name: At_Root_Tips_cDNA_P Parameter: Tissue Value: Root Tips
  misc_feature: MA Experiment ID: 108461 Result: Up-regulated in Transcription
  misc_feature: MA Experiment 108461 PARAMETER Experiment Name: At_Germinating_Seeds_cDNA_P Parameter: Age (day) Value: 1 vs. 0
  misc_feature: MA Experiment 108461 PARAMETER Experiment Name: At_Germinating_Seeds_cDNA_P Parameter: Tissue Value: Germinating Seeds
  misc_feature: MA Experiment ID: 108462 Result: Up-regulated in Transcription
  misc_feature: MA Experiment 108462 PARAMETER Experiment Name: At_Germinating_Seeds_cDNA_P Parameter: Age (day) Value: 2 vs. 0
  misc_feature: MA Experiment 108462 PARAMETER Experiment Name: At_Germinating_Seeds_cDNA_P Parameter: Tissue Value: Germinating Seeds
  misc_feature: MA Experiment ID: 108463 Result: Up-regulated in Transcription
  misc_feature: MA Experiment 108463 PARAMETER Experiment Name: At_Germinating_Seeds_cDNA_P Parameter: Age (day) Value: 3 vs. 0
  misc_feature: MA Experiment 108463 PARAMETER Experiment Name: At_Germinating_Seeds_cDNA_P Parameter: Tissue Value: Germinating Seeds
  misc_feature: MA Experiment ID: 108464 Result: Up-regulated in Transcription
  misc_feature: MA Experiment 108464 PARAMETER Experiment Name: At_Germinating_Seeds_cDNA_P Parameter: Age (day) Value: 4 vs. 0
  misc_feature: MA Experiment 108464 PARAMETER Experiment Name: At_Germinating_Seeds_cDNA_P Parameter: Tissue Value: Germinating Seeds
  misc_feature: MA Experiment ID: 108469 Result: Up-regulated in Transcription
  misc_feature: MA Experiment ID: 108585 Result: Up-regulated in Transcription
  misc_feature: MA Experiment 108585 PARAMETER Experiment Name: At_5mM_NaNP_cDNA_P Parameter: Timepoint (hr) Value: 6
  misc_feature: MA Experiment 108585 PARAMETER Experiment Name: At_5mM_NaNP_cDNA_P Parameter: Tissue Value: Aerial
  misc_feature: MA Experiment 108585 PARAMETER Experiment Name: At_5mM_NaNP_cDNA_P Parameter: Treatment Value: null
  misc_feature: MA Experiment ID: 108668 Result: Up-regulated in Transcription
  misc_feature: MA Experiment 108668 PARAMETER Experiment Name: At_2mM_SA_cDNA_P Parameter: Plant Line Value: WS
  misc_feature: MA Experiment 108668 PARAMETER Experiment Name: At_2mM_SA_cDNA_P Parameter: Timepoint (hr) Value: 6
  misc_feature: MA Experiment 108668 PARAMETER Experiment Name: At_2mM_SA_cDNA_P Parameter: Treatment Value: 2mM SA vs. No Treatment
  misc_feature: MA Experiment ID: 20000069 Result: Down-regulated in Transcription
  misc_feature: MA Experiment 20000069 PARAMETER Experiment Name: At_100uM_ABA_Mutants_cDNA_P Parameter: Plant Line Value: CS23
  misc_feature: MA Experiment 20000069 PARAMETER Experiment Name: At_100uM_ABA_Mutants_cDNA_P Parameter: Timepoint (hr) Value: 6
  misc_feature: MA Experiment 20000069 PARAMETER Experiment Name: At_100uM_ABA_Mutants_cDNA_P Parameter: Tissue Value: Aerial
  misc_feature: MA Experiment 20000069 PARAMETER Experiment Name: At_100uM_ABA_Mutants_cDNA_P Parameter: Treatment Value: 100uM ABA vs. No Treatment
  misc_feature: MA Experiment ID: 20000087 Result: Down-regulated in Transcription
  misc_feature: MA Experiment 20000087 PARAMETER Experiment Name: At_100uM_ABA_Mutants_cDNA_P Parameter: Plant Line Value: WS
  misc_feature: MA Experiment 20000087 PARAMETER Experiment Name: At_100uM_ABA_Mutants_cDNA_P Parameter: Timepoint (hr) Value: 6
  misc_feature: MA Experiment 20000087 PARAMETER Experiment Name: At_100uM_ABA_Mutants_cDNA_P Parameter: Tissue Value: Aerial
  misc_feature: MA Experiment 20000087 PARAMETER Experiment Name: At_100uM_ABA_Mutants_cDNA_P Parameter: Treatment Value: 100uM ABA vs. No Treatment
  misc_feature: MA Experiment ID: 20000169 Result: Down-regulated in Transcription
  misc_feature: MA Experiment 20000169 PARAMETER Experiment Name: At_100uM_ABA_P Parameter: Age (day) Value: 14
  misc_feature: MA Experiment 20000169 PARAMETER Experiment Name: At_100uM_ABA_P Parameter: Organism Value: A. thaliana
  misc_feature: MA Experiment 20000169 PARAMETER Experiment Name: At_100uM_ABA_P Parameter: Plant Line Value: WS
  misc_feature: MA Experiment 20000169 PARAMETER Experiment Name: At_100uM_ABA_P Parameter: Timepoint (hr) Value: 6
  misc_feature: MA Experiment 20000169 PARAMETER Experiment Name: At_100uM_ABA_P Parameter: Tissue Value: Aerial
  misc_feature: MA Experiment 20000169 PARAMETER Experiment Name: At_100uM_ABA_P Parameter: Treatment Value: 100uM ABA vs. No Treatment
  misc_feature: MA Experiment ID: 20000173 Result: Down-regulated in Transcription
  misc_feature: MA Experiment 20000173 PARAMETER Experiment Name: At_42deg_Heat_P Parameter: Age (day) Value: 14
  misc_feature: MA Experiment 20000173 PARAMETER Experiment Name: At_42deg_Heat_P Parameter: Organism Value: A. thaliana
  misc_feature: MA Experiment 20000173 PARAMETER Experiment Name: At_42deg_Heat_P Parameter: Plant Line Value: WS
  misc_feature: MA Experiment 20000173 PARAMETER Experiment Name: At_42deg_Heat_P Parameter: Temperature (deg C) Value: 42 vs. 22
  misc_feature: MA Experiment 20000173 PARAMETER Experiment Name: At_42deg_Heat_P Parameter: Timepoint (hr) Value: 6
  misc_feature: MA Experiment 20000173 PARAMETER Experiment Name: At_42deg_Heat_P Parameter: Tissue Value: Aerial
  misc_feature: MA Experiment ID: 20000182 Result: Up-regulated in Transcription
  misc_feature: MA Experiment 20000182 PARAMETER Experiment Name: At_2mM_SA_P Parameter: Age (day) Value: 14
  misc_feature: MA Experiment 20000182 PARAMETER Experiment Name: At_2mM_SA_P Parameter: Organism Value: A. thaliana
  misc_feature: MA Experiment 20000182 PARAMETER Experiment Name: At_2mM_SA_P Parameter: Plant Line Value: WS
  misc_feature: MA Experiment 20000182 PARAMETER Experiment Name: At_2mM_SA_P Parameter: Timepoint (hr) Value: 6
  misc_feature: MA Experiment 20000182 PARAMETER Experiment Name: At_2mM_SA_P Parameter: Tissue Value: Aerial
  misc_feature: MA Experiment 20000182 PARAMETER Experiment Name: At_2mM_SA_P Parameter: Treatment Value: 2mM SA vs. No Treatment
  misc_feature: MA Experiment ID: 20000185 Result: Down-regulated in Transcription
  misc_feature: MA Experiment 20000185 PARAMETER Experiment Name: At_Roots__P Parameter: Age (day) Value: 7 vs. 21
  misc_feature: MA Experiment 20000185 PARAMETER Experiment Name: At_Roots__P Parameter: Organism Value: A. thaliana
  misc_feature: MA Experiment 20000185 PARAMETER Experiment Name: At_Roots__P Parameter: Tissue Value: Roots vs. Whole Plant
  misc_feature: MA Experiment ID: 20000213 Result: Up-regulated in Transcription
  misc_feature: MA Experiment 20000213 PARAMETER Experiment Name: At_4deg_Cold_P Parameter: Timepoint (hr) Value: 2
  misc_feature: MA Experiment ID: 20000224 Result: Up-regulated in Transcription
  misc_feature: MA Experiment ID: 20000234 Result: Down-regulated in Transcription
  misc_feature: MA Experiment 20000234 PARAMETER Experiment Name: At_Siliques_P Parameter: Age (day) Value: 21
  misc_feature: MA Experiment 20000234 PARAMETER Experiment Name: At_Siliques_P Parameter: Organism Value: A. thaliana
  misc_feature: MA Experiment 20000234 PARAMETER Experiment Name: At_Siliques_P Parameter: Plant Line Value: WS
  misc_feature: MA Experiment 20000234 PARAMETER Experiment Name: At_Siliques_P Parameter: Tissue Value: Less Than 5mm Siliques vs. Whole Plant
  misc_feature: MA Experiment ID: 20000265 Result: Down-regulated in Transcription
  misc_feature: MA Experiment 20000265 PARAMETER Experiment Name: At_Open_Flower_P Parameter: Age (day) Value: 21
  misc_feature: MA Experiment 20000265 PARAMETER Experiment Name: At_Open_Flower_P Parameter: Plant Line Value: WS
  misc_feature: MA Experiment 20000265 PARAMETER Experiment Name: At_Open_Flower_P Parameter: Tissue Value: Closed Flower vs. Whole Plant
  misc_feature: MA Experiment ID: 20000286 Result: Down-regulated in Transcription
  misc_feature: MA Experiment 20000286 PARAMETER Experiment Name: At_Open_Flower_P Parameter: Age (day) Value: 21
  misc_feature: MA Experiment 20000286 PARAMETER Experiment Name: At_Open_Flower_P Parameter: Plant Line Value: WS
  misc_feature: MA Experiment 20000286 PARAMETER Experiment Name: At_Open_Flower_P Parameter: Tissue Value: Half Open vs. Whole Plant
  misc_feature: MA Experiment ID: 20000439 Result: Down-regulated in Transcription
  misc_feature: MA Experiment 20000439 PARAMETER Experiment Name: At_Roots__P Parameter: Age (day) Value: 14 vs. 21
  misc_feature: MA Experiment 20000439 PARAMETER Experiment Name: At_Roots__P Parameter: Organism Value: A. thaliana
  misc_feature: MA Experiment 20000439 PARAMETER Experiment Name: At_Roots__P Parameter: Tissue Value: Roots vs. Whole Plant
  misc_feature: MA Experiment ID: 20000453 Result: Down-regulated in Transcription
  misc_feature: MA Experiment 20000453 PARAMETER Experiment Name: At_100uM_ABA_P Parameter: Age (day) Value: 15
  misc_feature: MA Experiment 20000453 PARAMETER Experiment Name: At_100uM_ABA_P Parameter: Organism Value: A. thaliana
  misc_feature: MA Experiment 20000453 PARAMETER Experiment Name: At_100uM_ABA_P Parameter: Plant Line Value: WS
  misc_feature: MA Experiment 20000453 PARAMETER Experiment Name: At_100uM_ABA_P Parameter: Timepoint (hr) Value: 24
  misc_feature: MA Experiment 20000453 PARAMETER Experiment Name: At_100uM_ABA_P Parameter: Tissue Value: Aerial
  misc_feature: MA Experiment 20000453 PARAMETER Experiment Name: At_100uM_ABA_P Parameter: Treatment Value: 100uM ABA vs. No Treatment
  misc_feature: MA Experiment ID: 20000606 Result: Up-regulated in Transcription
  misc_feature: MA Experiment 20000606 PARAMETER Experiment Name: At_CS8548_Mutant_P Parameter: Age (day) Value: 14
  misc_feature: MA Experiment 20000606 PARAMETER Experiment Name: At_CS8548_Mutant_P Parameter: Plant Line Value: CS8548 vs. wt
  misc_feature: MA Experiment 20000606 PARAMETER Experiment Name: At_CS8548_Mutant_P Parameter: Tissue Value: Whole Plant
  misc_feature: MA Experiment ID: 20000794 Result: Down-regulated in Transcription
  misc_feature: MA Experiment 20000794 PARAMETER Experiment Name: At_Petals_P Parameter: Age (day) Value: 23-25 days
  misc_feature: MA Experiment 20000794 PARAMETER Experiment Name: At_Petals_P Parameter: Plant Line Value: WS
  misc_feature: MA Experiment 20000794 PARAMETER Experiment Name: At_Petals_P Parameter: Tissue Value: Petals vs. Whole plant
  misc_feature: MA Experiment ID: 20001248 Result: Up-regulated in Transcription
  misc_feature: MA Experiment 20001248 PARAMETER Experiment Name: At_Far-red-induction_P Parameter: Age (day) Value: 7
  misc_feature: MA Experiment 20001248 PARAMETER Experiment Name: At_Far-red-induction_P Parameter: Light Value: Far-red vs. White
  misc_feature: MA Experiment 20001248 PARAMETER Experiment Name: At_Far-red-induction_P Parameter: Organism Value: A. thaliana
  misc_feature: MA Experiment 20001248 PARAMETER Experiment Name: At_Far-red-induction_P Parameter: Plant Line Value: Columbia
  misc_feature: MA Experiment 20001248 PARAMETER Experiment Name: At_Far-red-induction_P Parameter: Timepoint (hr) Value: 4
  misc_feature: MA Experiment 20001248 PARAMETER Experiment Name: At_Far-red-induction_P Parameter: Tissue Value: Whole Plant
  misc_feature: MA Experiment ID: 20001556 Result: Down-regulated in Transcription
  misc_feature: MA Experiment 20001556 PARAMETER Experiment Name: At_Drought_Soil_Dry_P Parameter: Age (day) Value: 26
  misc_feature: MA Experiment 20001556 PARAMETER Experiment Name: At_Drought_Soil_Dry_P Parameter: Organism Value: A. thaliana
  misc_feature: MA Experiment 20001556 PARAMETER Experiment Name: At_Drought_Soil_Dry_P Parameter: Plant Line Value: WS
  misc_feature: MA Experiment 20001556 PARAMETER Experiment Name: At_Drought_Soil_Dry_P Parameter: Post Timepoint (hr) Value: None
  misc_feature: MA Experiment 20001556 PARAMETER Experiment Name: At_Drought_Soil_Dry_P Parameter: Post-Treatment Value: None
  misc_feature: MA Experiment 20001556 PARAMETER Experiment Name: At_Drought_Soil_Dry_P Parameter: Timepoint (day) Value: 12
  misc_feature: MA Experiment 20001556 PARAMETER Experiment Name: At_Drought_Soil_Dry_P Parameter: Treatment Value: Drought vs. No Drought
  misc_feature: MA Experiment ID: 20001558 Result: Down-regulated in Transcription
  misc_feature: MA Experiment 20001558 PARAMETER Experiment Name: At_Drought_Soil_Dry_P Parameter: Age (day) Value: 27
  misc_feature: MA Experiment 20001558 PARAMETER Experiment Name: At_Drought_Soil_Dry_P Parameter: Organism Value: A. thaliana
  misc_feature: MA Experiment 20001558 PARAMETER Experiment Name: At_Drought_Soil_Dry_P Parameter: Plant Line Value: WS
  misc_feature: MA Experiment 20001558 PARAMETER Experiment Name: At_Drought_Soil_Dry_P Parameter: Post Timepoint (hr) Value: 6
  misc_feature: MA Experiment 20001558 PARAMETER Experiment Name: At_Drought_Soil_Dry_P Parameter: Post-Treatment Value: Re-Water vs. No Drought
  misc_feature: MA Experiment 20001558 PARAMETER Experiment Name: At_Drought_Soil_Dry_P Parameter: Timepoint (day) Value: 13
  misc_feature: MA Experiment 20001558 PARAMETER Experiment Name: At_Drought_Soil_Dry_P Parameter: Treatment Value: Drought vs. No Drought
  misc_feature: MA Experiment ID: 20001560 Result: Down-regulated in Transcription
  misc_feature: MA Experiment 20001560 PARAMETER Experiment Name: At_Drought_Soil_Dry_P Parameter: Age (day) Value: 28
  misc_feature: MA Experiment 20001560 PARAMETER Experiment Name: At_Drought_Soil_Dry_P Parameter: Organism Value: A. thaliana
  misc_feature: MA Experiment 20001560 PARAMETER Experiment Name: At_Drought_Soil_Dry_P Parameter: Plant Line Value: WS
  misc_feature: MA Experiment 20001560 PARAMETER Experiment Name: At_Drought_Soil_Dry_P Parameter: Post Timepoint (hr) Value: None
  misc_feature: MA Experiment 20001560 PARAMETER Experiment Name: At_Drought_Soil_Dry_P Parameter: Post-Treatment Value: None
  misc_feature: MA Experiment 20001560 PARAMETER Experiment Name: At_Drought_Soil_Dry_P Parameter: Timepoint (day) Value: 14
  misc_feature: MA Experiment 20001560 PARAMETER Experiment Name: At_Drought_Soil_Dry_P Parameter: Treatment Value: Drought vs. No Drought
  misc_feature: MA Experiment ID: 20001904 Result: Down-regulated in Transcription
  misc_feature: MA Experiment 20001904 PARAMETER Experiment Name: At_Drought_Reproduction_P Parameter: Age (day) Value: 37
  misc_feature: MA Experiment 20001904 PARAMETER Experiment Name: At_Drought_Reproduction_P Parameter: Organism Value: A. thaliana
  misc_feature: MA Experiment 20001904 PARAMETER Experiment Name: At_Drought_Reproduction_P Parameter: Plant Line Value: WS
  misc_feature: MA Experiment 20001904 PARAMETER Experiment Name: At_Drought_Reproduction_P Parameter: Timepoint (day) Value: 7
  misc_feature: MA Experiment 20001904 PARAMETER Experiment Name: At_Drought_Reproduction_P Parameter: Tissue Value: Rosettes
  misc_feature: MA Experiment 20001904 PARAMETER Experiment Name: At_Drought_Reproduction_P Parameter: Treatment Value: Drought vs. No Drought
  misc_feature: MA Experiment ID: 20001905 Result: Down-regulated in Transcription
  misc_feature: MA Experiment 20001905 PARAMETER Experiment Name: At_Drought_Reproduction_P Parameter: Age (day) Value: 40
  misc_feature: MA Experiment 20001905 PARAMETER Experiment Name: At_Drought_Reproduction_P Parameter: Organism Value: A. thaliana
  misc_feature: MA Experiment 20001905 PARAMETER Experiment Name: At_Drought_Reproduction_P Parameter: Plant Line Value: WS
  misc_feature: MA Experiment 20001905 PARAMETER Experiment Name: At_Drought_Reproduction_P Parameter: Timepoint (day) Value: 10
  misc_feature: MA Experiment 20001905 PARAMETER Experiment Name: At_Drought_Reproduction_P Parameter: Tissue Value: Rosettes
  misc_feature: MA Experiment 20001905 PARAMETER Experiment Name: At_Drought_Reproduction_P Parameter: Treatment Value: Drought vs. No Drought
aatattgattatagaaaagtgaatccacttgacctcctcttggaacgcggctatgtctcttgtgcgtccgatctatcctttcttggccagaagcaagagatggtttccggttcgaaccggattaaaatcggtttgcttaacaacgaccagagccgaaacaagcggtgttgacagagaggagaaagtagtgattgttgggggcgggattggcggacttgccactgccgttgctcttcaccggcttggaatccggtcggtggtgttggagcaggcagagtcgcttcggacaggaggagcatcgctgacgctatccaagaatgggtggcgtgttcttgacgccatctccatcggacctcaactccgaaagcagtttcttgaaatgcaaggggtggtattgaagaaggaagatggaagagagcttcgttctttcaaatttaaagacaatgatcaaagccaagaagttcggggggtggagaggcgagtactcttggaaacacttgcaagccagcttcctccacagaccattcggttttcttcaaaactggaaagtatacaaagcaatgccaatggtgacactctccttcaacttaaagatggaactcggtttcttgcaaatattgttataggttgtgatggtatccggtctaaggttgcaacttggatggggttcagtgagccgaaatatgttggttattgcgctttccgtggccttgggttctttccaaatggacagccatttcagcaaaaggtgaactacatattcggtagagggcttcgagctggatatgtacctgtatctgcaacaaaagtctactggttcatcactttcaacagcccttctctagggcctcaaatgatggatccagctatcctaagaaaagaagccaaggaactggttagtacctggccagaagatctgcaaaacctcattgatctaacacctgatgaagcaatcagtagaactcctcttgcggaccggtggctttggcctggcattgctccttcagcatcaaaaggtagggttgttcttgttggagatgcttggcacccaatgactccaaatcttggacaaggtgcttgctgtgccttggaagattcagttcttctggcaaataaacttgccagtgcaataaatggagggaccgaatcagttgaaggggcgatggaatcatataggagtgagagatggtctcaggtattccggttgacagtacttgcaaacctagtcggaaaacttctgcaatcagacaatcctcttgtgtgttccgttagagacaatattgtcagtgcaatgggaaaatcctctcggaccaacgatggaacacacaaactttgagtgtgagcctctctatgtttcaatattgtctatgtaatgagatgtaaaagcatatgctccattggatagaggacttagacaatgtatcatcagaggaataatatcaaagaagataatataaactctgattgaatgtaaaagaataatacaatgtaattcgtttatgctatgaaagggaatgactctagagc

SEQ ID NO: 104728 - protein, 427 aa, Arabidopsis thaliana
  peptide (1)..(427): Ceres Seq. ID no. 13615652
  misc_feature (186)..(390): Pfam Name: Monooxygenase Pfam Description: Monooxygenase
  misc_feature (1)..(427): Homolog of NCBI NO: 18402126 NR Description: monooxygenase family [Arabidopsis thaliana] putative monooxygenase [Arabidopsis thaliana] putative monooxygenase [Arabidopsis thaliana]
  misc_feature (1)..(427): Homolog of NCBI NO: 21592928 NR Description: putative monooxygenase [Arabidopsis thaliana]
  misc_feature (1)..(427): Homolog of NCBI NO: 25453535 NR Description: CTF2B protein [imported] - Arabidopsis thaliana
  misc_feature (1)..(411): Homolog of NCBI NO: 4164576 NR Description: CTF2A [Arabidopsis thaliana]
  misc_feature (1)..(411): Homolog of NCBI NO: 21536869 NR Description: putative monooxygenase [Arabidopsis thaliana]
  misc_feature (1)..(411): Homolog of NCBI NO: 25453534 NR Description: CTF2A protein [imported] - Arabidopsis thaliana
  misc_feature (1)..(411): Homolog of NCBI NO: 18403916 NR Description: monooxygenase family [Arabidopsis thaliana]
  misc_feature (120)..(411): Homolog of NCBI NO: 25408403 NR Description: probable monooxygenase [imported] - Arabidopsis
  misc_feature (7)..(123): Homolog of NCBI NO: 25408403 NR Description: probable monooxygenase [imported] - Arabidopsis
  misc_feature (63)..(427): Homolog of NCBI NO: 25408045 NR Description: probable monooxygenase [imported] - Arabidopsis
MSLVRPIYPFLARSKRWFPVRTGLKSVCLTTTRAETSGVDREEKVVIVGGGIGGLATAVALHRLGIRSVVLEQAESLRTGGASLTLSKNGWRVLDAISIGPQLRKQFLEMQGVVLKKEDGRELRSFKFKDNDQSQEVRGVERRVLLETLASQLPPQTIRFSSKLESIQSNANGDTLLQLKDGTRFLANIVIGCDGIRSKVATWMGFSEPKYVGYCAFRGLGFFPNGQPFQQKVNYIFGRGLRAGYVPVSATKVYWFITFNSPSLGPQMMDPAILRKEAKELVSTWPEDLQNLIDLTPDEAISRTPLADRWLWPGIAPSASKGRVVLVGDAWHPMTPNLGQGACCALEDSVLLANKLASAINGGTESVEGAMESYRSERWSQVFRLTVLANLVGKLLQSDNPLVCSVRDNIVSAMGKSSRTNDGTHKL

SEQ ID NO: 104729 - protein, 318 aa, Arabidopsis thaliana
  peptide (1)..(318): Ceres Seq. ID no. 13615653
  misc_feature (77)..(281): Pfam Name: Monooxygenase Pfam Description: Monooxygenase
  misc_feature (1)..(318): Homolog of NCBI NO: 18402126 NR Description: monooxygenase family [Arabidopsis thaliana] putative monooxygenase [Arabidopsis thaliana] putative monooxygenase [Arabidopsis thaliana]
  misc_feature (1)..(318): Homolog of NCBI NO: 21592928 NR Description: putative monooxygenase [Arabidopsis thaliana]
  misc_feature (1)..(318): Homolog of NCBI NO: 25453535 NR Description: CTF2B protein [imported] - Arabidopsis thaliana
  misc_feature (1)..(302): Homolog of NCBI NO: 4164576 NR Description: CTF2A [Arabidopsis thaliana]
  misc_feature (1)..(302): Homolog of NCBI NO: 21536869 NR Description: putative monooxygenase [Arabidopsis thaliana]
  misc_feature (1)..(302): Homolog of NCBI NO: 25453534 NR Description: CTF2A protein [imported] - Arabidopsis thaliana
  misc_feature (1)..(302): Homolog of NCBI NO: 18403916 NR Description: monooxygenase family [Arabidopsis thaliana]
  misc_feature (11)..(302): Homolog of NCBI NO: 25408403 NR Description: probable monooxygenase [imported] - Arabidopsis
  misc_feature (1)..(14): Homolog of NCBI NO: 25408403 NR Description: probable monooxygenase [imported] - Arabidopsis
  misc_feature (1)..(318): Homolog of NCBI NO: 25408045 NR Description: probable monooxygenase [imported] - Arabidopsis
MQGVVLKKEDGRELRSFKFKDNDQSQEVRGVERRVLLETLASQLPPQTIRFSSKLESIQSNANGDTLLQLKDGTRFLANIVIGCDGIRSKVATWMGFSEPKYVGYCAFRGLGFFPNGQPFQQKVNYIFGRGLRAGYVPVSATKVYWFITFNSPSLGPQMMDPAILRKEAKELVSTWPEDLQNLIDLTPDEAISRTPLADRWLWPGIAPSASKGRVVLVGDAWHPMTPNLGQGACCALEDSVLLANKLASAINGGTESVEGAMESYRSERWSQVFRLTVLANLVGKLLQSDNPLVCSVRDNIVSAMGKSSRTNDGTHKL

SEQ ID NO: 104730 - protein, 224 aa, Arabidopsis thaliana; identical to SEQ ID NO: 22691
  peptide (1)..(224): Ceres Seq. ID no. 13615654
  misc_feature (1)..(187): Pfam Name: Monooxygenase Pfam Description: Monooxygenase
  misc_feature (1)..(224): Homolog of NCBI NO: 18402126 NR Description: monooxygenase family [Arabidopsis thaliana] putative monooxygenase [Arabidopsis thaliana] putative monooxygenase [Arabidopsis thaliana]
  misc_feature (1)..(224): Homolog of NCBI NO: 21592928 NR Description: putative monooxygenase [Arabidopsis thaliana]
  misc_feature (1)..(224): Homolog of NCBI NO: 25453535 NR Description: CTF2B protein [imported] - Arabidopsis thaliana
  misc_feature (1)..(208): Homolog of NCBI NO: 4164576 NR Description: CTF2A [Arabidopsis thaliana]
  misc_feature (1)..(208): Homolog of NCBI NO: 21536869 NR Description: putative monooxygenase [Arabidopsis thaliana]
  misc_feature (1)..(208): Homolog of NCBI NO: 25453534 NR Description: CTF2A protein [imported] - Arabidopsis thaliana
  misc_feature (1)..(208): Homolog of NCBI NO: 18403916 NR Description: monooxygenase family [Arabidopsis thaliana]
  misc_feature (1)..(208): Homolog of NCBI NO: 25408403 NR Description: probable monooxygenase [imported] - Arabidopsis
  misc_feature (1)..(224): Homolog of NCBI NO: 25408045 NR Description: probable monooxygenase [imported] - Arabidopsis
  misc_feature (1)..(208): Homolog of NCBI NO: 34393624 NR Description: putative monooxygenase 2 [Oryza sativa (japonica

SEQ ID NO: 104731 - DNA, 1440 bp, Arabidopsis thaliana
  misc_feature (1)..(1440): Ceres Seq. ID no. 13615655
  misc_feature: MA Experiment ID: 20000180 Result: Down-regulated in Transcription
  misc_feature: MA Experiment 20000180 PARAMETER Experiment Name: At_Germinating_Seeds_P Parameter: Age (hr) Value: 24 vs. 0
  misc_feature: MA Experiment 20000180 PARAMETER Experiment Name: At_Germinating_Seeds_P Parameter: Tissue Value: Germinating Seeds
  misc_feature: MA Experiment ID: 20000235 Result: Up-regulated in Transcription
  misc_feature: MA Experiment 20000235 PARAMETER Experiment Name: At_Siliques_P Parameter: Age (day) Value: 21
  misc_feature: MA Experiment 20000235 PARAMETER Experiment Name: At_Siliques_P Parameter: Organism Value: A. thaliana
  misc_feature: MA Experiment 20000235 PARAMETER Experiment Name: At_Siliques_P Parameter: Plant Line Value: WS
  misc_feature: MA Experiment 20000235 PARAMETER Experiment Name: At_Siliques_P Parameter: Tissue Value: 5-10mm Siliques vs. Whole Plant
  misc_feature: MA Experiment ID: 20000527 Result: Down-regulated in Transcription
  misc_feature: MA Experiment 20000527 PARAMETER Experiment Name: At_10percent_PEG_P Parameter: Age (day) Value: 20
  misc_feature: MA Experiment 20000527 PARAMETER Experiment Name: At_10percent_PEG_P Parameter: Organism Value: A. thaliana
  misc_feature: MA Experiment 20000527 PARAMETER Experiment Name: At_10percent_PEG_P Parameter: Plant Line Value: WS
  misc_feature: MA Experiment 20000527 PARAMETER Experiment Name: At_10percent_PEG_P Parameter: Timepoint (day) Value: 20
  misc_feature: MA Experiment 20000527 PARAMETER Experiment Name: At_10percent_PEG_P Parameter: Tissue Value: Whole Plant
  misc_feature: MA Experiment 20000527 PARAMETER Experiment Name: At_10percent_PEG_P Parameter: Treatment Value: 10percent PEG vs. No Treatment
  misc_feature: MA Experiment ID: 20000794 Result: Down-regulated in Transcription
  misc_feature: MA Experiment 20000794 PARAMETER Experiment Name: At_Petals_P Parameter: Age (day) Value: 23-25 days
  misc_feature: MA Experiment 20000794 PARAMETER Experiment Name: At_Petals_P Parameter: Plant Line Value: WS
  misc_feature: MA Experiment 20000794 PARAMETER Experiment Name: At_Petals_P Parameter: Tissue Value: Petals vs. Whole plant
  misc_feature: MA Experiment ID: 20001555 Result: Down-regulated in Transcription
  misc_feature: MA Experiment 20001555 PARAMETER Experiment Name: At_Drought_Soil_Dry_P Parameter: Age (day) Value: 24
  misc_feature: MA Experiment 20001555 PARAMETER Experiment Name: At_Drought_Soil_Dry_P Parameter: Organism Value: A. thaliana
  misc_feature: MA Experiment 20001555 PARAMETER Experiment Name: At_Drought_Soil_Dry_P Parameter: Plant Line Value: WS
  misc_feature: MA Experiment 20001555 PARAMETER Experiment Name: At_Drought_Soil_Dry_P Parameter: Post Timepoint (hr) Value: None
  misc_feature: MA Experiment 20001555 PARAMETER Experiment Name: At_Drought_Soil_Dry_P Parameter: Post-Treatment Value: None
  misc_feature: MA Experiment 20001555 PARAMETER Experiment Name: At_Drought_Soil_Dry_P Parameter: Timepoint (day) Value: 10
  misc_feature: MA Experiment 20001555 PARAMETER Experiment Name: At_Drought_Soil_Dry_P Parameter: Treatment Value: Drought vs. No Drought
aaaattcatcaaaccctttcttcaccacattattttcactgagcgcataacatttttgagacaagagactctctctctctctcttctctctttctctccccctctctccggcgatggttgttgctatggaccaacgcaccaatgtgaacggagatcccggcgccggagaccggaagaaagaagaaaggtttgatccgagtgcacaaccaccgttcaagatcggagatataagggcggcgattcctaagcactgttgggttaagagtcctttgagatcaatgagttacgtcgtcagagacattatcgccgtcgcggctttggccatcgctgccgtgtatgttgatagctggttcctttggcctctttattgggccgcccaaggaacacttttctgggccatctttgttctcggccacgactgtggacatgggagtttctcagacattcctctactgaatagtgtggttggtcacattcttcattctttcatcctcgttccttaccatggttggagaataagccaccggacacaccaccagaaccatggccatgttgaaaacgacgagtcatgggttccgttaccagaaagggtgtacaagaaattgccccacagtactcggatgctcagatacactgtccctctccccatgctcgcatatcctctctatttgtgctacagaagtcctggaaaagaaggatcacattttaacccatacagtagtttatttgctccaagcgagagaaagcttattgcaacttcaactacttgttggtccataatgttcgtcagtcttatcgctctatctttcgtcttcggtccactcgcggttcttaaagtctacggtgtaccgtacattatctttgtgatgtggttggatgctgtcacgtatttgcatcatcatggtcacgatgagaagttgccttggtatagaggcaaggaatggagttatctacgtggaggattaacaacaattgatagagattacggaatctttaacaacattcatcacgacattggaactcacgtgatccatcatctcttcccacaaatccctcactatcacttggtcgacgccacgaaagcagctaaacatgtgttgggaagatactacagagaaccaaagacgtcaggagcaataccgatccacttggtggagagtttggtcgcaagtattaagaaagatcattacgtcagcgacactggtgatattgtcttctacgagacagatccagatctctacgtttacgcttctgacaaatctaaaatcaattaatctccatttgtttagctctattaggaataaaccagcccacttttaaaatttttatttcttgttgtttttaagttaaaagtgtactcgtgaaactcttttttttttcttttttttttattaatgtatttacattacaaggcgtaaagttttgttatttctcttttct

SEQ ID NO: 104732 - protein, 386 aa, Arabidopsis thaliana; identical to SEQ ID NO: 23723
  peptide (1)..(386): Ceres Seq. ID no. 13615656
  misc_feature (85)..(329): Pfam Name: Fatty acid desaturase Pfam Description: Fatty acid desaturase
  misc_feature (1)..(386): Homolog of NCBI NO: 15227683 NR Description: omega-3 fatty acid desaturase, endoplasmic
  misc_feature (1)..(386): Homolog of NCBI NO: 1345967 NR Description: Omega-3 fatty acid desaturase, endoplasmic
  misc_feature (1)..(386): Homolog of NCBI NO: 541915 NR Description: omega-3 fatty acid desaturase (EC 1.14.99.-) BN3
  misc_feature (37)..(338): Homolog of NCBI NO: 15811218 NR Description: omega-3 fatty acid desaturase [Brassica rapa
  misc_feature (26)..(385): Homolog of NCBI NO: 3133289 NR Description: omega-3 desaturase [Pelargonium x hortorum]
  misc_feature (22)..(383): Homolog of NCBI NO: 23345025 NR Description: microsomal omega-3 fatty acid desaturase [Betula
  misc_feature (11)..(386): Homolog of NCBI NO: 4091113 NR Description: omega-3 fatty acid desaturase [Vernicia fordii]
  misc_feature (1)..(275): Homolog of NCBI NO: 30684423 NR Description: omega-3 fatty acid desaturase, endoplasmic

SEQ ID NO: 104733 - protein, 382 aa, Arabidopsis thaliana; identical to SEQ ID NO: 23724
  peptide (1)..(382): Ceres Seq. ID no. 13615657
  misc_feature (81)..(325): Pfam Name: Fatty acid desaturase Pfam Description: Fatty acid desaturase
  misc_feature (1)..(382): Homolog of NCBI NO: 15227683 NR Description: omega-3 fatty acid desaturase, endoplasmic
  misc_feature (1)..(382): Homolog of NCBI NO: 1345967 NR Description: Omega-3 fatty acid desaturase, endoplasmic
  misc_feature (1)..(382): Homolog of NCBI NO: 541915 NR Description: omega-3 fatty acid desaturase (EC 1.14.99.-) BN3
  misc_feature (33)..(334): Homolog of NCBI NO: 15811218 NR Description: omega-3 fatty acid desaturase [Brassica rapa
  misc_feature (22)..(381): Homolog of NCBI NO: 3133289 NR Description: omega-3 desaturase [Pelargonium x hortorum]
  misc_feature (18)..(379): Homolog of NCBI NO: 23345025 NR Description: microsomal omega-3 fatty acid desaturase [Betula
  misc_feature (7)..(382): Homolog of NCBI NO: 4091113 NR Description: omega-3 fatty acid desaturase [Vernicia fordii]
  misc_feature (1)..(271): Homolog of NCBI NO: 30684423 NR Description: omega-3 fatty acid desaturase, endoplasmic

SEQ ID NO: 104734 - protein, 331 aa, Arabidopsis thaliana; identical to SEQ ID NO: 23725
  peptide (1)..(331): Ceres Seq. ID no. 13615658
  misc_feature (30)..(274): Pfam Name: Fatty acid desaturase Pfam Description: Fatty acid desaturase
  misc_feature (1)..(331): Homolog of NCBI NO: 15227683 NR Description: omega-3 fatty acid desaturase, endoplasmic
  misc_feature (1)..(331): Homolog of NCBI NO: 1345967 NR Description: Omega-3 fatty acid desaturase, endoplasmic
  misc_feature (1)..(331): Homolog of NCBI NO: 541915 NR Description: omega-3 fatty acid desaturase (EC 1.14.99.-) BN3
  misc_feature (1)..(283): Homolog of NCBI NO: 15811218 NR Description: omega-3 fatty acid desaturase [Brassica rapa
  misc_feature (1)..(330): Homolog of NCBI NO: 3133289 NR Description: omega-3 desaturase [Pelargonium x hortorum]
  misc_feature (1)..(328): Homolog of NCBI NO: 23345025 NR Description: microsomal omega-3 fatty acid desaturase [Betula
  misc_feature (1)..(331): Homolog of NCBI NO: 4091113 NR Description: omega-3 fatty acid desaturase [Vernicia fordii]
  misc_feature (1)..(220): Homolog of NCBI NO: 30684423 NR Description: omega-3 fatty acid desaturase, endoplasmic

SEQ ID NO: 104735 - DNA, 1465 bp, Arabidopsis thaliana
  misc_feature (1)..(1465): Ceres Seq. ID no. 13615659
  misc_feature: MA Experiment ID: 108434 Result: Down-regulated in Transcription
  misc_feature: MA Experiment 108434 PARAMETER Experiment Name: At_Root_Tips_cDNA_P Parameter: Tissue Value: Root Tips
  misc_feature: MA Experiment ID: 108462 Result: Up-regulated in Transcription
  misc_feature: MA Experiment 108462 PARAMETER Experiment Name: At_Germinating_Seeds_cDNA_P Parameter: Age (day) Value: 2 vs. 0
  misc_feature: MA Experiment 108462 PARAMETER Experiment Name: At_Germinating_Seeds_cDNA_P Parameter: Tissue Value: Germinating Seeds
  misc_feature: MA Experiment ID: 108463 Result: Up-regulated in Transcription
  misc_feature: MA Experiment 108463 PARAMETER Experiment Name: At_Germinating_Seeds_cDNA_P Parameter: Age (day) Value: 3 vs. 0
  misc_feature: MA Experiment 108463 PARAMETER Experiment Name: At_Germinating_Seeds_cDNA_P Parameter: Tissue Value: Germinating Seeds
  misc_feature: MA Experiment ID: 108464 Result: Up-regulated in Transcription
  misc_feature: MA Experiment 108464 PARAMETER Experiment Name: At_Germinating_Seeds_cDNA_P Parameter: Age (day) Value: 4 vs. 0
  misc_feature: MA Experiment 108464 PARAMETER Experiment Name: At_Germinating_Seeds_cDNA_P Parameter: Tissue Value: Germinating Seeds
  misc_feature: MA Experiment ID: 108473 Result: Down-regulated in Transcription
  misc_feature: MA Experiment 108473 PARAMETER Experiment Name: At_Drought_Flowers_cDNA_P Parameter: Timepoint (hr) Value: 7 d
  misc_feature: MA Experiment 108473 PARAMETER Experiment Name: At_Drought_Flowers_cDNA_P Parameter: Tissue Value: Flower
  misc_feature: MA Experiment 108473 PARAMETER Experiment Name: At_Drought_Flowers_cDNA_P Parameter: Treatment Value: Drought vs. No Drought
  misc_feature: MA Experiment ID: 108561 Result: Down-regulated in Transcription
  misc_feature: MA Experiment 108561 PARAMETER Experiment Name: At_100uM_ABA_cDNA_P Parameter: Timepoint (hr) Value: 6
  misc_feature: MA Experiment 108561 PARAMETER Experiment Name: At_100uM_ABA_cDNA_P Parameter: Tissue Value: Aerial
  misc_feature: MA Experiment 108561 PARAMETER Experiment Name: At_100uM_ABA_cDNA_P Parameter: Treatment Value: 100uM ABA vs. No Treatment
  misc_feature: MA Experiment ID: 108577 Result: Down-regulated in Transcription
  misc_feature: MA Experiment 108577 PARAMETER Experiment Name: At_42deg_Heat_cDNA_P Parameter: Temperature (deg C) Value: 42 vs. 22
  misc_feature: MA Experiment 108577 PARAMETER Experiment Name: At_42deg_Heat_cDNA_P Parameter: Timepoint (hr) Value: 6
  misc_feature: MA Experiment 108577 PARAMETER Experiment Name: At_42deg_Heat_cDNA_P Parameter: Tissue Value: Aerial
  misc_feature: MA Experiment ID: 108595 Result: Down-regulated in Transcription
  misc_feature: MA Experiment 108595 PARAMETER Experiment Name: At_Ler-pi_Ovule_cDNA_P Parameter: Plant Line Value: null
  misc_feature: MA Experiment ID: 108605 Result: Down-regulated in Transcription
  misc_feature: MA Experiment 108605 PARAMETER Experiment Name: At_100uM_ABA_cDNA_P Parameter: Timepoint (hr) Value: 6
  misc_feature: MA Experiment 108605 PARAMETER Experiment Name: At_100uM_ABA_cDNA_P Parameter: Tissue Value: Aerial
  misc_feature: MA Experiment 108605 PARAMETER Experiment Name: At_100uM_ABA_cDNA_P Parameter: Treatment Value: 100uM ABA vs. No Treatment
  misc_feature: MA Experiment ID: 108607 Result: Down-regulated in Transcription
  misc_feature: MA Experiment 108607 PARAMETER Experiment Name: At_100uM_ABA_cDNA_P Parameter: Timepoint (hr) Value: 4
  misc_feature: MA Experiment 108607 PARAMETER Experiment Name: At_100uM_ABA_cDNA_P Parameter: Tissue Value: Aerial
  misc_feature: MA Experiment 108607 PARAMETER Experiment Name: At_100uM_ABA_cDNA_P Parameter: Treatment Value: 100uM ABA vs. No Treatment
  misc_feature: MA Experiment ID: 108608 Result: Down-regulated in Transcription
  misc_feature: MA Experiment 108608 PARAMETER Experiment Name: At_100uM_ABA_cDNA_P Parameter: Timepoint (hr) Value: 1
  misc_feature: MA Experiment 108608 PARAMETER Experiment Name: At_100uM_ABA_cDNA_P Parameter: Tissue Value: Aerial
  misc_feature: MA Experiment 108608 PARAMETER Experiment Name: At_100uM_ABA_cDNA_P Parameter: Treatment Value: 100uM ABA vs. No Treatment
  misc_feature: MA Experiment ID: 108609 Result: Down-regulated in Transcription
  misc_feature: MA Experiment 108609 PARAMETER Experiment Name: At_100uM_ABA_cDNA_P Parameter: Timepoint (hr) Value: 24
  misc_feature: MA Experiment 108609 PARAMETER Experiment Name: At_100uM_ABA_cDNA_P Parameter: Tissue Value: Aerial
  misc_feature: MA Experiment 108609 PARAMETER Experiment Name: At_100uM_ABA_cDNA_P Parameter: Treatment Value: 100uM ABA vs. No Treatment
  misc_feature: MA Experiment ID: 20000069 Result: Down-regulated in Transcription
  misc_feature: MA Experiment 20000069 PARAMETER Experiment Name: At_100uM_ABA_Mutants_cDNA_P Parameter: Plant Line Value: CS23
  misc_feature: MA Experiment 20000069 PARAMETER Experiment Name: At_100uM_ABA_Mutants_cDNA_P Parameter: Timepoint (hr) Value: 6
  misc_feature: MA Experiment 20000069 PARAMETER Experiment Name: At_100uM_ABA_Mutants_cDNA_P Parameter: Tissue Value: Aerial
  misc_feature: MA Experiment 20000069 PARAMETER Experiment Name: At_100uM_ABA_Mutants_cDNA_P Parameter: Treatment Value: 100uM ABA vs. No Treatment
  misc_feature: MA Experiment ID: 20000070 Result: Down-regulated in Transcription
  misc_feature: MA Experiment 20000070 PARAMETER Experiment Name: At_100uM_ABA_Mutants_cDNA_P Parameter: Plant Line Value: CS24
  misc_feature: MA Experiment 20000070 PARAMETER Experiment Name: At_100uM_ABA_Mutants_cDNA_P Parameter: Timepoint (hr) Value: 6
  misc_feature: MA Experiment 20000070 PARAMETER Experiment Name: At_100uM_ABA_Mutants_cDNA_P Parameter: Tissue Value: Aerial
  misc_feature: MA Experiment 20000070 PARAMETER Experiment Name: At_100uM_ABA_Mutants_cDNA_P Parameter: Treatment Value: 100uM ABA vs. No Treatment
  misc_feature: MA Experiment ID: 20000071 Result: Down-regulated in Transcription
  misc_feature: MA Experiment 20000071 PARAMETER Experiment Name: At_100uM_ABA_Mutants_cDNA_P Parameter: Plant Line Value: CS8104
  misc_feature: MA Experiment 20000071 PARAMETER Experiment Name: At_100uM_ABA_Mutants_cDNA_P Parameter: Timepoint (hr) Value: 6
  misc_feature: MA Experiment 20000071 PARAMETER Experiment Name: At_100uM_ABA_Mutants_cDNA_P Parameter: Tissue Value: Aerial
  misc_feature: MA Experiment 20000071 PARAMETER Experiment Name: At_100uM_ABA_Mutants_cDNA_P Parameter: Treatment Value: 100uM ABA vs. No Treatment
  misc_feature: MA Experiment ID: 20000072 Result: Down-regulated in Transcription
  misc_feature: MA Experiment 20000072 PARAMETER Experiment Name: At_100uM_ABA_Mutants_cDNA_P Parameter: Plant Line Value: CS8105
  misc_feature: MA Experiment 20000072 PARAMETER Experiment Name: At_100uM_ABA_Mutants_cDNA_P Parameter: Timepoint (hr) Value: 6
  misc_feature: MA Experiment 20000072 PARAMETER Experiment Name: At_100uM_ABA_Mutants_cDNA_P Parameter: Tissue Value: Aerial
  misc_feature: MA Experiment 20000072 PARAMETER Experiment Name: At_100uM_ABA_Mutants_cDNA_P Parameter: Treatment Value: 100uM ABA vs. No Treatment
  misc_feature: MA Experiment ID: 20000086 Result: Down-regulated in Transcription
  misc_feature: MA Experiment 20000086 PARAMETER Experiment Name: At_100uM_ABA_Mutants_cDNA_P Parameter: Plant Line Value: CS22
  misc_feature: MA Experiment 20000086 PARAMETER Experiment Name: At_100uM_ABA_Mutants_cDNA_P Parameter: Timepoint (hr) Value: 6
  misc_feature: MA Experiment 20000086 PARAMETER Experiment Name: At_100uM_ABA_Mutants_cDNA_P Parameter: Tissue Value: Aerial
  misc_feature: MA Experiment 20000086 PARAMETER Experiment Name: At_100uM_ABA_Mutants_cDNA_P Parameter: Treatment Value: 100uM ABA vs. No Treatment
  misc_feature: MA Experiment ID: 20000087 Result: Down-regulated in Transcription
  misc_feature: MA Experiment 20000087 PARAMETER Experiment Name: At_100uM_ABA_Mutants_cDNA_P Parameter: Plant Line Value: WS
  misc_feature: MA Experiment 20000087 PARAMETER Experiment Name: At_100uM_ABA_Mutants_cDNA_P Parameter: Timepoint (hr) Value: 6
  misc_feature: MA Experiment 20000087 PARAMETER Experiment Name: At_100uM_ABA_Mutants_cDNA_P Parameter: Tissue Value: Aerial
  misc_feature: MA Experiment 20000087 PARAMETER Experiment Name: At_100uM_ABA_Mutants_cDNA_P Parameter: Treatment Value: 100uM ABA vs. No Treatment
  misc_feature: MA Experiment ID: 20000088 Result: Down-regulated in Transcription
  misc_feature: MA Experiment 20000088 PARAMETER Experiment Name: At_100uM_ABA_Mutants_cDNA_P Parameter: Plant Line Value: Landsberg
  misc_feature: MA Experiment 20000088 PARAMETER Experiment Name: At_100uM_ABA_Mutants_cDNA_P Parameter: Timepoint (hr) Value: 6
  misc_feature: MA Experiment 20000088 PARAMETER Experiment Name: At_100uM_ABA_Mutants_cDNA_P Parameter: Tissue Value: Aerial
  misc_feature: MA Experiment 20000088 PARAMETER Experiment Name: At_100uM_ABA_Mutants_cDNA_P Parameter: Treatment Value: 100uM ABA vs. No Treatment
  misc_feature: MA Experiment ID: 20000090 Result: Down-regulated in Transcription
  misc_feature: MA Experiment ID: 20000111 Result: Down-regulated in Transcription
  misc_feature: MA Experiment 20000111 PARAMETER Experiment Name: At_42deg_Heat_cDNA_P Parameter: Temperature (deg C) Value: 42 vs. 22
  misc_feature: MA Experiment 20000111 PARAMETER Experiment Name: At_42deg_Heat_cDNA_P Parameter: Timepoint (hr) Value: 6
  misc_feature: MA Experiment 20000111 PARAMETER Experiment Name: At_42deg_Heat_cDNA_P Parameter: Tissue Value: Aerial
  misc_feature: MA Experiment ID: 20000113 Result: Down-regulated in Transcription
  misc_feature: MA Experiment 20000113 PARAMETER Experiment Name: At_42deg_Heat_cDNA_P Parameter: Temperature (deg C) Value: 42 vs. 22
  misc_feature: MA Experiment 20000113 PARAMETER Experiment Name: At_42deg_Heat_cDNA_P Parameter: Timepoint (hr) Value: 8
  misc_feature: MA Experiment 20000113 PARAMETER Experiment Name: At_42deg_Heat_cDNA_P Parameter: Tissue Value: Aerial
  misc_feature: MA Experiment ID: 20000117 Result: Down-regulated in Transcription
  misc_feature: MA Experiment 20000117 PARAMETER Experiment Name: At_100uM_ABA_Mutants_cDNA_P Parameter: Plant Line Value: Columbia
  misc_feature: MA Experiment 20000117 PARAMETER Experiment Name: At_100uM_ABA_Mutants_cDNA_P Parameter: Timepoint (hr) Value: 6
  misc_feature: MA Experiment 20000117 PARAMETER Experiment Name: At_100uM_ABA_Mutants_cDNA_P Parameter: Tissue Value: Aerial
  misc_feature: MA Experiment 20000117 PARAMETER Experiment Name: At_100uM_ABA_Mutants_cDNA_P Parameter: Treatment Value: 100uM ABA vs. No Treatment
  misc_feature: MA Experiment ID: 20000314 Result: Down-regulated in Transcription
  misc_feature: MA Experiment 20000314 PARAMETER Experiment Name: At_14day_Shoots-Roots_Sub_P Parameter: Age (day) Value: 14
  misc_feature: MA Experiment 20000314 PARAMETER Experiment Name: At_14day_Shoots-Roots_Sub_P Parameter: Organism Value: A. thaliana
  misc_feature: MA Experiment 20000314 PARAMETER Experiment Name: At_14day_Shoots-Roots_Sub_P Parameter: Plant Line Value: WS
  misc_feature: MA Experiment 20000314 PARAMETER Experiment Name: At_14day_Shoots-Roots_Sub_P Parameter: Tissue Value: Roots vs. Whole Plant
  misc_feature: MA Experiment ID: 20000328 Result: Down-regulated in Transcription
  misc_feature: MA Experiment 20000328 PARAMETER Experiment Name: At_42deg_Heat_Sub_P Parameter: Age (day) Value: 14
  misc_feature: MA Experiment 20000328 PARAMETER Experiment Name: At_42deg_Heat_Sub_P Parameter: Organism Value: A. thaliana
  misc_feature: MA Experiment 20000328 PARAMETER Experiment Name: At_42deg_Heat_Sub_P Parameter: Plant Line Value: WS
  misc_feature: MA Experiment 20000328 PARAMETER Experiment Name: At_42deg_Heat_Sub_P Parameter: Temperature (deg C) Value: 42 vs. 22
  misc_feature: MA Experiment 20000328 PARAMETER Experiment Name: At_42deg_Heat_Sub_P Parameter: Timepoint (hr) Value: 6
  misc_feature: MA Experiment 20000328 PARAMETER Experiment Name: At_42deg_Heat_Sub_P Parameter: Tissue Value: Aerial
  misc_feature: MA Experiment ID: 20000329 Result: Up-regulated in Transcription
  misc_feature: MA Experiment 20000329 PARAMETER Experiment Name: At_4deg_Cold_Sub_P Parameter: Age (day) Value: 14
  misc_feature: MA Experiment 20000329 PARAMETER Experiment Name: At_4deg_Cold_Sub_P Parameter: Organism Value: A. thaliana
  misc_feature: MA Experiment 20000329 PARAMETER Experiment Name: At_4deg_Cold_Sub_P Parameter: Plant Line Value: WS
  misc_feature: MA Experiment 20000329 PARAMETER Experiment Name: At_4deg_Cold_Sub_P Parameter: Temperature (deg C) Value: 4 vs. 22
  misc_feature: MA Experiment 20000329 PARAMETER Experiment Name: At_4deg_Cold_Sub_P Parameter: Timepoint (hr) Value: 6
  misc_feature: MA Experiment 20000329 PARAMETER Experiment Name: At_4deg_Cold_Sub_P Parameter: Tissue Value: Aerial
  misc_feature: MA Experiment ID: 20000347 Result: Down-regulated in Transcription
  misc_feature: MA Experiment 20000347 PARAMETER Experiment Name: At_2mM_SA_Sub_P Parameter: Age (day) Value: 14
  misc_feature: MA Experiment 20000347 PARAMETER Experiment Name: At_2mM_SA_Sub_P Parameter: Organism Value: A. thaliana
  misc_feature: MA Experiment 20000347 PARAMETER Experiment Name: At_2mM_SA_Sub_P Parameter: Plant Line Value: WS
  misc_feature: MA Experiment 20000347 PARAMETER Experiment Name: At_2mM_SA_Sub_P Parameter: Timepoint (hr) Value: 6
  misc_feature: MA Experiment 20000347 PARAMETER Experiment Name: At_2mM_SA_Sub_P Parameter: Tissue Value: Aerial
  misc_feature: MA Experiment 20000347 PARAMETER Experiment Name: At_2mM_SA_Sub_P Parameter: Treatment Value: 2mM SA vs. No Treatment
  misc_feature: MA Experiment ID: 20000348 Result: Down-regulated in Transcription
  misc_feature: MA Experiment 20000348 PARAMETER Experiment Name: At_100uM_ABA_Sub_P Parameter: Age (day) Value: 14
  misc_feature: MA Experiment 20000348 PARAMETER Experiment Name: At_100uM_ABA_Sub_P Parameter: Organism Value: A. thaliana
  misc_feature: MA Experiment 20000348 PARAMETER Experiment Name: At_100uM_ABA_Sub_P Parameter: Plant Line Value: WS
  misc_feature: MA Experiment 20000348 PARAMETER Experiment Name: At_100uM_ABA_Sub_P Parameter: Timepoint (hr) Value: 1
  misc_feature: MA Experiment 20000348 PARAMETER Experiment Name: At_100uM_ABA_Sub_P Parameter: Tissue Value: Aerial
  misc_feature: MA Experiment 20000348 PARAMETER Experiment Name: At_100uM_ABA_Sub_P Parameter: Treatment Value: 100uM ABA vs. No Treatment
  misc_feature: MA Experiment ID: 20000349 Result: Down-regulated in Transcription
  misc_feature: MA Experiment 20000349 PARAMETER Experiment Name: At_100uM_ABA_Sub_P Parameter: Age (day) Value: 14
  misc_feature: MA Experiment 20000349 PARAMETER Experiment Name: At_100uM_ABA_Sub_P Parameter: Organism Value: A. thaliana
  misc_feature: MA Experiment 20000349 PARAMETER Experiment Name: At_100uM_ABA_Sub_P Parameter: Plant Line Value: WS
  misc_feature: MA Experiment 20000349 PARAMETER Experiment Name: At_100uM_ABA_Sub_P Parameter: Timepoint (hr) Value: 6
  misc_feature: MA Experiment 20000349 PARAMETER Experiment Name: At_100uM_ABA_Sub_P Parameter: Tissue Value: Aerial
  misc_feature: MA Experiment 20000349 PARAMETER Experiment Name: At_100uM_ABA_Sub_P Parameter: Treatment Value: 100uM ABA vs. No Treatment
  misc_feature: MA Experiment ID: 20000352 Result: Down-regulated in Transcription
  misc_feature: MA Experiment 20000352 PARAMETER Experiment Name: At_Drought_Sub_P Parameter: Age (day) Value: 7
  misc_feature: MA Experiment 20000352 PARAMETER Experiment Name: At_Drought_Sub_P Parameter: Organism Value: A. thaliana
  misc_feature: MA Experiment 20000352 PARAMETER Experiment Name: At_Drought_Sub_P Parameter: Plant Line Value: WS
  misc_feature: MA Experiment 20000352 PARAMETER Experiment Name: At_Drought_Sub_P Parameter: Timepoint (hr) Value: 6
  misc_feature: MA Experiment 20000352 PARAMETER Experiment Name: At_Drought_Sub_P Parameter: Tissue Value: Whole Plant
  misc_feature: MA Experiment 20000352 PARAMETER Experiment Name: At_Drought_Sub_P Parameter: Treatment Value: Drought vs. No Drought
  misc_feature: MA Experiment ID: 20001807 Result: Up-regulated in Transcription
  misc_feature: MA Experiment 20001807 PARAMETER Experiment Name: At_50mM_NH4NO3_L-to-H_Sub_P Parameter: Timepoint (hr) Value: 6
  misc_feature: MA Experiment 20001807 PARAMETER Experiment Name: At_50mM_NH4NO3_L-to-H_Sub_P Parameter: Tissue Value: Leaf
  misc_feature: MA Experiment 20001807 PARAMETER Experiment Name: At_50mM_NH4NO3_L-to-H_Sub_P Parameter: Treatment Value: 50mM NH4NO3 vs 100mM Mannitol
acgtattagtaagttccatgcaaaggacaaacatataataacaacaacttctcttctttactcgtttctctctctctcttttcttttcttttcttcaagcgcttctttaatggcggctgttcaatgtctcactttcctcttcttgtttcttctccaaaacgcgacgtcagcttcacctctccctctcttccggcggccgatccaaagcaaccacagcaacttcgtgaagcatcctcgccgaagtcaggtggttttcccggtgaatcatagtagttgtgatctgttcgccggcgagtgggtgcgggatgagacttacccactttaccggtctaaagaatgcggccgaggaatcatagatccgggattcgactgccagacttacggcagacctgactccgactatctcaagttccggtggaaacctttcaactgcaatgtccctagattcaatggagtgaagtttctacaagaaatgagagacaaaaccataatgttcgttggtgattcgttgggtagaaaccaatgggagtcgttgatatgtatgatctcttcatcagcaccgtccattaatactcacatcattcatgaagatcctctctctaccttcaagatccttgactacaacgtgaaggtatcattctatagagctccttatcttgtagacatcgacaaaattaacggaaagacaactcttaaactcgacgaaatctctgtggatgcatcgaatgcttggcgcacagccgacgttctattgttcaacactggtcactggtggagccacacaggttctttacgagggtgggagcagatggagacaggtgggagatattacggcgacatggataggttagtggcgttgagaaaaggactaggaacgtggtctagttgggtccttcgttatatcaattctcctctcactagagttttcttcctctcggtctcacccacacactacaacccaaatgagtggacttcaagatcaaaaacttcaacaataactcaaggaggtaaaagctgctacggacaaacgacaccgtttagtggaacaacgtatccaacaagttcatacgtgaaccagaagaaagtgatagacgacgtggttaaagagatgaagtctcatgtctcattgatggatataactatgctctctgctcttcgtgtcgacggtcatccttcgatatatagtggagatctcaacccttctttgaaaagaaatcctgaccgttcatctgattgtagccattggtgtcttccgggtcttcccgacacttggaaccaattgttttatgctgctttgttgtactgaagatttgattaaccaagatcaaacaaaatgtatctattgaattatatagtttcctaatttttatttgtaagttcactaagttgttacgtttaatcaaacatataattgtgaagttgaggatcttgttacgtttaatcaaacatataagttgttacgttc

SEQ ID NO: 104736 - protein, 434 aa, Arabidopsis thaliana
  peptide (1)..(434): Ceres Seq. ID no. 13615660
  misc_feature (37)..(434): Homolog of NCBI NO: 18402220 NR Description: expressed protein [Arabidopsis thaliana]
  misc_feature (37)..(434): Homolog of NCBI NO: 15237711 NR Description: expressed protein [Arabidopsis thaliana] gene_id:MZN1.6~pir||T02484~strong similarity to unknown protein thaliana] >gi|26449857|dbj|BAC42051.1| unknown protein
  misc_feature (37)..(434): Homolog of NCBI NO: 21553643 NR Description: unknown [Arabidopsis thaliana]
  misc_feature (92)..(434): Homolog of NCBI NO: 15224585 NR Description: expressed protein [Arabidopsis thaliana]
  misc_feature (92)..(434): Homolog of NCBI NO: 30350855 NR Description: hypothetical protein At2g30900 [Arabidopsis
  misc_feature (90)..(396): Homolog of NCBI NO: 34911864 NR Description: OSJNBb0032K15.9 [Oryza sativa (japonica
  misc_feature (90)..(397): Homolog of NCBI NO: 18403435 NR Description: expressed protein [Arabidopsis thaliana] expressed protein [Arabidopsis thaliana]
  misc_feature (90)..(397): Homolog of NCBI NO: 18396930 NR Description: expressed protein [Arabidopsis thaliana] unknown protein [Arabidopsis thaliana]
  misc_feature (91)..(433): Homolog of NCBI NO: 9759298 NR Description: emb|CAB82953.1~gene_id:MPH15.5~strong similarity
  misc_feature (67)..(433): Homolog of NCBI NO: 15229945 NR Description: expressed protein [Arabidopsis thaliana] gb|AAF30301.1~gene_id:MEC18.19~similar to unknown protein
RISKFHAKDKHIITTTSLLYSFLSLSFLFFSSSASLMAAVQCLTFLFLFLLQNATSASPLPLFRRPIQSNHSNFVKHPRRSQVVFPVNHSSCDLFAGEWVRDETYPLYRSKECGRGIIDPGFDCQTYGRPDSDYLKFRWKPFNCNVPRFNGVKFLQEMRDKTIMFVGDSLGRNQWESLICMISSSAPSINTHIIHEDPLSTFKILDYNVKVSFYRAPYLVDIDKINGKTTLKLDEISVDASNAWRTADVLLFNTGHWWSHTGSLRGWEQMETGGRYYGDMDRLVALRKGLGTWSSWVLRYINSPLTRVFFLSVSPTHYNPNEWTSRSKTSTITQGGKSCYGQTTPFSGTTYPTSSYVNQKKVIDDVVKEMKSHVSLMDITMLSALRVDGHPSIYSGDLNPSLKRNPDRSSDCSHWCLPGLPDTWNQLFYAALLY

SEQ ID NO: 104737 - protein, 398 aa, Arabidopsis thaliana; identical to SEQ ID NO: 24726
  peptide (1)..(398): Ceres Seq. ID no. 13615661
  misc_feature (1)..(398): Homolog of NCBI NO: 18402220 NR Description: expressed protein [Arabidopsis thaliana]
  misc_feature (1)..(398): Homolog of NCBI NO: 15237711 NR Description: expressed protein [Arabidopsis thaliana] gene_id:MZN1.6~pir||T02484~strong similarity to unknown protein thaliana] >gi|26449857|dbj|BAC42051.1| unknown protein
  misc_feature (1)..(398): Homolog of NCBI NO: 21553643 NR Description: unknown [Arabidopsis thaliana]
  misc_feature (56)..(398): Homolog of NCBI NO: 15224585 NR Description: expressed protein [Arabidopsis thaliana]
  misc_feature (56)..(398): Homolog of NCBI NO: 30350855 NR Description: hypothetical protein At2g30900 [Arabidopsis
  misc_feature (54)..(360): Homolog of NCBI NO: 34911864 NR Description: OSJNBb0032K15.9 [Oryza sativa (japonica
  misc_feature (54)..(361): Homolog of NCBI NO: 18403435 NR Description: expressed protein [Arabidopsis thaliana] expressed protein [Arabidopsis thaliana]
  misc_feature (54)..(361): Homolog of NCBI NO: 18396930 NR Description: expressed protein [Arabidopsis thaliana] unknown protein [Arabidopsis thaliana]
  misc_feature (55)..(397): Homolog of NCBI NO: 9759298 NR Description: emb|CAB82953.1~gene_id:MPH15.5~strong similarity
  misc_feature (31)..(397): Homolog of NCBI NO: 15229945 NR Description: expressed protein [Arabidopsis thaliana] gb|AAF30301.1~gene_id:MEC18.19~similar to unknown protein

SEQ ID NO: 104738 - protein, 277 aa, Arabidopsis thaliana; identical to SEQ ID NO: 24727
  peptide (1)..(277): Ceres Seq. ID no. 13615662
  misc_feature (1)..(277): Homolog of NCBI NO: 18402220 NR Description: expressed protein [Arabidopsis thaliana]
  misc_feature (1)..(277): Homolog of NCBI NO: 15237711 NR Description: expressed protein [Arabidopsis thaliana] gene_id:MZN1.6~pir||T02484~strong similarity to unknown protein thaliana] >gi|26449857|dbj|BAC42051.1| unknown protein
  misc_feature (1)..(277): Homolog of NCBI NO: 21553643 NR Description: unknown [Arabidopsis thaliana]
  misc_feature (1)..(277): Homolog of NCBI NO: 15224585 NR Description: expressed protein [Arabidopsis thaliana]
  misc_feature (1)..(277): Homolog of NCBI NO: 30350855 NR Description: hypothetical protein At2g30900 [Arabidopsis
  misc_feature (1)..(239): Homolog of NCBI NO: 34911864 NR Description: OSJNBb0032K15.9 [Oryza sativa (japonica
  misc_feature (1)..(240): Homolog of NCBI NO: 18403435 NR Description: expressed protein [Arabidopsis thaliana] expressed protein [Arabidopsis thaliana]
  misc_feature (1)..(240): Homolog of NCBI NO: 18396930 NR Description: expressed protein [Arabidopsis thaliana] unknown protein [Arabidopsis thaliana]
  misc_feature (1)..(276): Homolog of NCBI NO: 9759298 NR Description: emb|CAB82953.1~gene_id:MPH15.5~strong similarity
  misc_feature (1)..(276): Homolog of NCBI NO: 15229945 NR Description: expressed protein [Arabidopsis thaliana] gb|AAF30301.1~gene_id:MEC18.19~similar to unknown protein

SEQ ID NO: 104739 - DNA, 1238 bp, Arabidopsis thaliana
  misc_feature (1)..(1238): Ceres Seq. ID no. 13615663
  misc_feature: MA Experiment ID: 108434 Result: Up-regulated in Transcription
  misc_feature: MA Experiment 108434 PARAMETER Experiment Name: At_Root_Tips_cDNA_P Parameter: Tissue Value: Root Tips
  misc_feature: MA Experiment ID: 108569 Result: Up-regulated in Transcription
  misc_feature: MA Experiment 108569 PARAMETER Experiment Name: At_0.001%_MeJA__cDNA_P Parameter: Timepoint (hr) Value: 6
  misc_feature: MA Experiment 108569 PARAMETER Experiment Name: At_0.001%_MeJA__cDNA_P Parameter: Tissue Value: Aerial
  misc_feature: MA Experiment 108569 PARAMETER Experiment Name: At_0.001%_MeJA__cDNA_P Parameter: Treatment Value: 0.001% MeJA vs. No Treatment
  misc_feature: MA Experiment ID: 108573 Result: Up-regulated in Transcription
  misc_feature: MA Experiment 108573 PARAMETER Experiment Name: At_Drought_cDNA_P Parameter: Timepoint (hr) Value: 6
  misc_feature: MA Experiment 108573 PARAMETER Experiment Name: At_Drought_cDNA_P Parameter: Tissue Value: Aerial
  misc_feature: MA Experiment 108573 PARAMETER Experiment Name: At_Drought_cDNA_P Parameter: Treatment Value: Drought vs. No Drought
  misc_feature: MA Experiment ID: 108585 Result: Up-regulated in Transcription
  misc_feature: MA Experiment 108585 PARAMETER Experiment Name: At_5mM_NaNP_cDNA_P Parameter: Timepoint (hr) Value: 6
  misc_feature: MA Experiment 108585 PARAMETER Experiment Name: At_5mM_NaNP_cDNA_P Parameter: Tissue Value: Aerial
  misc_feature: MA Experiment 108585 PARAMETER Experiment Name: At_5mM_NaNP_cDNA_P Parameter: Treatment Value: null
  misc_feature: MA Experiment ID: 20000113 Result: Down-regulated in Transcription
  misc_feature: MA Experiment 20000113 PARAMETER Experiment Name: At_42deg_Heat_cDNA_P Parameter: Temperature (deg C) Value: 42 vs. 22
  misc_feature: MA Experiment 20000113 PARAMETER Experiment Name: At_42deg_Heat_cDNA_P Parameter: Timepoint (hr) Value: 8
  misc_feature: MA Experiment 20000113 PARAMETER Experiment Name: At_42deg_Heat_cDNA_P Parameter: Tissue Value: Aerial
  misc_feature: MA Experiment ID: 20000180 Result: Up-regulated in Transcription
  misc_feature: MA Experiment 20000180 PARAMETER Experiment Name: At_Germinating_Seeds_P Parameter: Age (hr) Value: 24 vs. 0
  misc_feature: MA Experiment 20000180 PARAMETER Experiment Name: At_Germinating_Seeds_P Parameter: Tissue Value: Germinating Seeds
  misc_feature: MA Experiment ID: 20000224 Result: Down-regulated in Transcription
attttaaccagcaaatacaaaaaacttccgatcccccttagcgtttccttctccggcgatattcttcttcttcggctcacattgcatcgtctctcactcgatccttcgttctttcagggacaatcatttcggaaacatgccaggtcagaagattgaaacgggtcatgaggacattgtccatgatgtgcagatggattactatggaaagcgaattgcaactgcatcatctgactgcaccatcaagataaccggtgtcagcaacaacggtggatcgcagcaactagccacattaaccggccaccgtggtcctgtctgggaagtcgcgtgggcacacccaaagtatggatcaatccttgcttcatgctcctatgatggtcaagtcatactctggaaagaaggcaaccagaaccaatggacccaagatcatgttttcacagaccacaaatcttcagtcaactccattgcatgggctcctcatgatatcggactatccttggcctgcgggtcatctgatggcaacatttcggttttcacagcccgtgctgacggtggctgggacacatcaaggattgaccaagcacatccggttggagtcacttcagtctcatgggccccagccacagcgcctggtgctcttgtgagctctggtcttctcgatccggtttacaagctagcttctggtggatgtgataataccgtgaaagtgtggaagctcgctaacgggtcatggaagatggattgctttccagctcttcaaaagcacactgattgggtccgtgatgtggcttgggcaccaaacttgggtctccccaagtccaccatagccagtggttcccaagatgggaaagttatcatatggacagtgggaaaagaaggtgagcaatgggaaggtaaggttctcaaggactttatgactcctgtgtggcgggtctcgtggtcgttgaccggtaacttattggccgtatccgatgggaacaacaacgtgactgtgtggaaagaggctgttgatggagagtgggaacaagttactgctgttgagccttaggtttttgatgctttgctatctctctgctcttcctttaaggaactgaatcaaacattttttctttactcttttcttagtccggtttggtggtctttttcagggaatgttgaattggttttcttaaagacttttggattattttttttcttattcttttcatagacaccattttaaaattctaaaaaccaagatc

SEQ ID NO: 104740 - protein, 302 aa, Arabidopsis thaliana; identical to SEQ ID NO: 23542
  peptide (1)..(302): Ceres Seq. ID no. 13615664
  misc_feature (1)..(302): Homolog of NCBI NO: 15227692 NR Description: transducin / WD-40 repeat protein family
  misc_feature (1)..(302): Homolog of NCBI NO: 21593146 NR Description: putative protein transport protein SEC13
  misc_feature (1)..(302): Homolog of NCBI NO: 15232095 NR Description: protein transport protein SEC13 family / WD-40 protein family [Arabidopsis thaliana] putative protein transport protein SEC13 [Arabidopsis thaliana]
  misc_feature (1)..(302): Homolog of NCBI NO: 21593236 NR Description: transport protein SEC13, putative [Arabidopsis
  misc_feature (1)..(301): Homolog of NCBI NO: 18147582 NR Description: Sec13p [Oryza sativa]
  misc_feature (1)..(302): Homolog of NCBI NO: 34393220 NR Description: putative Sec13p [Oryza sativa (japonica
  misc_feature (1)..(302): Homolog of NCBI NO: 34897242 NR Description: putative coat protein complex II (COPII)
  misc_feature (6)..(300): Homolog of NCBI NO: 32451650 NR Description: Unknown (protein for MGC:63980) [Danio rerio]
  misc_feature (6)..(300): Homolog of NCBI NO: 38174439 NR Description: Unknown (protein for MGC:76017) [Silurana
  misc_feature (6)..(300): Homolog of NCBI NO: 12805321 NR Description: SEC13 related gene [Mus musculus]

SEQ ID NO: 104741 - protein, 284 aa, Arabidopsis thaliana; identical to SEQ ID NO: 23543
  peptide (1)..(284): Ceres Seq. ID no. 13615665
  misc_feature (1)..(284): Homolog of NCBI NO: 15227692 NR Description: transducin / WD-40 repeat protein family
  misc_feature (1)..(284): Homolog of NCBI NO: 21593146 NR Description: putative protein transport protein SEC13
  misc_feature (1)..(284): Homolog of NCBI NO: 15232095 NR Description: protein transport protein SEC13 family / WD-40 protein family [Arabidopsis thaliana] putative protein transport protein SEC13 [Arabidopsis thaliana]
  misc_feature (1)..(284): Homolog of NCBI NO: 21593236 NR Description: transport protein SEC13, putative [Arabidopsis
  misc_feature (1)..(283): Homolog of NCBI NO: 18147582 NR Description: Sec13p [Oryza sativa]
  misc_feature (1)..(284): Homolog of NCBI NO: 34393220 NR Description: putative Sec13p [Oryza sativa (japonica
  misc_feature (1)..(284): Homolog of NCBI NO: 34897242 NR Description: putative coat protein complex II (COPII)
  misc_feature (1)..(282): Homolog of NCBI NO: 32451650 NR Description: Unknown (protein for MGC:63980) [Danio rerio]
  misc_feature (1)..(282): Homolog of NCBI NO: 38174439 NR Description: Unknown (protein for MGC:76017) [Silurana
  misc_feature (1)..(282): Homolog of NCBI NO: 12805321 NR Description: SEC13 related gene [Mus musculus]

SEQ ID NO: 104742 - DNA, 732 bp, Arabidopsis thaliana
  misc_feature (1)..(732): Ceres Seq. ID no. 13615666
  misc_feature: MA Experiment ID: 20000179 Result: Down-regulated in Transcription
  misc_feature: MA Experiment 20000179 PARAMETER Experiment Name: At_Germinating_Seeds_P Parameter: Age (hr) Value: 6 vs. 0
  misc_feature: MA Experiment 20000179 PARAMETER Experiment Name: At_Germinating_Seeds_P Parameter: Tissue Value: Germinating Seeds
  misc_feature: MA Experiment ID: 20000227 Result: Up-regulated in Transcription
  misc_feature: MA Experiment 20000227 PARAMETER Experiment Name: At_Root-Tips-vs-Tops_P Parameter: Tissue Value: Root Tips vs. Root Tops
aactctaagtttttctttcttctttctctgctctcaaagctcaagagaactctatccttattaacttacaaggataactaaaaccggtgtaatcacgatcatagtagaagatgggcggtcccggatcatcaccatgtgcttcgtgtaagcttcttcgacgacgatgtgcaaaagattgcatcttcgcaccttattttcctcctgacgatcctcacaaattcgccattgttcataaggtctttggtgccagcaacgtcagcaaaatgttgcaggagctaccagttcatcaaagagctgacgcggtgaatagtctggtttttgaagcaaacgcaagagtaagagatccggtctacggctgcgtaggagcaatctcctacttacaaaaccaagtctcgcagcttcagatgcaactagcagtggctcaagccgagattctttgcattcagatgcaaaatgagccaaccttacagtctcatcatcaagtacttgaactagaccaagaccacaaagctctcttactaaacaacaacaacatcaataactgcaacaccaacaacaacaataacaactttggttatgccatgtcttctggacagttcaactctaactttgcctcaccaagcagcataatgcaaatgcagatgcaaatgcaaatgcaagaccctcttaagcaagaatctctttggacttaatgtaataataataataataattaatgttcgacaagtttgc

SEQ ID NO: 104743 - protein, 193 aa, Arabidopsis thaliana
  peptide (1)..(193): Ceres Seq. ID no. 13615667
  misc_feature (1)..(193): Homolog of NCBI NO: 18402268 NR Description: lateral organ boundaries (LOB) domain family
  misc_feature (1)..(193): Homolog of NCBI NO: 21592574 NR Description: unknown [Arabidopsis thaliana]
  misc_feature (6)..(122): Homolog of NCBI NO: 15221679 NR Description: lateral organ boundaries (LOB) domain family
  misc_feature (7)..(153): Homolog of NCBI NO: 15223050 NR Description: lateral organ boundaries (LOB) domain family
  misc_feature (7)..(120): Homolog of NCBI NO: 15226404 NR Description: lateral organ boundaries (LOB) domain family thaliana] >gi|29428040|sp|Q9SK08|LB11_ARATH LOB domain protein 11 hypothetical protein At2g28500 [imported] protein [Arabidopsis
  misc_feature (6)..(108): Homolog of NCBI NO: 15242624 NR Description: lateral organ boundaries (LOB) protein thaliana] >gi|30697777|ref|NP_851252.1| lateral organ boundaries protein [Arabidopsis thaliana] >gi|30697779|ref|NP_851253.1|
  misc_feature (2)..(109): Homolog of NCBI NO: 18405401 NR Description: lateral organ boundaries (LOB) domain family thaliana] >gi|29427824|sp|Q8L5T5|LB15_ARATH LOB domain protein 15 hypothetical protein At2g40470 [imported] DOMAIN 15 [Arabidopsis
  misc_feature (2)..(109): Homolog of NCBI NO: 21618113 NR Description: LOB DOMAIN 13 [Arabidopsis thaliana]
  misc_feature (7)..(112): Homolog of NCBI NO: 15219279 NR Description: lateral organ boundaries (LOB) domain family thaliana] >gi|29428034|sp|Q9SA51|LBD3_ARATH LOB domain protein 3
  misc_feature (4)..(109): Homolog of NCBI NO: 34896184 NR Description: contains ESTs C98868(E3203),C98869(E3203)~similar Arabidopsis thaliana chromosome 5, MDC12.5~unknown protein [Oryza
MGGPGSSPCASCKLLRRRCAKDCIFAPYFPPDDPHKFAIVHKVFGASNVSKMLQELPVHQRADAVNSLVFEANARVRDPVYGCVGAISYLQNQVSQLQMQLAVAQAEILCIQMQNEPTLQSHHQVLELDQDHKALLLNNNNINNCNTNNNNNNFGYAMSSGQFNSNFASPSSIMQMQMQMQMQDPLKQESLWT

SEQ ID NO: 104744 - protein, 142 aa, Arabidopsis thaliana; identical to SEQ ID NO: 21430
  peptide (1)..(142): Ceres Seq. ID no. 13615668
  misc_feature (1)..(142): Homolog of NCBI NO: 18402268 NR Description: lateral organ boundaries (LOB) domain family
  misc_feature (1)..(142): Homolog of NCBI NO: 21592574 NR Description: unknown [Arabidopsis thaliana]
  misc_feature (1)..(71): Homolog of NCBI NO: 15221679 NR Description: lateral organ boundaries (LOB) domain family
  misc_feature (1)..(102): Homolog of NCBI NO: 15223050 NR Description: lateral organ boundaries (LOB) domain family
  misc_feature (1)..(69): Homolog of NCBI NO: 15226404 NR Description: lateral organ boundaries (LOB) domain family thaliana] >gi|29428040|sp|Q9SK08|LB11_ARATH LOB domain protein 11 hypothetical protein At2g28500 [imported] protein [Arabidopsis
  misc_feature (1)..(57): Homolog of NCBI NO: 15242624 NR Description: lateral organ boundaries (LOB) protein thaliana] >gi|30697777|ref|NP_851252.1| lateral organ boundaries protein [Arabidopsis thaliana] >gi|30697779|ref|NP_851253.1|
  misc_feature (1)..(58): Homolog of NCBI NO: 18405401 NR Description: lateral organ boundaries (LOB) domain family thaliana] >gi|29427824|sp|Q8L5T5|LB15_ARATH LOB domain protein 15 hypothetical protein At2g40470 [imported] DOMAIN 15 [Arabidopsis
  misc_feature (1)..(58): Homolog of NCBI NO: 21618113 NR Description: LOB DOMAIN 13 [Arabidopsis thaliana]
  misc_feature (1)..(61): Homolog of NCBI NO: 15219279 NR Description: lateral organ boundaries (LOB) domain family thaliana] >gi|29428034|sp|Q9SA51|LBD3_ARATH LOB domain protein 3
  misc_feature (1)..(58): Homolog of NCBI NO: 34896184 NR Description: contains ESTs C98868(E3203),C98869(E3203)~similar Arabidopsis thaliana chromosome 5, MDC12.5~unknown protein [Oryza

SEQ ID NO: 104745 - DNA, 764 bp, Arabidopsis thaliana
  misc_feature (1)..(764): Ceres Seq. ID no. 13615675
  misc_feature: MA Experiment ID: 20000112 Result: Up-regulated in Transcription
  misc_feature: MA Experiment 20000112 PARAMETER Experiment Name: At_42deg_Heat_cDNA_P Parameter: Temperature (deg C) Value: 42 vs. 22
  misc_feature: MA Experiment 20000112 PARAMETER Experiment Name: At_42deg_Heat_cDNA_P Parameter: Timepoint (hr) Value: 2
  misc_feature: MA Experiment 20000112 PARAMETER Experiment Name: At_42deg_Heat_cDNA_P Parameter: Tissue Value: Aerial
  misc_feature: MA Experiment ID: 20001451 Result: Up-regulated in Transcription
  misc_feature: MA Experiment 20001451 PARAMETER Experiment Name: At_Far-red-induction_P Parameter: Age (day) Value: 7
  misc_feature: MA Experiment 20001451 PARAMETER Experiment Name: At_Far-red-induction_P Parameter: Light Value: Far-red vs. White
  misc_feature: MA Experiment 20001451 PARAMETER Experiment Name: At_Far-red-induction_P Parameter: Organism Value: A. thaliana
  misc_feature: MA Experiment 20001451 PARAMETER Experiment Name: At_Far-red-induction_P Parameter: Plant Line Value: Columbia
  misc_feature: MA Experiment 20001451 PARAMETER Experiment Name: At_Far-red-induction_P Parameter: Timepoint (hr) Value: 24
  misc_feature: MA Experiment 20001451 PARAMETER Experiment Name: At_Far-red-induction_P Parameter: Tissue Value: Whole Plant
atccaacaaacttatatgtgtatcggacacagaagaatactttccacgatcatcagcttctggagatctcttctgggaatcgagcttcactgttaaagattttccttcaatcggctaaaaatgatacatttcgtgttactagtcagtcgacaagggaaagtaaggctcaccaagtggtattcgccgtatacgcagaaggaaagatctaaggtcatacgtgaactcagtggagtgattctgaaccgaggtcccaagctctgcaattttattgaatggagaggatacaaggttgtctacaaaagatatgcaagcttgtacttctgcatgtgcattgatgaggcggataacgagttagaggtactggagataattcatcactacgtcgagattcttgaccgctactttggcagtgtgtgtgaactcgatttgatttttaacttccacaaggcgtattatatactcgatgagctgttgatcgccggagaacttcaagagtcaagcaagaaaacagttgcaaggataatatcagcccaggatcaattggtggaagttgcgaaagaggaggcgagttccataagtaatataattgctcaggctaccaagtagtccttttctgaacttttcttatgcagctgaaacaatcgtaaatgagttaatattttccttaaactctgagatattctcttctgaatcacacttttgtttgtcatgtcatgtgattgtttgattgattagaagaaagaagcattcatcgttttgggttt

SEQ ID NO: 104746 - protein, 161 aa, Arabidopsis thaliana
  peptide (1)..(161): Ceres Seq. ID no. 13615676
  misc_feature (1)..(142): Pfam Name: Clathrin adaptor complex small chain Pfam Description: Clathrin adaptor complex small chain
  misc_feature (1)..(161): Homolog of NCBI NO: 18398407 NR Description: clathrin assembly protein AP19, small subunit thaliana] >gi|25345213|pir||E84551 clathrin assembly protein
  misc_feature (1)..(161): Homolog of NCBI NO: 2231698 NR Description: clathrin assembly protein AP19 [Arabidopsis >gi|2231700|gb|AAB96888.1| clathrin assembly protein AP19 homolog
  misc_feature (1)..(160): Homolog of NCBI NO: 15237005 NR Description: clathrin assembly protein AP19 homolog
  misc_feature (1)..(161): Homolog of NCBI NO: 1762309 NR Description: AP-1 Golgi-related complex component; clathrin
  misc_feature (1)..(161): Homolog of NCBI NO: 34897116 NR Description: putative clathrin assembly protein [Oryza sativa]
  misc_feature (1)..(161): Homolog of NCBI NO: 32129329 NR Description: putative clathrin assembly protein [Oryza sativa
  misc_feature (1)..(143): Homolog of NCBI NO: 23508378 NR Description: clathrin assembly protein AP19, putative falciparum 3D7] >gi|23496110|gb|AAN35771.1|AE014838_49 clathrin
  misc_feature (1)..(156): Homolog of NCBI NO: 23480730 NR Description: clathrin assembly protein AP19, small subunit
  misc_feature (1)..(109): Homolog of NCBI NO: 30690340 NR Description: clathrin assembly protein AP19 homolog
  misc_feature (2)..(147): Homolog of NCBI NO: 21541960 NR Description: Adapter-related protein complex 1 sigma 1B
MIHFVLLVSRQGKVRLTKWYSPYTQKERSKVIRELSGVILNRGPKLCNFIEWRGYKVVYKRYASLYFCMCIDEADNELEVLEIIHHYVEILDRYFGSVCELDLIFNFHKAYYILDELLIAGELQESSKKTVARIISAQDQLVEVAKEEASSISNIIAQATK

SEQ ID NO: 104747 - protein, 93 aa, Arabidopsis thaliana; identical to SEQ ID NO: 29147
  peptide (1)..(93): Ceres Seq. ID no. 13615677
  misc_feature (1)..(74): Pfam Name: Clathrin adaptor complex small chain Pfam Description: Clathrin adaptor complex small chain
  misc_feature (1)..(93): Homolog of NCBI NO: 18398407 NR Description: clathrin assembly protein AP19, small subunit thaliana] >gi|25345213|pir||E84551 clathrin assembly protein
  misc_feature (1)..(93): Homolog of NCBI NO: 2231698 NR Description: clathrin assembly protein AP19 [Arabidopsis >gi|2231700|gb|AAB96888.1| clathrin assembly protein AP19 homolog
  misc_feature (1)..(92): Homolog of NCBI NO: 15237005 NR Description: clathrin assembly protein AP19 homolog
  misc_feature (1)..(93): Homolog of NCBI NO: 1762309 NR Description: AP-1 Golgi-related complex component; clathrin
  misc_feature (1)..(93): Homolog of NCBI NO: 34897116 NR Description: putative clathrin assembly protein [Oryza sativa]
  misc_feature (1)..(93): Homolog of NCBI NO: 32129329 NR Description: putative clathrin assembly protein [Oryza sativa
  misc_feature (1)..(75): Homolog of NCBI NO: 23508378 NR Description: clathrin assembly protein AP19, putative falciparum 3D7] >gi|23496110|gb|AAN35771.1|AE014838_49 clathrin
  misc_feature (1)..(88): Homolog of NCBI NO: 23480730 NR Description: clathrin assembly protein AP19, small subunit
  misc_feature (1)..(41): Homolog of NCBI NO: 30690340 NR Description: clathrin assembly protein AP19 homolog
  misc_feature (1)..(79): Homolog of NCBI NO: 21541960 NR Description: Adapter-related protein complex 1 sigma 1B

SEQ ID NO: 104748 - DNA, 842 bp, Arabidopsis thaliana
  misc_feature (1)..(842): Ceres Seq. ID no. 13615678
  misc_feature: MA Experiment ID: 108463 Result: Up-regulated in Transcription
  misc_feature: MA Experiment 108463 PARAMETER Experiment Name: At_Germinating_Seeds_cDNA_P Parameter: Age (day) Value: 3 vs. 0
  misc_feature: MA Experiment 108463 PARAMETER Experiment Name: At_Germinating_Seeds_cDNA_P Parameter: Tissue Value: Germinating Seeds
  misc_feature: MA Experiment ID: 108488 Result: Up-regulated in Transcription
  misc_feature: MA Experiment ID: 108572 Result: Up-regulated in Transcription
  misc_feature: MA Experiment 108572 PARAMETER Experiment Name: At_Drought_cDNA_P Parameter: Timepoint (hr) Value: 1
  misc_feature: MA Experiment 108572 PARAMETER Experiment Name: At_Drought_cDNA_P Parameter: Tissue Value: Aerial
  misc_feature: MA Experiment 108572 PARAMETER Experiment Name: At_Drought_cDNA_P Parameter: Treatment Value: Drought vs. No Drought
  misc_feature: MA Experiment ID: 108573 Result: Up-regulated in Transcription
  misc_feature: MA Experiment 108573 PARAMETER Experiment Name: At_Drought_cDNA_P Parameter: Timepoint (hr) Value: 6
  misc_feature: MA Experiment 108573 PARAMETER Experiment Name: At_Drought_cDNA_P Parameter: Tissue Value: Aerial
  misc_feature: MA Experiment 108573 PARAMETER Experiment Name: At_Drought_cDNA_P Parameter: Treatment Value: Drought vs. No Drought
  misc_feature: MA Experiment ID: 108574 Result: Down-regulated in Transcription
  misc_feature: MA Experiment 108574 PARAMETER Experiment Name: At_Wounding__cDNA_P Parameter: Timepoint (hr) Value: 1
  misc_feature: MA Experiment 108574 PARAMETER Experiment Name: At_Wounding__cDNA_P Parameter: Tissue Value: Aerial
  misc_feature: MA Experiment 108574 PARAMETER Experiment Name: At_Wounding__cDNA_P Parameter: Treatment Value: Wounding vs. No Wounding
  misc_feature: MA Experiment ID: 108576 Result: Down-regulated in Transcription
  misc_feature: MA Experiment 108576 PARAMETER Experiment Name: At_42deg_Heat_cDNA_P Parameter: Temperature (deg C) Value: 42 vs. 22
  misc_feature: MA Experiment 108576 PARAMETER Experiment Name: At_42deg_Heat_cDNA_P Parameter: Timepoint (hr) Value: 1
  misc_feature: MA Experiment 108576 PARAMETER Experiment Name: At_42deg_Heat_cDNA_P Parameter: Tissue Value: Aerial
  misc_feature: MA Experiment ID: 108579 Result: Down-regulated in Transcription
  misc_feature: MA Experiment 108579 PARAMETER Experiment Name: At_4deg_Cold_cDNA_P Parameter: Temperature (deg C) Value: 4 vs. 22
  misc_feature: MA Experiment 108579 PARAMETER Experiment Name: At_4deg_Cold_cDNA_P Parameter: Timepoint (hr) Value: 6
  misc_feature: MA Experiment 108579 PARAMETER Experiment Name: At_4deg_Cold_cDNA_P Parameter: Tissue Value: Aerial
  misc_feature: MA Experiment ID: 108595 Result: Down-regulated in Transcription
  misc_feature: MA Experiment 108595 PARAMETER Experiment Name: At_Ler-pi_Ovule_cDNA_P Parameter: Plant Line Value: null
  misc_feature: MA Experiment ID: 20000069 Result: Up-regulated in Transcription
  misc_feature: MA Experiment 20000069 PARAMETER Experiment Name: At_100uM_ABA_Mutants_cDNA_P Parameter: Plant Line Value: CS23
  misc_feature: MA Experiment 20000069 PARAMETER Experiment Name: At_100uM_ABA_Mutants_cDNA_P Parameter: Timepoint (hr) Value: 6
  misc_feature: MA Experiment 20000069 PARAMETER Experiment Name: At_100uM_ABA_Mutants_cDNA_P Parameter: Tissue Value: Aerial
  misc_feature: MA Experiment 20000069 PARAMETER Experiment Name: At_100uM_ABA_Mutants_cDNA_P Parameter: Treatment Value: 100uM ABA vs. No Treatment
  misc_feature: MA Experiment ID: 20000071 Result: Up-regulated in Transcription
  misc_feature: MA Experiment 20000071 PARAMETER Experiment Name: At_100uM_ABA_Mutants_cDNA_P Parameter: Plant Line Value: CS8104
  misc_feature: MA Experiment 20000071 PARAMETER Experiment Name: At_100uM_ABA_Mutants_cDNA_P Parameter: Timepoint (hr) Value: 6
  misc_feature: MA Experiment 20000071 PARAMETER Experiment Name: At_100uM_ABA_Mutants_cDNA_P Parameter: Tissue Value: Aerial
  misc_feature: MA Experiment 20000071 PARAMETER Experiment Name: At_100uM_ABA_Mutants_cDNA_P Parameter: Treatment Value: 100uM ABA vs. No Treatment
  misc_feature: MA Experiment ID: 20000072 Result: Up-regulated in Transcription
  misc_feature: MA Experiment 20000072 PARAMETER Experiment Name: At_100uM_ABA_Mutants_cDNA_P Parameter: Plant Line Value: CS8105
  misc_feature: MA Experiment 20000072 PARAMETER Experiment Name: At_100uM_ABA_Mutants_cDNA_P Parameter: Timepoint (hr) Value: 6
  misc_feature: MA Experiment 20000072 PARAMETER Experiment Name: At_100uM_ABA_Mutants_cDNA_P Parameter: Tissue Value: Aerial
  misc_feature: MA Experiment 20000072 PARAMETER Experiment Name: At_100uM_ABA_Mutants_cDNA_P Parameter: Treatment Value: 100uM ABA vs. No Treatment
  misc_feature: MA Experiment ID: 20000087 Result: Up-regulated in Transcription
  misc_feature: MA Experiment 20000087 PARAMETER Experiment Name: At_100uM_ABA_Mutants_cDNA_P Parameter: Plant Line Value: WS
  misc_feature: MA Experiment 20000087 PARAMETER Experiment Name: At_100uM_ABA_Mutants_cDNA_P Parameter: Timepoint (hr) Value: 6
  misc_feature: MA Experiment 20000087 PARAMETER Experiment Name: At_100uM_ABA_Mutants_cDNA_P Parameter: Tissue Value: Aerial
  misc_feature: MA Experiment 20000087 PARAMETER Experiment Name: At_100uM_ABA_Mutants_cDNA_P Parameter: Treatment Value: 100uM ABA vs. No Treatment
  misc_feature: MA Experiment ID: 20000088 Result: Up-regulated in Transcription
  misc_feature: MA Experiment 20000088 PARAMETER Experiment Name: At_100uM_ABA_Mutants_cDNA_P Parameter: Plant Line Value: Landsberg
  misc_feature: MA Experiment 20000088 PARAMETER Experiment Name: At_100uM_ABA_Mutants_cDNA_P Parameter: Timepoint (hr) Value: 6
  misc_feature: MA Experiment 20000088 PARAMETER Experiment Name: At_100uM_ABA_Mutants_cDNA_P Parameter: Tissue Value: Aerial
  misc_feature: MA Experiment 20000088 PARAMETER Experiment Name: At_100uM_ABA_Mutants_cDNA_P Parameter: Treatment Value: 100uM ABA vs. No Treatment
  misc_feature: MA Experiment ID: 20000089 Result: Up-regulated in Transcription
  misc_feature: MA Experiment ID: 20000090 Result: Up-regulated in Transcription
  misc_feature: MA Experiment ID: 20000111 Result: Down-regulated in Transcription
  misc_feature: MA Experiment 20000111 PARAMETER Experiment Name: At_42deg_Heat_cDNA_P Parameter: Temperature (deg C) Value: 42 vs. 22
  misc_feature: MA Experiment 20000111 PARAMETER Experiment Name: At_42deg_Heat_cDNA_P Parameter: Timepoint (hr) Value: 6
  misc_feature: MA Experiment 20000111 PARAMETER Experiment Name: At_42deg_Heat_cDNA_P Parameter: Tissue Value: Aerial
  misc_feature: MA Experiment ID: 20000112 Result: Down-regulated in Transcription
  misc_feature: MA Experiment 20000112 PARAMETER Experiment Name: At_42deg_Heat_cDNA_P Parameter: Temperature (deg C) Value: 42 vs. 22
  misc_feature: MA Experiment 20000112 PARAMETER Experiment Name: At_42deg_Heat_cDNA_P Parameter: Timepoint (hr) Value: 2
  misc_feature: MA Experiment 20000112 PARAMETER Experiment Name: At_42deg_Heat_cDNA_P Parameter: Tissue Value: Aerial
  misc_feature: MA Experiment ID: 20000113 Result: Down-regulated in Transcription
  misc_feature: MA Experiment 20000113 PARAMETER Experiment Name: At_42deg_Heat_cDNA_P Parameter: Temperature (deg C) Value: 42 vs. 22
  misc_feature: MA Experiment 20000113 PARAMETER Experiment Name: At_42deg_Heat_cDNA_P Parameter: Timepoint (hr) Value: 8
  misc_feature: MA Experiment 20000113 PARAMETER Experiment Name: At_42deg_Heat_cDNA_P Parameter: Tissue Value: Aerial
  misc_feature: MA Experiment ID: 20000117 Result: Up-regulated in Transcription
  misc_feature: MA Experiment 20000117 PARAMETER Experiment Name: At_100uM_ABA_Mutants_cDNA_P Parameter: Plant Line Value: Columbia
  misc_feature: MA Experiment 20000117 PARAMETER Experiment Name: At_100uM_ABA_Mutants_cDNA_P Parameter: Timepoint (hr) Value: 6
  misc_feature: MA Experiment 20000117 PARAMETER Experiment Name: At_100uM_ABA_Mutants_cDNA_P Parameter: Tissue Value: Aerial
  misc_feature: MA Experiment 20000117 PARAMETER Experiment Name: At_100uM_ABA_Mutants_cDNA_P Parameter: Treatment Value: 100uM ABA vs. No Treatment
  misc_feature: MA Experiment ID: 20000144 Result: Down-regulated in Transcription
  misc_feature: MA Experiment 20000144 PARAMETER Experiment Name: At_42deg_Heat_cDNA_P Parameter: Temperature (deg C) Value: 42 vs. 22
  misc_feature: MA Experiment 20000144 PARAMETER Experiment Name: At_42deg_Heat_cDNA_P Parameter: Timepoint (hr) Value: 1
  misc_feature: MA Experiment 20000144 PARAMETER Experiment Name: At_42deg_Heat_cDNA_P Parameter: Tissue Value: Aerial
  misc_feature: MA Experiment ID: 20000173 Result: Down-regulated in Transcription
  misc_feature: MA Experiment 20000173 PARAMETER Experiment Name: At_42deg_Heat_P Parameter: Age (day) Value: 14
  misc_feature: MA Experiment 20000173 PARAMETER Experiment Name: At_42deg_Heat_P Parameter: Organism Value: A. thaliana
  misc_feature: MA Experiment 20000173 PARAMETER Experiment Name: At_42deg_Heat_P Parameter: Plant Line Value: WS
  misc_feature: MA Experiment 20000173 PARAMETER Experiment Name: At_42deg_Heat_P Parameter: Temperature (deg C) Value: 42 vs. 22
  misc_feature: MA Experiment 20000173 PARAMETER Experiment Name: At_42deg_Heat_P Parameter: Timepoint (hr) Value: 6
  misc_feature: MA Experiment 20000173 PARAMETER Experiment Name: At_42deg_Heat_P Parameter: Tissue Value: Aerial
  misc_feature: MA Experiment ID: 20000180 Result: Up-regulated in Transcription
  misc_feature: MA Experiment 20000180 PARAMETER Experiment Name: At_Germinating_Seeds_P Parameter: Age (hr) Value: 24 vs. 0
  misc_feature: MA Experiment 20000180 PARAMETER Experiment Name: At_Germinating_Seeds_P Parameter: Tissue Value: Germinating Seeds
  misc_feature: MA Experiment ID: 20000185 Result: Down-regulated in Transcription
  misc_feature: MA Experiment 20000185 PARAMETER Experiment Name: At_Roots__P Parameter: Age (day) Value: 7 vs. 21
  misc_feature: MA Experiment 20000185 PARAMETER Experiment Name: At_Roots__P Parameter: Organism Value: A. thaliana
  misc_feature: MA Experiment 20000185 PARAMETER Experiment Name: At_Roots__P Parameter: Tissue Value: Roots vs. Whole Plant
  misc_feature: MA Experiment ID: 20000224 Result: Down-regulated in Transcription
  misc_feature: MA Experiment ID: 20000234 Result: Down-regulated in Transcription
  misc_feature: MA Experiment 20000234 PARAMETER Experiment Name: At_Siliques_P Parameter: Age (day) Value: 21
  misc_feature: MA Experiment 20000234 PARAMETER Experiment Name: At_Siliques_P Parameter: Organism Value: A. thaliana
  misc_feature: MA Experiment 20000234 PARAMETER Experiment Name: At_Siliques_P Parameter: Plant Line Value: WS
  misc_feature: MA Experiment 20000234 PARAMETER Experiment Name: At_Siliques_P Parameter: Tissue Value: Less Than 5mm Siliques vs. Whole Plant
  misc_feature: MA Experiment ID: 20000235 Result: Down-regulated in Transcription
  misc_feature: MA Experiment 20000235 PARAMETER Experiment Name: At_Siliques_P Parameter: Age (day) Value: 21
  misc_feature: MA Experiment 20000235 PARAMETER Experiment Name: At_Siliques_P Parameter: Organism Value: A. thaliana
  misc_feature: MA Experiment 20000235 PARAMETER Experiment Name: At_Siliques_P Parameter: Plant Line Value: WS
  misc_feature: MA Experiment 20000235 PARAMETER Experiment Name: At_Siliques_P Parameter: Tissue Value: 5-10mm Siliques vs. Whole Plant
  misc_feature: MA Experiment ID: 20000264 Result: Down-regulated in Transcription
  misc_feature: MA Experiment 20000264 PARAMETER Experiment Name: At_Open_Flower_P Parameter: Age (day) Value: 21
  misc_feature: MA Experiment 20000264 PARAMETER Experiment Name: At_Open_Flower_P Parameter: Plant Line Value: WS
  misc_feature: MA Experiment 20000264 PARAMETER Experiment Name: At_Open_Flower_P Parameter: Tissue Value: Open Flower vs. Whole Plant
  misc_feature: MA Experiment ID: 20000437 Result: Up-regulated in Transcription
  misc_feature: MA Experiment 20000437 PARAMETER Experiment Name: At_Drought_P Parameter: Age (day) Value: 8
  misc_feature: MA Experiment 20000437 PARAMETER Experiment Name: At_Drought_P Parameter: Organism Value: A. thaliana
  misc_feature: MA Experiment 20000437 PARAMETER Experiment Name: At_Drought_P Parameter: Plant Line Value: WS
  misc_feature: MA Experiment 20000437 PARAMETER Experiment Name: At_Drought_P Parameter: Timepoint (hr) Value: 24
  misc_feature: MA Experiment 20000437 PARAMETER Experiment Name: At_Drought_P Parameter: Tissue Value: Whole Plant
  misc_feature: MA Experiment 20000437 PARAMETER Experiment Name: At_Drought_P Parameter: Treatment Value: Drought vs. No Drought
  misc_feature: MA Experiment ID: 20000439 Result: Down-regulated in Transcription
  misc_feature: MA Experiment 20000439 PARAMETER Experiment Name: At_Roots__P Parameter: Age (day) Value: 14 vs. 21
  misc_feature: MA Experiment 20000439 PARAMETER Experiment Name: At_Roots__P Parameter: Organism Value: A. thaliana
  misc_feature: MA Experiment 20000439 PARAMETER Experiment Name: At_Roots__P Parameter: Tissue Value: Roots vs. Whole Plant
  misc_feature: MA Experiment ID: 20001248 Result: Up-regulated in Transcription
  misc_feature: MA Experiment 20001248 PARAMETER Experiment Name: At_Far-red-induction_P Parameter: Age (day) Value: 7
  misc_feature: MA Experiment 20001248 PARAMETER Experiment Name: At_Far-red-induction_P Parameter: Light Value: Far-red vs. White
  misc_feature: MA Experiment 20001248 PARAMETER Experiment Name: At_Far-red-induction_P Parameter: Organism Value: A. thaliana
  misc_feature: MA Experiment 20001248 PARAMETER Experiment Name: At_Far-red-induction_P Parameter: Plant Line Value: Columbia
  misc_feature: MA Experiment 20001248 PARAMETER Experiment Name: At_Far-red-induction_P Parameter: Timepoint (hr) Value: 4
  misc_feature: MA Experiment 20001248 PARAMETER Experiment Name: At_Far-red-induction_P Parameter: Tissue Value: Whole Plant
atgtatcctttatgtgtctctattataacgtggatcaagattctttcttatcttcatcactccacacattttcttgtcttcaaactcacacaaagaaagaaaagtctccaaagctcaaaaagcaatgactcgaccgtcaagattacttgagacggcggcgccaccaccacaaccgtcggaggagatgatcgcagcggaatccgacatggtggtgatcttgtcggctcttctttgcgctcttatctgcgttgctggtctcgccgccgtcgtacgatgcgcttggctccggcggtttacagccggaggagattcgccgtcaccgaacaaaggcttgaaaaagaaagctcttcagtctcttccaagatccactttcaccgccgcggaatcaacctccggcgccgccgctgaagagggagactcgacggaatgtgctatttgcctcactgacttcgccgacggtgaagaaataagagtgcttcctctttgtggtcattctttccacgtggagtgtattgacaaatggctagtttctaggtcttcttgtccttcttgtcgcaggattcttacgccggtgagatgtgaccggtgtggtcatgcttctacggcggagatgaaagatcaagctcatcgtcatcaacatcaccaacactcttctactaccattcctacgtttcttccttaattaacactaatttttgttttattatggcaataattaattgcataaaagttatgtaaagtgagtttaattaggattagagagatcttttaaagtttttctctcttttctccttgttgtaatccagtgtatttaatcaaatctcagatggagttcaaatttc

SEQ ID NO: 104749 - protein, 185 aa, Arabidopsis thaliana; identical to SEQ ID NO: 22151
  peptide (1)..(185): Ceres Seq. ID no. 13615679
  misc_feature (102)..(143): Pfam Name: Zinc finger, C3HC4 type (RING finger) Pfam Description: Zinc finger, C3HC4 type (RING finger)
  misc_feature (1)..(185): Homolog of NCBI NO: 15227839 NR Description: RING zinc finger protein -related [Arabidopsis
  misc_feature (1)..(185): Homolog of NCBI NO: 15237013 NR Description: RING-H2 finger protein RHA3b [Arabidopsis
  misc_feature (7)..(156): Homolog of NCBI NO: 15218042 NR Description: RING zinc finger protein -related [Arabidopsis
  misc_feature (1)..(185): Homolog of NCBI NO: 32487554 NR Description: OSJNBa0013K16.6 [Oryza sativa (japonica
  misc_feature (1)..(153): Homolog of NCBI NO: 7489432 NR Description: probable ring finger protein - barley
  misc_feature (6)..(156): Homolog of NCBI NO: 15223041 NR Description: RING zinc finger protein -related [Arabidopsis
  misc_feature (6)..(156): Homolog of NCBI NO: 21555237 NR Description: putative RING zinc finger protein [Arabidopsis
  misc_feature (68)..(155): Homolog of NCBI NO: 37536508 NR Description: putative ring finger protein [Oryza sativa
  misc_feature (1)..(67): Homolog of NCBI NO: 37536508 NR Description: putative ring finger protein [Oryza sativa
  misc_feature (18)..(156): Homolog of NCBI NO: 15239062 NR Description: RING zinc finger protein-related [Arabidopsis

SEQ ID NO: 104750 - protein, 165 aa, Arabidopsis thaliana
  peptide (1)..(165): Ceres Seq. ID no. 13615680
  misc_feature (82)..(123): Pfam Name: Zinc finger, C3HC4 type (RING finger) Pfam Description: Zinc finger, C3HC4 type (RING finger)
  misc_feature (1)..(165): Homolog of NCBI NO: 15227839 NR Description: RING zinc finger protein -related [Arabidopsis
  misc_feature (1)..(165): Homolog of NCBI NO: 15237013 NR Description: RING-H2 finger protein RHA3b [Arabidopsis
  misc_feature (1)..(136): Homolog of NCBI NO: 15218042 NR Description: RING zinc finger protein -related [Arabidopsis
  misc_feature (1)..(165): Homolog of NCBI NO: 32487554 NR Description: OSJNBa0013K16.6 [Oryza sativa (japonica
  misc_feature (1)..(133): Homolog of NCBI NO: 7489432 NR Description: probable ring finger protein - barley
  misc_feature (1)..(136): Homolog of NCBI NO: 15223041 NR Description: RING zinc finger protein -related [Arabidopsis
  misc_feature (1)..(136): Homolog of NCBI NO: 21555237 NR Description: putative RING zinc finger protein [Arabidopsis
  misc_feature (48)..(135): Homolog of NCBI NO: 37536508 NR Description: putative ring finger protein [Oryza sativa
  misc_feature (1)..(47): Homolog of NCBI NO: 37536508 NR Description: putative ring finger protein [Oryza sativa
  misc_feature (1)..(136): Homolog of NCBI NO: 15239062 NR Description: RING zinc finger protein-related [Arabidopsis
MIAAESDMVVILSALLCALICVAGLAAVVRCAWLRRFTAGGDSPSPNKGLKKKALQSLPRSTFTAAESTSGAAAEEGDSTECAICLTDFADGEEIRVLPLCGHSFHVECIDKWLVSRSSCPSCRRILTPVRCDRCGHASTAEMKDQAHRHQHHQHSSTTIPTFLP

SEQ ID NO: 104751 - protein, 158 aa, Arabidopsis thaliana
  peptide (1)..(158): Ceres Seq. ID no. 13615681
  misc_feature (75)..(116): Pfam Name: Zinc finger, C3HC4 type (RING finger) Pfam Description: Zinc finger, C3HC4 type (RING finger)
  misc_feature (1)..(158): Homolog of NCBI NO: 15227839 NR Description: RING zinc finger protein -related [Arabidopsis
  misc_feature (1)..(158): Homolog of NCBI NO: 15237013 NR Description: RING-H2 finger protein RHA3b [Arabidopsis
  misc_feature (1)..(129): Homolog of NCBI NO: 15218042 NR Description: RING zinc finger protein -related [Arabidopsis
  misc_feature (1)..(158): Homolog of NCBI NO: 32487554 NR Description: OSJNBa0013K16.6 [Oryza sativa (japonica
  misc_feature (1)..(126): Homolog of NCBI NO: 7489432 NR Description: probable ring finger protein - barley
  misc_feature (1)..(129): Homolog of NCBI NO: 15223041 NR Description: RING zinc finger protein -related [Arabidopsis
  misc_feature (1)..(129): Homolog of NCBI NO: 21555237 NR Description: putative RING zinc finger protein [Arabidopsis
  misc_feature (41)..(128): Homolog of NCBI NO: 37536508 NR Description: putative ring finger protein [Oryza sativa
  misc_feature (1)..(40): Homolog of NCBI NO: 37536508 NR Description: putative ring finger protein [Oryza sativa
  misc_feature (1)..(129): Homolog of NCBI NO: 15239062 NR Description: RING zinc finger protein-related [Arabidopsis
MVVILSALLCALICVAGLAAVVRCAWLRRFTAGGDSPSPNKGLKKKALQSLPRSTFTAAESTSGAAAEEGDSTECAICLTDFADGEEIRVLPLCGHSFHVECIDKWLVSRSSCPSCRRILTPVRCDRCGHASTAEMKDQAHRHQHHQHSSTTIPTFLP

SEQ ID NO: 104752 - DNA, 1160 bp, Arabidopsis thaliana
  misc_feature (1)..(1160): Ceres Seq. ID no. 13615682
  misc_feature: MA Experiment ID: 108434 Result: Up-regulated in Transcription
  misc_feature: MA Experiment 108434 PARAMETER Experiment Name: At_Root_Tips_cDNA_P Parameter: Tissue Value: Root Tips
  misc_feature: MA Experiment ID: 20000264 Result: Up-regulated in Transcription
  misc_feature: MA Experiment 20000264 PARAMETER Experiment Name: At_Open_Flower_P Parameter: Age (day) Value: 21
  misc_feature: MA Experiment 20000264 PARAMETER Experiment Name: At_Open_Flower_P Parameter: Plant Line Value: WS
  misc_feature: MA Experiment 20000264 PARAMETER Experiment Name: At_Open_Flower_P Parameter: Tissue Value: Open Flower vs. Whole Plant
gtagcgattctctctgcggcgcgtgtaaacggtgacggggctctaatggctaatcttcctcctccgctctccatgaaatctgtcgccctctcaggagcttcttctccttcttcttcctccaacaacgatcggaagctatcatcggcggagcagttaattctcgatctcagcaatcccgaactcagagaaaatgcacttcacgagttgtctaagaagagagagatctttcaagatttggctccgcttttatggcattctgttggtaccattcctgctcttctacaggagattatcgcagtttaccctgccctatctcctccaaccatgactcctgctcaatctaacagggtgtgcaatgcacttgctcttcttcagtgtgttgcttctcatactgatacgagaatgttgttcctaaaagcccatctgccattgtacctgtatgctttcttgaatacatcaagcaaatcaagaccgtttgagtacctgcggctgactagcttgggggttattggtgcacttgttaaggttgatgatactgaagtgatcagattccttcttcaaactgagattgtcccattgtgcctccggacaatggagaatggcagcgagttatcaaagactgttgctactttcattgttcagaaagttttgctggacgatgttgggcttgagtacatgtgcacgacagcggagagattctttgctctgggtcgggttttgggaaatatggttacttcacttgcagaaggaccgtccgctaggctactaaagcacatcatacgctgctatcttcgcttgacagataaccccagagcatgcgatgcacttggaagttgccttccagatcttctgagggatgctactttcagtggttgtctctatgatgacccacctgcaatgcaatggctgcagcaactgctccacaacgttaacgttggcgggagagcacctcaagggttggctcatatgtttgtgaattaaatcgaacccttatagtctgggcagaaactgttattcattggacaaaaaaagttagttggaaacagaattacagatgagaaacagaaacccaaccaaagattttgagtttgatggatatatgtatttggatttcttgaccgtcttatgatgttgcaatcaatataactaaaattccattg

SEQ ID NO: 104753 - protein, 326 aa, Arabidopsis thaliana; identical to SEQ ID NO: 41461
  peptide (1)..(326): Ceres Seq. ID no. 13615683
  misc_feature (51)..(313): Pfam Name: Cell differentiation family, Rcd1-like Pfam Description: Cell differentiation family, Rcd1-like
  misc_feature (16)..(326): Homolog of NCBI NO: 15239962 NR Description: expressed protein [Arabidopsis thaliana]
  misc_feature (16)..(323): Homolog of NCBI NO: 15232369 NR Description: cell differentiation protein -related thaliana] >gi|20258840|gb|AAM13902.1| putative cell protein [Arabidopsis thaliana] >gi|21689729|gb|AAM67486.1|
  misc_feature (16)..(323): Homolog of NCBI NO: 21537250 NR Description: putative cell differentiation protein
  misc_feature (31)..(323): Homolog of NCBI NO: 9294407 NR Description: RCD1 [Arabidopsis thaliana]
  misc_feature (104)..(326): Homolog of NCBI NO: 38564258 NR Description: At5g12980 [Arabidopsis thaliana]
  misc_feature (20)..(323): Homolog of NCBI NO: 34897134 NR Description: putative cell differentiation protein [Oryza >gi|14718319|gb|AAK72897.1| putative cell differentiation protein
  misc_feature (17)..(323): Homolog of NCBI NO: 34899762 NR Description: putative cell differentiation protein [Oryza
  misc_feature (25)..(320): Homolog of NCBI NO: 4885579 NR Description: RCD1 required for cell differentiation1 homolog; involved in sexual development; rcd1 (required for cell S.pombe) homolog 1 [Homo sapiens] >gi|1620898|dbj|BAA13508.1|
  misc_feature (25)..(320): Homolog of NCBI NO: 10946722 NR Description: rcd1 (required for cell differentiation) homolog FL10; rcd1 (required for cell differentiation) homolog 1 [Mus musculus] >gi|7385111|gb|AAF61701.1|AF221849_1 FL10 [Mus
  misc_feature (25)..(320): Homolog of NCBI NO: 38174128 NR Description: Unknown (protein for MGC:76003) [Silurana

SEQ ID NO: 104754 - protein, 311 aa, Arabidopsis thaliana; identical to SEQ ID NO: 41462
  peptide (1)..(311): Ceres Seq. ID no. 13615684
  misc_feature (36)..(298): Pfam Name: Cell differentiation family, Rcd1-like Pfam Description: Cell differentiation family, Rcd1-like
  misc_feature (1)..(311): Homolog of NCBI NO: 15239962 NR Description: expressed protein [Arabidopsis thaliana]
  misc_feature (1)..(308): Homolog of NCBI NO: 15232369 NR Description: cell differentiation protein -related thaliana] >gi|20258840|gb|AAM13902.1| putative cell protein [Arabidopsis thaliana] >gi|21689729|gb|AAM67486.1|
  misc_feature (1)..(308): Homolog of NCBI NO: 21537250 NR Description: putative cell differentiation protein
  misc_feature (16)..(308): Homolog of NCBI NO: 9294407 NR Description: RCD1 [Arabidopsis thaliana]
  misc_feature (89)..(311): Homolog of NCBI NO: 38564258 NR Description: At5g12980 [Arabidopsis thaliana]
  misc_feature (5)..(308): Homolog of NCBI NO: 34897134 NR Description: putative cell differentiation protein [Oryza >gi|14718319|gb|AAK72897.1| putative cell differentiation protein
  misc_feature (2)..(308): Homolog of NCBI NO: 34899762 NR Description: putative cell differentiation protein [Oryza
  misc_feature (10)..(305): Homolog of NCBI NO: 4885579 NR Description: RCD1 required for cell differentiation1 homolog; involved in sexual development; rcd1 (required for cell S.pombe) homolog 1 [Homo sapiens] >gi|1620898|dbj|BAA13508.1|
  misc_feature (10)..(305): Homolog of NCBI NO: 10946722 NR Description: rcd1 (required for cell differentiation) homolog FL10; rcd1 (required for cell differentiation) homolog 1 [Mus musculus] >gi|7385111|gb|AAF61701.1|AF221849_1 FL10 [Mus
  misc_feature (10)..(305): Homolog of NCBI NO: 38174128 NR Description: Unknown (protein for MGC:76003) [Silurana

SEQ ID NO: 104755 - protein, 302 aa, Arabidopsis thaliana; identical to SEQ ID NO: 41463
  peptide (1)..(302): Ceres Seq. ID no. 13615685
  misc_feature (27)..(289): Pfam Name: Cell differentiation family, Rcd1-like Pfam Description: Cell differentiation family, Rcd1-like
  misc_feature (1)..(302): Homolog of NCBI NO: 15239962 NR Description: expressed protein [Arabidopsis thaliana]
  misc_feature (1)..(299): Homolog of NCBI NO: 15232369 NR Description: cell differentiation protein -related thaliana] >gi|20258840|gb|AAM13902.1| putative cell protein [Arabidopsis thaliana] >gi|21689729|gb|AAM67486.1|
  misc_feature (1)..(299): Homolog of NCBI NO: 21537250 NR Description: putative cell differentiation protein
  misc_feature (7)..(299): Homolog of NCBI NO: 9294407 NR Description: RCD1 [Arabidopsis thaliana]
  misc_feature (80)..(302): Homolog of NCBI NO: 38564258 NR Description: At5g12980 [Arabidopsis thaliana]
  misc_feature (1)..(299): Homolog of NCBI NO: 34897134 NR Description: putative cell differentiation protein [Oryza >gi|14718319|gb|AAK72897.1| putative cell differentiation protein
  misc_feature (1)..(299): Homolog of NCBI NO: 34899762 NR Description: putative cell differentiation protein [Oryza
  misc_feature (1)..(296): Homolog of NCBI NO: 4885579 NR Description: RCD1 required for cell differentiation1 homolog; involved in sexual development; rcd1 (required for cell S.pombe) homolog 1 [Homo sapiens] >gi|1620898|dbj|BAA13508.1|
  misc_feature (1)..(296): Homolog of NCBI NO: 10946722 NR Description: rcd1 (required for cell differentiation) homolog FL10; rcd1 (required for cell differentiation) homolog 1 [Mus musculus] >gi|7385111|gb|AAF61701.1|AF221849_1 FL10 [Mus
  misc_feature (1)..(296): Homolog of NCBI NO: 38174128 NR Description: Unknown (protein for MGC:76003) [Silurana

SEQ ID NO: 104756 - DNA, 992 bp, Arabidopsis thaliana
  misc_feature (1)..(992): Ceres Seq. ID no. 13615686
  misc_feature: MA Experiment ID: 108434 Result: Up-regulated in Transcription
  misc_feature: MA Experiment 108434 PARAMETER Experiment Name: At_Root_Tips_cDNA_P Parameter: Tissue Value: Root Tips
  misc_feature: MA Experiment ID: 108461 Result: Up-regulated in Transcription
  misc_feature: MA Experiment 108461 PARAMETER Experiment Name: At_Germinating_Seeds_cDNA_P Parameter: Age (day) Value: 1 vs. 0
  misc_feature: MA Experiment 108461 PARAMETER Experiment Name: At_Germinating_Seeds_cDNA_P Parameter: Tissue Value: Germinating Seeds
  misc_feature: MA Experiment ID: 108595 Result: Down-regulated in Transcription
  misc_feature: MA Experiment 108595 PARAMETER Experiment Name: At_Ler-pi_Ovule_cDNA_P Parameter: Plant Line Value: null
  misc_feature: MA Experiment ID: 20000069 Result: Down-regulated in Transcription
  misc_feature: MA Experiment 20000069 PARAMETER Experiment Name: At_100uM_ABA_Mutants_cDNA_P Parameter: Plant Line Value: CS23
  misc_feature: MA Experiment 20000069 PARAMETER Experiment Name: At_100uM_ABA_Mutants_cDNA_P Parameter: Timepoint (hr) Value: 6
  misc_feature: MA Experiment 20000069 PARAMETER Experiment Name: At_100uM_ABA_Mutants_cDNA_P Parameter: Tissue Value: Aerial
  misc_feature: MA Experiment 20000069 PARAMETER Experiment Name: At_100uM_ABA_Mutants_cDNA_P Parameter: Treatment Value: 100uM ABA vs. No Treatment
  misc_feature: MA Experiment ID: 20000071 Result: Down-regulated in Transcription
  misc_feature: MA Experiment 20000071 PARAMETER Experiment Name: At_100uM_ABA_Mutants_cDNA_P Parameter: Plant Line Value: CS8104
  misc_feature: MA Experiment 20000071 PARAMETER Experiment Name: At_100uM_ABA_Mutants_cDNA_P Parameter: Timepoint (hr) Value: 6
  misc_feature: MA Experiment 20000071 PARAMETER Experiment Name: At_100uM_ABA_Mutants_cDNA_P Parameter: Tissue Value: Aerial
  misc_feature: MA Experiment 20000071 PARAMETER Experiment Name: At_100uM_ABA_Mutants_cDNA_P Parameter: Treatment Value: 100uM ABA vs. No Treatment
  misc_feature: MA Experiment ID: 20000072 Result: Down-regulated in Transcription
  misc_feature: MA Experiment 20000072 PARAMETER Experiment Name: At_100uM_ABA_Mutants_cDNA_P Parameter: Plant Line Value: CS8105
  misc_feature: MA Experiment 20000072 PARAMETER Experiment Name: At_100uM_ABA_Mutants_cDNA_P Parameter: Timepoint (hr) Value: 6
  misc_feature: MA Experiment 20000072 PARAMETER Experiment Name: At_100uM_ABA_Mutants_cDNA_P Parameter: Tissue Value: Aerial
  misc_feature: MA Experiment 20000072 PARAMETER Experiment Name: At_100uM_ABA_Mutants_cDNA_P Parameter: Treatment Value: 100uM ABA vs. No Treatment
  misc_feature: MA Experiment ID: 20000087 Result: Down-regulated in Transcription
  misc_feature: MA Experiment 20000087 PARAMETER Experiment Name: At_100uM_ABA_Mutants_cDNA_P Parameter: Plant Line Value: WS
  misc_feature: MA Experiment 20000087 PARAMETER Experiment Name: At_100uM_ABA_Mutants_cDNA_P Parameter: Timepoint (hr) Value: 6
  misc_feature: MA Experiment 20000087 PARAMETER Experiment Name: At_100uM_ABA_Mutants_cDNA_P Parameter: Tissue Value: Aerial
  misc_feature: MA Experiment 20000087 PARAMETER Experiment Name: At_100uM_ABA_Mutants_cDNA_P Parameter: Treatment Value: 100uM ABA vs. No Treatment
  misc_feature: MA Experiment ID: 20000117 Result: Down-regulated in Transcription
  misc_feature: MA Experiment 20000117 PARAMETER Experiment Name: At_100uM_ABA_Mutants_cDNA_P Parameter: Plant Line Value: Columbia
  misc_feature: MA Experiment 20000117 PARAMETER Experiment Name: At_100uM_ABA_Mutants_cDNA_P Parameter: Timepoint (hr) Value: 6
  misc_feature: MA Experiment 20000117 PARAMETER Experiment Name: At_100uM_ABA_Mutants_cDNA_P Parameter: Tissue Value: Aerial
  misc_feature: MA Experiment 20000117 PARAMETER Experiment Name: At_100uM_ABA_Mutants_cDNA_P Parameter: Treatment Value: 100uM ABA vs. No Treatment
  misc_feature: MA Experiment ID: 20000179 Result: Up-regulated in Transcription
  misc_feature: MA Experiment 20000179 PARAMETER Experiment Name: At_Germinating_Seeds_P Parameter: Age (hr) Value: 6 vs. 0
  misc_feature: MA Experiment 20000179 PARAMETER Experiment Name: At_Germinating_Seeds_P Parameter: Tissue Value: Germinating Seeds
  misc_feature: MA Experiment ID: 20000180 Result: Up-regulated in Transcription
  misc_feature: MA Experiment 20000180 PARAMETER Experiment Name: At_Germinating_Seeds_P Parameter: Age (hr) Value: 24 vs. 0
  misc_feature: MA Experiment 20000180 PARAMETER Experiment Name: At_Germinating_Seeds_P Parameter: Tissue Value: Germinating Seeds
  misc_feature: MA Experiment ID: 20000184 Result: Up-regulated in Transcription
  misc_feature: MA Experiment 20000184 PARAMETER Experiment Name: At_Shoots__P Parameter: Age (day) Value: 7
  misc_feature: MA Experiment 20000184 PARAMETER Experiment Name: At_Shoots__P Parameter: Tissue Value: Shoots vs. Whole Plant
  misc_feature: MA Experiment ID: 20000437 Result: Down-regulated in Transcription
  misc_feature: MA Experiment 20000437 PARAMETER Experiment Name: At_Drought_P Parameter: Age (day) Value: 8
  misc_feature: MA Experiment 20000437 PARAMETER Experiment Name: At_Drought_P Parameter: Organism Value: A. thaliana
  misc_feature: MA Experiment 20000437 PARAMETER Experiment Name: At_Drought_P Parameter: Plant Line Value: WS
  misc_feature: MA Experiment 20000437 PARAMETER Experiment Name: At_Drought_P Parameter: Timepoint (hr) Value: 24
  misc_feature: MA Experiment 20000437 PARAMETER Experiment Name: At_Drought_P Parameter: Tissue Value: Whole Plant
  misc_feature: MA Experiment 20000437 PARAMETER Experiment Name: At_Drought_P Parameter: Treatment Value: Drought vs. No Drought
  misc_feature: MA Experiment ID: 20000438 Result: Up-regulated in Transcription
  misc_feature: MA Experiment 20000438 PARAMETER Experiment Name: At_Shoots__P Parameter: Age (day) Value: 14
  misc_feature: MA Experiment 20000438 PARAMETER Experiment Name: At_Shoots__P Parameter: Tissue Value: Shoots vs. Whole Plant
atcgtcaccttcaccttcacctaccatttttgccaacaaacgcgagcaagagttttgagctccaatggcgaccttgtcgatgactctgtcaaatccgaagtcgctctcagctcctccacgaagactttctccgatcaatacctccgctttcacatctacctctttccgattgcgcaccaaatcttccttcgattcaatctcgttctcgtcttcaactcccttctccgcctcatcgctcctccttcacacgtcttataccaaaagaaaccaccgctgtttctctgttcaatccaatgctgaggtggttactgaaccgcaatcgaaaataacacacaaggtgtatttcgatataagtgttggcaatccagtggggaagttagctgggaggattgttattggattgtatggtgatgatgttccccaaactgtggagaactttcgtgctctatgcacaggtgaaaagggatttggctacaagggttctacattccatcgtgtcatcagagatttcatgattcagggaggagactttgagaagggcaatggaactggaggtaaaagtgtatatggccgtacattcaaggatgagaatttcaagttatcccatgtcggaccaggagttctaagtatggcaaatgctggccctaatacaaatggaagtcagttctttatctgcactattaagacgtcatggttggacggaagacatgtggtgttcgggcaagtaatagaaggaatggaagtggtgaagctgatagaggaacaagagacagacagaggagaccgtcccagaaagaaagtggtgatagcagactgtggtcaacttccaatgtctgaagcttaaaagtaagatcatttaaccaaaatcttgtagacatgagatggagcttgtttttgcattttacaaccctttcttttgtgtaatggatttgtatccccttcttccaaaaatttaagaaagaaatagtattccgctgccgggtgttgaactc

SEQ ID NO: 104757 - protein, 259 aa, Arabidopsis thaliana; identical to SEQ ID NO: 25778
  peptide (1)..(259): Ceres Seq. ID no. 13615687
  misc_feature (1)..(259): Homolog of NCBI NO: 15240008 NR Description: peptidyl-prolyl isomerase protein [Arabidopsis >gi|13605817|gb|AAK32894.1|AF367307_1 AT5g13120/T19L5_80 thaliana] >gi|16323328|gb|AAL15377.1| AT5g13120/T19L5_80
  misc_feature (1)..(259): Homolog of NCBI NO: 21593963 NR Description: peptidylprolyl isomerase-like protein
  misc_feature (1)..(259): Homolog of NCBI NO: 9955556 NR Description: peptidylprolyl isomerase-like protein
  misc_feature (63)..(256): Homolog of NCBI NO: 37788308 NR Description: cyclophilin-like protein [Triticum aestivum]
  misc_feature (63)..(256): Homolog of NCBI NO: 37788312 NR Description: cyclophilin-like protein [Triticum aestivum]
  misc_feature (85)..(229): Homolog of NCBI NO: 9945069 NR Description: similar to Arabidopsis thaliana Peptidyl-prolyl
  misc_feature (31)..(256): Homolog of NCBI NO: 21555831 NR Description: peptidylprolyl isomerase ROC4 [Arabidopsis
  misc_feature (31)..(256): Homolog of NCBI NO: 15228674 NR Description: peptidylprolyl isomerase ROC4 [Arabidopsis
  misc_feature (31)..(256): Homolog of NCBI NO: 11762200 NR Description: AT3g62030 [Arabidopsis thaliana]
  misc_feature (83)..(256): Homolog of NCBI NO: 34902534 NR Description: putative peptidyl-prolyl cis-trans isomerase,

SEQ ID NO: 104758 - protein, 254 aa, Arabidopsis thaliana; identical to SEQ ID NO: 25779
  peptide (1)..(254): Ceres Seq. ID no. 13615688
  misc_feature (1)..(254): Homolog of NCBI NO: 15240008 NR Description: peptidyl-prolyl isomerase protein [Arabidopsis >gi|13605817|gb|AAK32894.1|AF367307_1 AT5g13120/T19L5_80 thaliana] >gi|16323328|gb|AAL15377.1| AT5g13120/T19L5_80
  misc_feature (1)..(254): Homolog of NCBI NO: 21593963 NR Description: peptidylprolyl isomerase-like protein
  misc_feature (1)..(254): Homolog of NCBI NO: 9955556 NR Description: peptidylprolyl isomerase-like protein
  misc_feature (58)..(251): Homolog of NCBI NO: 37788308 NR Description: cyclophilin-like protein [Triticum aestivum]
  misc_feature (58)..(251): Homolog of NCBI NO: 37788312 NR Description: cyclophilin-like protein [Triticum aestivum]
  misc_feature (80)..(224): Homolog of NCBI NO: 9945069 NR Description: similar to Arabidopsis thaliana Peptidyl-prolyl
  misc_feature (26)..(251): Homolog of NCBI NO: 21555831 NR Description: peptidylprolyl isomerase ROC4 [Arabidopsis
  misc_feature (26)..(251): Homolog of NCBI NO: 15228674 NR Description: peptidylprolyl isomerase ROC4 [Arabidopsis
  misc_feature (26)..(251): Homolog of NCBI NO: 11762200 NR Description: AT3g62030 [Arabidopsis thaliana]
  misc_feature (78)..(251): Homolog of NCBI NO: 34902534 NR Description: putative peptidyl-prolyl cis-trans isomerase,

SEQ ID NO: 104759 - DNA, 1162 bp, Arabidopsis thaliana
  misc_feature (1)..(1162): Ceres Seq. ID no. 13615699
  misc_feature: MA Experiment ID: 20000184 Result: Down-regulated in Transcription
  misc_feature: MA Experiment 20000184 PARAMETER Experiment Name: At_Shoots__P Parameter: Age (day) Value: 7
  misc_feature: MA Experiment 20000184 PARAMETER Experiment Name: At_Shoots__P Parameter: Tissue Value: Shoots vs. Whole Plant
  misc_feature: MA Experiment ID: 20000438 Result: Down-regulated in Transcription
  misc_feature: MA Experiment 20000438 PARAMETER Experiment Name: At_Shoots__P Parameter: Age (day) Value: 14
  misc_feature: MA Experiment 20000438 PARAMETER Experiment Name: At_Shoots__P Parameter: Tissue Value: Shoots vs. Whole Plant
ccgaaagagagaaatcaatttgaccaatcaaataattgcggtggtgaaaatggctcgaaacgactcgcgatctaggtcgccgtctcaccgccgacggtactctcgctcgcctgtgactcatcgtagcagccgtcgtaccaggcgcgaccgcagccgctcaccctacacatcaaggcataagaagagcagatctcctgcaccaaggcaacaccaaagggatagaagtagttcattgtctccttccgagcatagaattgcgattgaagtgaagaaagaacaggaagacaaggcaagattgcagcatgaggcggagctcaagcgactagaagaagagactgcacagcggattgaggaagcagtaaggaaaaatgtagaggaaaggatgaaaaccgaagaagttaaagaagaaattgaaagacggacaaaggaagcttatgagaagatgtttcttgacgtggaaatacagctgaagaaagaaaaagaagctgctctaaacgaggcaagaagaaaagaagaacaagctaggagagaaagagaagagctggataagatgttagaagaaaatagtaggagggttgaagaatctcaaaggcgagaagcaatggaacttcaacgtaaagaagaggaaaggtatcgagaattggagctcctgcagagacagaaggaggaggctgcaaggagaaagaagctggaagaagaagaagagattagaaactccagcaagctatcaaatggaaacagatcacgatccaagctgcatttcggcatgggtttataattaaagaaacattgatgaaggcaaagtctgaagaaacttttgacttcttgtatcagagaataggaagatacagttgaggagttgactcatccaagtaagcacagacaacattctctagctgacccttcatagagcttgttgcttcactatgttagttaatctttggaaagaagcatctatcagtttggtaaagtttgataatagctctggcgggctttgggctggcgggttgggccggacctgatcaaaagcctgttttaacatgtgaggaataattgtaatttcttttttttgttagtttacttagaaaaagttgcatgttgttaaaaatctgataatatgatttgttttatcgatttttttgttttataataccagaagttt

SEQ ID NO: 104760 - protein, 258 aa, Arabidopsis thaliana; identical to SEQ ID NO: 35738
  peptide (1)..(258): Ceres Seq. ID no. 13615700
  misc_feature (57)..(245): Pfam Name: Caldesmon Pfam Description: Caldesmon
  misc_feature (17)..(258): Homolog of NCBI NO: 15240607 NR Description: hypothetical protein [Arabidopsis thaliana]
  misc_feature (31)..(256): Homolog of NCBI NO: 15220234 NR Description: F-box protein family [Arabidopsis thaliana]
  misc_feature (98)..(246): Homolog of NCBI NO: 37532486 NR Description: hypothetical protein [Oryza sativa (japonica group)] >gi|20043072|gb|AAM08880.1| Hypothetical protein [Oryza >gi|31430987|gb|AAP52832.1| hypothetical protein [Oryza sativa
  misc_feature (11)..(256): Homolog of NCBI NO: 31234644 NR Description: ENSANGP00000022336 [Anopheles gambiae]
  misc_feature (16)..(256): Homolog of NCBI NO: 39795605 NR Description: Unknown (protein for MGC:76303) [Silurana
  misc_feature (16)..(256): Homolog of NCBI NO: 8922259 NR Description: hypothetical protein FLJ10154 [Homo sapiens] unnamed protein product [Homo sapiens]
  misc_feature (16)..(256): Homolog of NCBI NO: 34879649 NR Description: similar to hypothetical protein FLJ10154 [Rattus
  misc_feature (19)..(256): Homolog of NCBI NO: 17862050 NR Description: LD06138p [Drosophila melanogaster]
  misc_feature (16)..(256): Homolog of NCBI NO: 28278343 NR Description: Unknown (protein for MGC:55548) [Danio rerio]
  misc_feature (16)..(256): Homolog of NCBI NO: 38541231 NR Description: Unknown (protein for MGC:77695) [Danio rerio]

SEQ ID NO: 104761 - protein, 242 aa, Arabidopsis thaliana; identical to SEQ ID NO: 35739
  peptide (1)..(242): Ceres Seq. ID no. 13615701
  misc_feature (41)..(229): Pfam Name: Caldesmon Pfam Description: Caldesmon
  misc_feature (1)..(242): Homolog of NCBI NO: 15240607 NR Description: hypothetical protein [Arabidopsis thaliana]
  misc_feature (15)..(240): Homolog of NCBI NO: 15220234 NR Description: F-box protein family [Arabidopsis thaliana]
  misc_feature (82)..(230): Homolog of NCBI NO: 37532486 NR Description: hypothetical protein [Oryza sativa (japonica group)] >gi|20043072|gb|AAM08880.1| Hypothetical protein [Oryza >gi|31430987|gb|AAP52832.1| hypothetical protein [Oryza sativa
  misc_feature (1)..(240): Homolog of NCBI NO: 31234644 NR Description: ENSANGP00000022336 [Anopheles gambiae]
  misc_feature (1)..(240): Homolog of NCBI NO: 39795605 NR Description: Unknown (protein for MGC:76303) [Silurana
  misc_feature (1)..(240): Homolog of NCBI NO: 8922259 NR Description: hypothetical protein FLJ10154 [Homo sapiens] unnamed protein product [Homo sapiens]
  misc_feature (1)..(240): Homolog of NCBI NO: 34879649 NR Description: similar to hypothetical protein FLJ10154 [Rattus
  misc_feature (3)..(240): Homolog of NCBI NO: 17862050 NR Description: LD06138p [Drosophila melanogaster]
  misc_feature (1)..(240): Homolog of NCBI NO: 28278343 NR Description: Unknown (protein for MGC:55548) [Danio rerio]
  misc_feature (1)..(240): Homolog of NCBI NO: 38541231 NR Description: Unknown (protein for MGC:77695) [Danio rerio]

SEQ ID NO: 104762 - protein, 131 aa, Arabidopsis thaliana; identical to SEQ ID NO: 35740
  peptide (1)..(131): Ceres Seq. ID no. 13615702
  misc_feature (1)..(118): Pfam Name: Caldesmon Pfam Description: Caldesmon
  misc_feature (1)..(131): Homolog of NCBI NO: 15240607 NR Description: hypothetical protein [Arabidopsis thaliana]
  misc_feature (1)..(129): Homolog of NCBI NO: 15220234 NR Description: F-box protein family [Arabidopsis thaliana]
  misc_feature (1)..(119): Homolog of NCBI NO: 37532486 NR Description: hypothetical protein [Oryza sativa (japonica group)] >gi|20043072|gb|AAM08880.1| Hypothetical protein [Oryza >gi|31430987|gb|AAP52832.1| hypothetical protein [Oryza sativa
  misc_feature (1)..(129): Homolog of NCBI NO: 31234644 NR Description: ENSANGP00000022336 [Anopheles gambiae]
  misc_feature (1)..(129): Homolog of NCBI NO: 39795605 NR Description: Unknown (protein for MGC:76303) [Silurana
  misc_feature (1)..(129): Homolog of NCBI NO: 8922259 NR Description: hypothetical protein FLJ10154 [Homo sapiens] unnamed protein product [Homo sapiens]
  misc_feature (1)..(129): Homolog of NCBI NO: 34879649 NR Description: similar to hypothetical protein FLJ10154 [Rattus
  misc_feature (1)..(129): Homolog of NCBI NO: 17862050 NR Description: LD06138p [Drosophila melanogaster]
  misc_feature (1)..(129): Homolog of NCBI NO: 28278343 NR Description: Unknown (protein for MGC:55548) [Danio rerio]
  misc_feature (1)..(129): Homolog of NCBI NO: 38541231 NR Description: Unknown (protein for MGC:77695) [Danio rerio]

SEQ ID NO: 104763 - DNA, 2060 bp, Arabidopsis thaliana
  misc_feature (1)..(2060): Ceres Seq. ID no. 13615703
  misc_feature: MA Experiment ID: 20000347 Result: Up-regulated in Transcription
  misc_feature: MA Experiment 20000347 PARAMETER Experiment Name: At_2mM_SA_Sub_P Parameter: Age (day) Value: 14
  misc_feature: MA Experiment 20000347 PARAMETER Experiment Name: At_2mM_SA_Sub_P Parameter: Organism Value: A. thaliana
  misc_feature: MA Experiment 20000347 PARAMETER Experiment Name: At_2mM_SA_Sub_P Parameter: Plant Line Value: WS
  misc_feature: MA Experiment 20000347 PARAMETER Experiment Name: At_2mM_SA_Sub_P Parameter: Timepoint (hr) Value: 6
  misc_feature: MA Experiment 20000347 PARAMETER Experiment Name: At_2mM_SA_Sub_P Parameter: Tissue Value: Aerial
  misc_feature: MA Experiment 20000347 PARAMETER Experiment Name: At_2mM_SA_Sub_P Parameter: Treatment Value: 2mM SA vs. No Treatment
  misc_feature: MA Experiment ID: 20000355 Result: Down-regulated in Transcription
  misc_feature: MA Experiment 20000355 PARAMETER Experiment Name: At_Siliques_Sub_P Parameter: Age (day) Value: 21
  misc_feature: MA Experiment 20000355 PARAMETER Experiment Name: At_Siliques_Sub_P Parameter: Organism Value: A. thaliana
  misc_feature: MA Experiment 20000355 PARAMETER Experiment Name: At_Siliques_Sub_P Parameter: Plant Line Value: WS
  misc_feature: MA Experiment 20000355 PARAMETER Experiment Name: At_Siliques_Sub_P Parameter: Tissue Value: Less Than 5mm Siliques vs. Whole Plant
aaaagaacaaaatcaactcatacatacacaattgccggtaccctaacatttcgccacaccacaccttttgtctcctttatccaatctctcctccatagttctgaagcttcgagagagaggggccagaaggtcacccagaacagaggttttgcagacaatagaaagcagtaagcaagcatgttaccaaagttcgatccaacaaaccaaaaagcttgtctgtctcttcttgaggatttgaccaccaacgtaaagcagattcaagattccgtattggaagcaatactttcacgtaatgctcaaactgagtatcttagaggtttcctcaacggtcaagtcgataagcagaacttcaagaaaaacgtacccgttgtgacctacgaagatattaggtcttatatcgaccgtatcgctaatggagagccgtctgatctcatctgtgatcgacccatcagtgtactcttgaccagctcgggtacttcaggaggagttccaaagttgattcctttgacaacagaggatttggaacagaggatttcgttttcttctctctatgcacctctactctacaagcacatcgatgggcttagcgaaggaaaatctctcatattttattttgtgacccgagagagcaagactgccaatgggttgatggtcaggactatggttactagttttttgaaaagcattaaacagaccaactcatttctttgggatagcttacaggtaagcccgcatgcgattactacttgtgcagacactactcagagcatgtactgccaattgctttgtgggcttcttgaaagagataatgttgctcgcctcggtgcaccctttgcttcatcattcctcaaagtaatcaagttcttggaagatcattggcctgagttatgctcaaacataaggactggccgtctcagcgactggatcacagacgcgacctgtacttcagggatcggtaagttcctcactgctccaaatccggaactagcaagcctgatcgagcaagaatgcagtaaaacatcatgggaggcaatattgaagagactttggccaaaagcaaaatgcatcgaatccatcattacaggcaccatggcacagtacattccattgctggaattctatagtggtggtcttcctttgacttcatcgttttacggcagctctgaatgtttcatgggtgtcaactttaatcctctgtgtaagcctagtgatgtgtcgtacaccatcattccatgtatggggtacttcgagttcttagaggtcgagaaagaccatcaagaagctggtcatgatcccacagagaaacctgtggttgtcgatcttgtcgatgttaaaatcggccatgattatgaacctgttgtcacaacgttttcaggtctatataggtaccgtgtgggggacgttttaagagcgactggtttctacaacaatgcgccacatttttgtttcgtgggaagacagaaagttgttctgagcatcgacatggacaagacctacgaagacgacctcctcaaggcagtgacaaacgcaaagctcctgcttgagccacatgacctgatgctcatggatttcactagccgtgtagattcgtcctcgtttccaggacactatgtaatctattgggaactcgggagcaaagtcaaggacgccaagtttgaacctaaccgcgatgttatggaagaatgctgcttcactgttgaggagtctctcgatgctgtatacagaaaaggacgaaagaatgataagaacattggaccacttgagattaaggttgttaagcctggcgcttttgacgagctcatgaacttctttctgtctagaggctcttctgtgagtcagtacaagacaccgaggtcggtgacgaatgaagaagccttgaagatattggaggccaacgttatttccgagtttcttagccggaaaattccatcgtgggagttacatgagttacactccggcagataaacccgcagtcataatatctgtgagatttgagggcaggggaggagaacaatgtttacgacttttcttaatttaaacctctctgtttttttccagcc

SEQ ID NO: 104764 - protein, 595 aa, Arabidopsis thaliana
  peptide (1)..(595): Ceres Seq. ID no. 13615704
  misc_feature (12)..(156): Pfam Name: GH3 auxin-responsive promoter Pfam Description: GH3 auxin-responsive promoter
  misc_feature (179)..(595): Homolog of NCBI NO: 11281348 NR Description: auxin-regulated protein GH3 homolog T22N19.20 -
  misc_feature (1)..(156): Homolog of NCBI NO: 11281348 NR Description: auxin-regulated protein GH3 homolog T22N19.20 -
  misc_feature (1)..(595): Homolog of NCBI NO: 15240613 NR Description: auxin reponsive - like protein [Arabidopsis
  misc_feature (1)..(586): Homolog of NCBI NO: 15240608 NR Description: auxin-responsive - like protein [Arabidopsis
  misc_feature (144)..(595): Homolog of NCBI NO: 15240617 NR Description: auxin reponsive - like protein [Arabidopsis
  misc_feature (1)..(163): Homolog of NCBI NO: 15240617 NR Description: auxin reponsive - like protein [Arabidopsis
  misc_feature (1)..(587): Homolog of NCBI NO: 15217844 NR Description: auxin-regulated GH3 protein -related [Arabidopsis
  misc_feature (16)..(582): Homolog of NCBI NO: 15242095 NR Description: auxin-responsive GH3-related protein [Arabidopsis
  misc_feature (14)..(580): Homolog of NCBI NO: 15220661 NR Description: GH3-related auxin-regulated protein [Arabidopsis
  misc_feature (14)..(586): Homolog of NCBI NO: 15239653 NR Description: auxin-responsive-related protein [Arabidopsis
MLPKFDPTNQKACLSLLEDLTTNVKQIQDSVLEAILSRNAQTEYLRGFLNGQVDKQNFKKNVPVVTYEDIRSYIDRIANGEPSDLICDRPISVLLTSSGTSGGVPKLIPLTTEDLEQRISFSSLYAPLLYKHIDGLSEGKSLIFYFVTRESKTANGLMVRTMVTSFLKSIKQTNSFLWDSLQVSPHAITTCADTTQSMYCQLLCGLLERDNVARLGAPFASSFLKVIKFLEDHWPELCSNIRTGRLSDWITDATCTSGIGKFLTAPNPELASLIEQECSKTSWEAILKRLWPKAKCIESIITGTMAQYIPLLEFYSGGLPLTSSFYGSSECFMGVNFNPLCKPSDVSYTIIPCMGYFEFLEVEKDHQEAGHDPTEKPVVVDLVDVKIGHDYEPVVTTFSGLYRYRVGDVLRATGFYNNAPHFCFVGRQKVVLSIDMDKTYEDDLLKAVTNAKLLLEPHDLMLMDFTSRVDSSSFPGHYVIYWELGSKVKDAKFEPNRDVMEECCFTVEESLDAVYRKGRKNDKNIGPLEIKVVKPGAFDELMNFFLSRGSSVSQYKTPRSVTNEEALKILEANVISEFLSRKIPSWELHELHSGR

SEQ ID NO: 104765 - protein, 438 aa, Arabidopsis thaliana
  peptide (1)..(438): Ceres Seq. ID no. 13615705
  misc_feature (22)..(412): Pfam Name: GH3 auxin-responsive promoter Pfam Description: GH3 auxin-responsive promoter
  misc_feature (22)..(438): Homolog of NCBI NO: 11281348 NR Description: auxin-regulated protein GH3 homolog T22N19.20 -
  misc_feature (1)..(438): Homolog of NCBI NO: 15240613 NR Description: auxin reponsive - like protein [Arabidopsis
  misc_feature (1)..(429): Homolog of NCBI NO: 15240608 NR Description: auxin-responsive - like protein [Arabidopsis
  misc_feature (1)..(438): Homolog of NCBI NO: 15240617 NR Description: auxin reponsive - like protein [Arabidopsis
  misc_feature (1)..(430): Homolog of NCBI NO: 15217844 NR Description: auxin-regulated GH3 protein -related [Arabidopsis
  misc_feature (1)..(425): Homolog of NCBI NO: 15242095 NR Description: auxin-responsive GH3-related protein [Arabidopsis
  misc_feature (1)..(423): Homolog of NCBI NO: 15220661 NR Description: GH3-related auxin-regulated protein [Arabidopsis
  misc_feature (1)..(429): Homolog of NCBI NO: 15239653 NR Description: auxin-responsive-related protein [Arabidopsis
  misc_feature (1)..(429): Homolog of NCBI NO: 17978966 NR Description: AT5g54510/F24B18_13 [Arabidopsis thaliana]
  misc_feature (1)..(429): Homolog of NCBI NO: 34910142 NR Description: putative auxin-responsive GH3 [Oryza sativa
MVRTMVTSFLKSIKQTNSFLWDSLQVSPHAITTCADTTQSMYCQLLCGLLERDNVARLGAPFASSFLKVIKFLEDHWPELCSNIRTGRLSDWITDATCTSGIGKFLTAPNPELASLIEQECSKTSWEAILKRLWPKAKCIESIITGTMAQYIPLLEFYSGGLPLTSSFYGSSECFMGVNFNPLCKPSDVSYTIIPCMGYFEFLEVEKDHQEAGHDPTEKPVVVDLVDVKIGHDYEPVVTTFSGLYRYRVGDVLRATGFYNNAPHFCFVGRQKVVLSIDMDKTYEDDLLKAVTNAKLLLEPHDLMLMDFTSRVDSSSFPGHYVIYWELGSKVKDAKFEPNRDVMEECCFTVEESLDAVYRKGRKNDKNIGPLEIKVVKPGAFDELMNFFLSRGSSVSQYKTPRSVTNEEALKILEANVISEFLSRKIPSWELHELHSGR

SEQ ID NO: 104766 - protein, 434 aa, Arabidopsis thaliana
  peptide (1)..(434): Ceres Seq. ID no. 13615706
  misc_feature (18)..(408): Pfam Name: GH3 auxin-responsive promoter Pfam Description: GH3 auxin-responsive promoter
  misc_feature (18)..(434): Homolog of NCBI NO: 11281348 NR Description: auxin-regulated protein GH3 homolog T22N19.20 -
  misc_feature (1)..(434): Homolog of NCBI NO: 15240613 NR Description: auxin reponsive - like protein [Arabidopsis
  misc_feature (1)..(425): Homolog of NCBI NO: 15240608 NR Description: auxin-responsive - like protein [Arabidopsis
  misc_feature (1)..(434): Homolog of NCBI NO: 15240617 NR Description: auxin reponsive - like protein [Arabidopsis
  misc_feature (1)..(426): Homolog of NCBI NO: 15217844 NR Description: auxin-regulated GH3 protein -related [Arabidopsis
  misc_feature (1)..(421): Homolog of NCBI NO: 15242095 NR Description: auxin-responsive GH3-related protein [Arabidopsis
  misc_feature (1)..(419): Homolog of NCBI NO: 15220661 NR Description: GH3-related auxin-regulated protein [Arabidopsis
  misc_feature (1)..(425): Homolog of NCBI NO: 15239653 NR Description: auxin-responsive-related protein [Arabidopsis
  misc_feature (1)..(425): Homolog of NCBI NO: 17978966 NR Description: AT5g54510/F24B18_13 [Arabidopsis thaliana]
  misc_feature (1)..(425): Homolog of NCBI NO: 34910142 NR Description: putative auxin-responsive GH3 [Oryza sativa
MVTSFLKSIKQTNSFLWDSLQVSPHAITTCADTTQSMYCQLLCGLLERDNVARLGAPFASSFLKVIKFLEDHWPELCSNIRTGRLSDWITDATCTSGIGKFLTAPNPELASLIEQECSKTSWEAILKRLWPKAKCIESIITGTMAQYIPLLEFYSGGLPLTSSFYGSSECFMGVNFNPLCKPSDVSYTIIPCMGYFEFLEVEKDHQEAGHDPTEKPVVVDLVDVKIGHDYEPVVTTFSGLYRYRVGDVLRATGFYNNAPHFCFVGRQKVVLSIDMDKTYEDDLLKAVTNAKLLLEPHDLMLMDFTSRVDSSSFPGHYVIYWELGSKVKDAKFEPNRDVMEECCFTVEESLDAVYRKGRKNDKNIGPLEIKVVKPGAFDELMNFFLSRGSSVSQYKTPRSVTNEEALKILEANVISEFLSRKIPSWELHELHSGR

SEQ ID NO: 104767 - DNA, 1092 bp, Arabidopsis thaliana
  misc_feature (1)..(1092): Ceres Seq. ID no. 13615707
  misc_feature: MA Experiment ID: 108434 Result: Up-regulated in Transcription
  misc_feature: MA Experiment 108434 PARAMETER Experiment Name: At_Root_Tips_cDNA_P Parameter: Tissue Value: Root Tips
  misc_feature: MA Experiment ID: 108463 Result: Down-regulated in Transcription
  misc_feature: MA Experiment 108463 PARAMETER Experiment Name: At_Germinating_Seeds_cDNA_P Parameter: Age (day) Value: 3 vs. 0
  misc_feature: MA Experiment 108463 PARAMETER Experiment Name: At_Germinating_Seeds_cDNA_P Parameter: Tissue Value: Germinating Seeds
  misc_feature: MA Experiment ID: 108569 Result: Up-regulated in Transcription
  misc_feature: MA Experiment 108569 PARAMETER Experiment Name: At_0.001%_MeJA__cDNA_P Parameter: Timepoint (hr) Value: 6
  misc_feature: MA Experiment 108569 PARAMETER Experiment Name: At_0.001%_MeJA__cDNA_P Parameter: Tissue Value: Aerial
  misc_feature: MA Experiment 108569 PARAMETER Experiment Name: At_0.001%_MeJA__cDNA_P Parameter: Treatment Value: 0.001% MeJA vs. No Treatment
  misc_feature: MA Experiment ID: 108573 Result: Up-regulated in Transcription
  misc_feature: MA Experiment 108573 PARAMETER Experiment Name: At_Drought_cDNA_P Parameter: Timepoint (hr) Value: 6
  misc_feature: MA Experiment 108573 PARAMETER Experiment Name: At_Drought_cDNA_P Parameter: Tissue Value: Aerial
  misc_feature: MA Experiment 108573 PARAMETER Experiment Name: At_Drought_cDNA_P Parameter: Treatment Value: Drought vs. No Drought
  misc_feature: MA Experiment ID: 108585 Result: Up-regulated in Transcription
  misc_feature: MA Experiment 108585 PARAMETER Experiment Name: At_5mM_NaNP_cDNA_P Parameter: Timepoint (hr) Value: 6
  misc_feature: MA Experiment 108585 PARAMETER Experiment Name: At_5mM_NaNP_cDNA_P Parameter: Tissue Value: Aerial
  misc_feature: MA Experiment 108585 PARAMETER Experiment Name: At_5mM_NaNP_cDNA_P Parameter: Treatment Value: null
  misc_feature: MA Experiment ID: 108595 Result: Down-regulated in Transcription
  misc_feature: MA Experiment 108595 PARAMETER Experiment Name: At_Ler-pi_Ovule_cDNA_P Parameter: Plant Line Value: null
  misc_feature: MA Experiment ID: 20000314 Result: Up-regulated in Transcription
  misc_feature: MA Experiment 20000314 PARAMETER Experiment Name: At_14day_Shoots-Roots_Sub_P Parameter: Age (day) Value: 14
  misc_feature: MA Experiment 20000314 PARAMETER Experiment Name: At_14day_Shoots-Roots_Sub_P Parameter: Organism Value: A. thaliana
  misc_feature: MA Experiment 20000314 PARAMETER Experiment Name: At_14day_Shoots-Roots_Sub_P Parameter: Plant Line Value: WS
  misc_feature: MA Experiment 20000314 PARAMETER Experiment Name: At_14day_Shoots-Roots_Sub_P Parameter: Tissue Value: Roots vs. Whole Plant
  misc_feature: MA Experiment ID: 20000315 Result: Up-regulated in Transcription
  misc_feature: MA Experiment 20000315 PARAMETER Experiment Name: At_14day_Shoots-Roots_Sub_P Parameter: Age (day) Value: 14
  misc_feature: MA Experiment 20000315 PARAMETER Experiment Name: At_14day_Shoots-Roots_Sub_P Parameter: Organism Value: A. thaliana
  misc_feature: MA Experiment 20000315 PARAMETER Experiment Name: At_14day_Shoots-Roots_Sub_P Parameter: Plant Line Value: WS
  misc_feature: MA Experiment 20000315 PARAMETER Experiment Name: At_14day_Shoots-Roots_Sub_P Parameter: Tissue Value: Shoots vs. Whole Plant
  misc_feature: MA Experiment ID: 20000355 Result: Up-regulated in Transcription
  misc_feature: MA Experiment 20000355 PARAMETER Experiment Name: At_Siliques_Sub_P Parameter: Age (day) Value: 21
  misc_feature: MA Experiment 20000355 PARAMETER Experiment Name: At_Siliques_Sub_P Parameter: Organism Value: A. thaliana
  misc_feature: MA Experiment 20000355 PARAMETER Experiment Name: At_Siliques_Sub_P Parameter: Plant Line Value: WS
  misc_feature: MA Experiment 20000355 PARAMETER Experiment Name: At_Siliques_Sub_P Parameter: Tissue Value: Less Than 5mm Siliques vs. Whole Plant
actagtaagtagtctcttatgttttgttttgcatcggccgtcccaaacctgaggatttctctgttcagctagagcgaaaccctagattcacatttgagctgagagatgctgcgtgtagcagggaggaggcttttctctgtctcgcagagatcttcgactgcgacctccttcgtcgtctcccgtgaccataccctttccgatggtggcggcgactcctcttcagctcccagatccctcccctctgcagatctctcatcttaccaccgtagccttatcagaggcttctcttctcaagtccttgctcaaggaaatgagataggttttggttcagaagtcccagccacagtcgaagctgtcaaaacgcctaactcaaagattgtctatgatgaccataaccatgagcgttacccacctggtgaccctagcaagcgtgcattcgcctattttgtcttgtcgggtgggaggtttgtttatgcctctgtcctccgcctgcttgttttgaagcttattgtgagcatgtctgcaagtaaagatgtccttgcccttgcatcccttgaggttgacctagggagcatagaaccaggaactaccgtgacagtcaagtggcgtggaaagcccgtcttcatcaggcgaagaacagaagatgacatcaagctggccaatagtgtggatgttggatccctgagggacccacaagaagactcggttagggtcaagaatccagaatggttagtggttgttggagtgtgcactcatttggggtgcatccccttgcctaatgctggtgattatggtggttggttttgtccgtgtcacggatcacattacgatatatctggaagaattaggaaaggtcctgcaccatacaacctggaagtaccaacctacagcttcctggaagagaataagttactcatcggttgattaataaaagcacaacagtcaagagtctggatctgaatgatgatcttcacttgttctttttttcttttaattaatattttccggcatgttagagcaagattgacttgtttttgctgaataatacaaacttgtgatttttgtttgaagtatactcaatcttcgtttatc

SEQ ID NO: 104768 - protein, 272 aa, Arabidopsis thaliana; identical to SEQ ID NO: 26036
  peptide (1)..(272): Ceres Seq. ID no. 13615708
  misc_feature (172)..(268): Pfam Name: Rieske [2Fe-2S] domain Pfam Description: Rieske [2Fe-2S] domain
  misc_feature (1)..(272): Homolog of NCBI NO: 18417067 NR Description: ubiquinol--cytochrome C reductase (cytochrome bc1
  misc_feature (1)..(272): Homolog of NCBI NO: 21553507 NR Description: ubiquinol--cytochrome-c reductase-like protein
  misc_feature (1)..(272): Homolog of NCBI NO: 15240627 NR Description: ubiquinol--cytochrome c reductase (cytochrome bc1
  misc_feature (1)..(272): Homolog of NCBI NO: 21554278 NR Description: ubiquinol--cytochrome-c reductase-like protein
  misc_feature (72)..(272): Homolog of NCBI NO: 11248861 NR Description: ubiquinol-cytochrome-c reductase (EC 1.10.2.2)
  misc_feature (1)..(272): Homolog of NCBI NO: 1076675 NR Description: ubiquinol-cytochrome-c reductase (EC 1.10.2.2)
  misc_feature (1)..(272): Homolog of NCBI NO: 586145 NR Description: Ubiquinol-cytochrome C reductase iron-sulfur
  misc_feature (1)..(272): Homolog of NCBI NO: 1717950 NR Description: Ubiquinol-cytochrome C reductase iron-sulfur
  misc_feature (1)..(272): Homolog of NCBI NO: 1717951 NR Description: Ubiquinol-cytochrome C reductase iron-sulfur
  misc_feature (1)..(272): Homolog of NCBI NO: 1717953 NR Description: Ubiquinol-cytochrome C reductase iron-sulfur

SEQ ID NO: 104769 - DNA, 1298 bp, Arabidopsis thaliana
  misc_feature (1)..(1298): Ceres Seq. ID no. 13615709
  misc_feature: MA Experiment ID: 20000794 Result: Up-regulated in Transcription
  misc_feature: MA Experiment 20000794 PARAMETER Experiment Name: At_Petals_P Parameter: Age (day) Value: 23-25 days
  misc_feature: MA Experiment 20000794 PARAMETER Experiment Name: At_Petals_P Parameter: Plant Line Value: WS
  misc_feature: MA Experiment 20000794 PARAMETER Experiment Name: At_Petals_P Parameter: Tissue Value: Petals vs. Whole plant
ctcgaagactattaaaggaatatccgcaaagaagaaaaaaaaacatttttttggtaaaggactaatctttttgtttgcatcggccatctctaaccttacgattgtgtgttcttgctttgagcgaaaccctagaatcggtcttaacccatttgagcagagatgctgcgagtagcaggaaggaggcttttttctgtttcgcagagatcatcgacggcgacctccttcgtcctttcccgtgaccataccctttccgatggaggcaactcctcttccgcttctagatctgtcccctctgcagatctctcatctttcaattcttaccaccggagcgttataagaggttttgcttctcaagtcattactcagggaaatgagataggttttggttcggaagtcccagccacagtcgaagctgtcaaaacacctaactcaaagattgtctatgacgaccataaccatgagcgttacccacctggtgaccctagcaagcgggcattcgcctattttgtcttgtcgggtggaaggtttgtttatgcctctgttctccgcctgcttgttctgaagcttattgtgagcatgtctgcaagtaaagatgtccttgcccttgcatccctcgaggttgacctagggagcatagaaccaggaactaccgtgacagtcaagtggcgtggaaagcccgtcttcatcaggcgaagaacagaagatgacatcaagctggccaatagtgtggatgttggatccctgagggacccacaagaagactcggttagagtcaagaatccagaatggttgatcgtggttggagtatgcactcatttggggtgcatccccttgcctaatgctggtgattatggtggttggttttgtccgtgtcacggatcacattacgatatatctggaagaattaggaaaggtcctgcaccatacaacctggaagtaccgacctacagcttcttggaagagaataaattactcattggttaatgaataaagcacaacagtccgagtgtcatggtctggatgatcttaaatctgtttttgtttttatattttccggcattttagcgtgcaagttcgctttcctcacactttgggctcagcaaaaattggcttgttttgctgaataatacaaacttgtcattgtatgacttagtatctgtctcatctggtgaaaatacattgttcatacttcatagtctctgtttattatttgaaaagagttttgaatagtatcatccctatttttcttatgtttgtaattttgtaacatatcgtttgtaagagagtttcctttcctt

SEQ ID NO: 104770 - protein, 274 aa, Arabidopsis thaliana; identical to SEQ ID NO: 38962
  peptide (1)..(274): Ceres Seq. ID no. 13615710
  misc_feature (174)..(270): Pfam Name: Rieske [2Fe-2S] domain Pfam Description: Rieske [2Fe-2S] domain
  misc_feature (1)..(274): Homolog of NCBI NO: 15240627 NR Description: ubiquinol--cytochrome c reductase (cytochrome bc1
  misc_feature (1)..(274): Homolog of NCBI NO: 21554278 NR Description: ubiquinol--cytochrome-c reductase-like protein
  misc_feature (1)..(274): Homolog of NCBI NO: 21553507 NR Description: ubiquinol--cytochrome-c reductase-like protein
  misc_feature (1)..(274): Homolog of NCBI NO: 18417067 NR Description: ubiquinol--cytochrome C reductase (cytochrome bc1
  misc_feature (74)..(274): Homolog of NCBI NO: 11248861 NR Description: ubiquinol-cytochrome-c reductase (EC 1.10.2.2)
  misc_feature (1)..(274): Homolog of NCBI NO: 1076675 NR Description: ubiquinol-cytochrome-c reductase (EC 1.10.2.2)
  misc_feature (1)..(274): Homolog of NCBI NO: 586145 NR Description: Ubiquinol-cytochrome C reductase iron-sulfur
  misc_feature (1)..(274): Homolog of NCBI NO: 1717950 NR Description: Ubiquinol-cytochrome C reductase iron-sulfur
  misc_feature (1)..(274): Homolog of NCBI NO: 1717951 NR Description: Ubiquinol-cytochrome C reductase iron-sulfur
  misc_feature (1)..(274): Homolog of NCBI NO: 1717953 NR Description: Ubiquinol-cytochrome C reductase iron-sulfur

SEQ ID NO: 104771 - DNA, 1251 bp, Arabidopsis thaliana
  misc_feature (1)..(1251): Ceres Seq. ID no. 13615715
  misc_feature: MA Experiment ID: 108474 Result: Down-regulated in Transcription
  misc_feature: MA Experiment 108474 PARAMETER Experiment Name: At_Drought_Flowers_cDNA_P Parameter: Timepoint (hr) Value: null
  misc_feature: MA Experiment 108474 PARAMETER Experiment Name: At_Drought_Flowers_cDNA_P Parameter: Treatment Value: Drought vs. No Drought
  misc_feature: MA Experiment ID: 20000234 Result: Up-regulated in Transcription
  misc_feature: MA Experiment 20000234 PARAMETER Experiment Name: At_Siliques_P Parameter: Age (day) Value: 21
  misc_feature: MA Experiment 20000234 PARAMETER Experiment Name: At_Siliques_P Parameter: Organism Value: A. thaliana
  misc_feature: MA Experiment 20000234 PARAMETER Experiment Name: At_Siliques_P Parameter: Plant Line Value: WS
  misc_feature: MA Experiment 20000234 PARAMETER Experiment Name: At_Siliques_P Parameter: Tissue Value: Less Than 5mm Siliques vs. Whole Plant
  misc_feature: MA Experiment ID: 20000235 Result: Up-regulated in Transcription
  misc_feature: MA Experiment 20000235 PARAMETER Experiment Name: At_Siliques_P Parameter: Age (day) Value: 21
  misc_feature: MA Experiment 20000235 PARAMETER Experiment Name: At_Siliques_P Parameter: Organism Value: A. thaliana
  misc_feature: MA Experiment 20000235 PARAMETER Experiment Name: At_Siliques_P Parameter: Plant Line Value: WS
  misc_feature: MA Experiment 20000235 PARAMETER Experiment Name: At_Siliques_P Parameter: Tissue Value: 5-10mm Siliques vs. Whole Plant
  misc_feature: MA Experiment ID: 20000265 Result: Up-regulated in Transcription
  misc_feature: MA Experiment 20000265 PARAMETER Experiment Name: At_Open_Flower_P Parameter: Age (day) Value: 21
  misc_feature: MA Experiment 20000265 PARAMETER Experiment Name: At_Open_Flower_P Parameter: Plant Line Value: WS
  misc_feature: MA Experiment 20000265 PARAMETER Experiment Name: At_Open_Flower_P Parameter: Tissue Value: Closed Flower vs. Whole Plant
  misc_feature: MA Experiment ID: 20000286 Result: Up-regulated in Transcription
  misc_feature: MA Experiment 20000286 PARAMETER Experiment Name: At_Open_Flower_P Parameter: Age (day) Value: 21
  misc_feature: MA Experiment 20000286 PARAMETER Experiment Name: At_Open_Flower_P Parameter: Plant Line Value: WS
  misc_feature: MA Experiment 20000286 PARAMETER Experiment Name: At_Open_Flower_P Parameter: Tissue Value: Half Open vs. Whole Plant
ataacaaaccaaacactactcttttctaaccaagagaaaggttttatatatgcagaatgaagtttgagagagcaaggccattcatagccattgttttcatacaatgtttgtacgctttgatgtctatagtagcaaaattagctttgaacaagggaatgagccctcacgtcttagttgcttaccgaatggcagttgcttccgctctcattacgcctttcgctctcatcctcgagaggaacacaagaccaaagttgaccttcaagattttgttacaaatagccatccttagtttatttgagcctgtggtcgaacaaaacctgtactactcagggatgaaacttaccactgccacattcacatcagctttgtgcaatgctcttcctgctatgacattcataatggcctgcgttttcaagctcgagaaggtgacaatcgaaagacgccacagccaggcaaagctggtgggaaccatggtggctattgggggagcaatgctcatgacattcgtgaaagggaatgtcattgagctgccttggacaagcaactcaaggggtcttaatgggcacacacacgctatgaggattccaaagcaggcggatatagcaagaggatcaattatgcttgtagcaagctgcttcagttggtcatgttacatcattttacaggcaaagattctggctcaatataaagctgagctctcgctaacagctcttatgtgcattatggggatgttggaggctactgttatgggattgatatgggaaaggaaaaacatgtcggtctggaaaatcaacccggacgtgacgcttttagcttcaatctacggaggactagtctcagggttagcatactatgttattggatgggcgtcaaaggagagagggcctgtgtttgtgagcgcgtttaacccgctcagcatggttctcgttgctattctgagcacctttgttttcttggaaaaagtgtacgtaggaagggttattgggtcagttgtcattgtcattgggatatatttggtattatggggtaaaagcaaggacaaaggagggatgcttcaaccaaacgctggatgcgcagagactgtggtaaagattgaccaacagaaggttccgacgcctgataataaccaagtagtatctatcagttaccatttaatgatcccgaaggcagcagctcggtctcaagagtgagtctaagatgccgattctgttccaggatctctatatatcgcaaaaaaacatttttgatagt

SEQ ID NO: 104772 - protein, 377 aa, Arabidopsis thaliana; identical to SEQ ID NO: 39551
  peptide (1)..(377): Ceres Seq. ID no. 13615716
  misc_feature (17)..(150): Pfam Name: Integral membrane protein DUF6 Pfam Description: Integral membrane protein DUF6
  misc_feature (1)..(377): Homolog of NCBI NO: 15240686 NR Description: nodulin MtN21 family protein [Arabidopsis >gi|9758033|dbj|BAB08694.1| contains similarity to
  misc_feature (60)..(377): Homolog of NCBI NO: 28393023 NR Description: unknown protein [Arabidopsis thaliana]
  misc_feature (1)..(329): Homolog of NCBI NO: 15225480 NR Description: nodulin MtN21 family protein [Arabidopsis
  misc_feature (4)..(363): Homolog of NCBI NO: 15224291 NR Description: nodulin MtN21 family protein [Arabidopsis
  misc_feature (12)..(363): Homolog of NCBI NO: 21553757 NR Description: nodulin-like protein [Arabidopsis thaliana]
  misc_feature (1)..(328): Homolog of NCBI NO: 15240683 NR Description: nodulin MtN21 family protein [Arabidopsis
  misc_feature (1)..(328): Homolog of NCBI NO: 34908998 NR Description: nodulin-like protein [Oryza sativa (japonica
  misc_feature (4)..(328): Homolog of NCBI NO: 25408555 NR Description: nodulin-like protein [imported] - Arabidopsis
  misc_feature (1)..(329): Homolog of NCBI NO: 2598575 NR Description: MtN21 [Medicago truncatula]
  misc_feature (7)..(353): Homolog of NCBI NO: 15219123 NR Description: nodulin N21 family protein [Arabidopsis thaliana]

SEQ ID NO: 104773 - protein, 356 aa, Arabidopsis thaliana; identical to SEQ ID NO: 39552
  peptide (1)..(356): Ceres Seq. ID no. 13615717
  misc_feature (1)..(129): Pfam Name: Integral membrane protein DUF6 Pfam Description: Integral membrane protein DUF6
  misc_feature (1)..(356): Homolog of NCBI NO: 15240686 NR Description: nodulin MtN21 family protein [Arabidopsis >gi|9758033|dbj|BAB08694.1| contains similarity to
  misc_feature (39)..(356): Homolog of NCBI NO: 28393023 NR Description: unknown protein [Arabidopsis thaliana]
  misc_feature (1)..(308): Homolog of NCBI NO: 15225480 NR Description: nodulin MtN21 family protein [Arabidopsis
  misc_feature (1)..(342): Homolog of NCBI NO: 15224291 NR Description: nodulin MtN21 family protein [Arabidopsis
  misc_feature (1)..(342): Homolog of NCBI NO: 21553757 NR Description: nodulin-like protein [Arabidopsis thaliana]
  misc_feature (1)..(307): Homolog of NCBI NO: 15240683 NR Description: nodulin MtN21 family protein [Arabidopsis
  misc_feature (1)..(307): Homolog of NCBI NO: 34908998 NR Description: nodulin-like protein [Oryza sativa (japonica
  misc_feature (1)..(307): Homolog of NCBI NO: 25408555 NR Description: nodulin-like protein [imported] - Arabidopsis
  misc_feature (1)..(308): Homolog of NCBI NO: 2598575 NR Description: MtN21 [Medicago truncatula]
  misc_feature (1)..(332): Homolog of NCBI NO: 15219123 NR Description: nodulin N21 family protein [Arabidopsis thaliana]

SEQ ID NO: 104774 - protein, 344 aa, Arabidopsis thaliana; identical to SEQ ID NO: 39553
  peptide (1)..(344): Ceres Seq. ID no. 13615718
  misc_feature (1)..(117): Pfam Name: Integral membrane protein DUF6 Pfam Description: Integral membrane protein DUF6
  misc_feature (1)..(344): Homolog of NCBI NO: 15240686 NR Description: nodulin MtN21 family protein [Arabidopsis >gi|9758033|dbj|BAB08694.1| contains similarity to
  misc_feature (27)..(344): Homolog of NCBI NO: 28393023 NR Description: unknown protein [Arabidopsis thaliana]
  misc_feature (1)..(296): Homolog of NCBI NO: 15225480 NR Description: nodulin MtN21 family protein [Arabidopsis
  misc_feature (1)..(330): Homolog of NCBI NO: 15224291 NR Description: nodulin MtN21 family protein [Arabidopsis
  misc_feature (1)..(330): Homolog of NCBI NO: 21553757 NR Description: nodulin-like protein [Arabidopsis thaliana]
  misc_feature (1)..(295): Homolog of NCBI NO: 15240683 NR Description: nodulin MtN21 family protein [Arabidopsis
  misc_feature (1)..(295): Homolog of NCBI NO: 34908998 NR Description: nodulin-like protein [Oryza sativa (japonica
  misc_feature (1)..(295): Homolog of NCBI NO: 25408555 NR Description: nodulin-like protein [imported] - Arabidopsis
  misc_feature (1)..(296): Homolog of NCBI NO: 2598575 NR Description: MtN21 [Medicago truncatula]
  misc_feature (1)..(320): Homolog of NCBI NO: 15219123 NR Description: nodulin N21 family protein [Arabidopsis thaliana]

SEQ ID NO: 104775 - DNA, 1270 bp, Arabidopsis thaliana
  misc_feature (1)..(1270): Ceres Seq. ID no. 13615719
  misc_feature: MA Experiment ID: 108434 Result: Up-regulated in Transcription
  misc_feature: MA Experiment 108434 PARAMETER Experiment Name: At_Root_Tips_cDNA_P Parameter: Tissue Value: Root Tips
  misc_feature: MA Experiment ID: 108461 Result: Up-regulated in Transcription
  misc_feature: MA Experiment 108461 PARAMETER Experiment Name: At_Germinating_Seeds_cDNA_P Parameter: Age (day) Value: 1 vs. 0
  misc_feature: MA Experiment 108461 PARAMETER Experiment Name: At_Germinating_Seeds_cDNA_P Parameter: Tissue Value: Germinating Seeds
  misc_feature: MA Experiment ID: 108462 Result: Up-regulated in Transcription
  misc_feature: MA Experiment 108462 PARAMETER Experiment Name: At_Germinating_Seeds_cDNA_P Parameter: Age (day) Value: 2 vs. 0
  misc_feature: MA Experiment 108462 PARAMETER Experiment Name: At_Germinating_Seeds_cDNA_P Parameter: Tissue Value: Germinating Seeds
  misc_feature: MA Experiment ID: 108464 Result: Up-regulated in Transcription
  misc_feature: MA Experiment 108464 PARAMETER Experiment Name: At_Germinating_Seeds_cDNA_P Parameter: Age (day) Value: 4 vs. 0
  misc_feature: MA Experiment 108464 PARAMETER Experiment Name: At_Germinating_Seeds_cDNA_P Parameter: Tissue Value: Germinating Seeds
  misc_feature: MA Experiment ID: 108573 Result: Down-regulated in Transcription
  misc_feature: MA Experiment 108573 PARAMETER Experiment Name: At_Drought_cDNA_P Parameter: Timepoint (hr) Value: 6
  misc_feature: MA Experiment 108573 PARAMETER Experiment Name: At_Drought_cDNA_P Parameter: Tissue Value: Aerial
  misc_feature: MA Experiment 108573 PARAMETER Experiment Name: At_Drought_cDNA_P Parameter: Treatment Value: Drought vs. No Drought
  misc_feature: MA Experiment ID: 108576 Result: Down-regulated in Transcription
  misc_feature: MA Experiment 108576 PARAMETER Experiment Name: At_42deg_Heat_cDNA_P Parameter: Temperature (deg C) Value: 42 vs. 22
  misc_feature: MA Experiment 108576 PARAMETER Experiment Name: At_42deg_Heat_cDNA_P Parameter: Timepoint (hr) Value: 1
  misc_feature: MA Experiment 108576 PARAMETER Experiment Name: At_42deg_Heat_cDNA_P Parameter: Tissue Value: Aerial
  misc_feature: MA Experiment ID: 108577 Result: Down-regulated in Transcription
  misc_feature: MA Experiment 108577 PARAMETER Experiment Name: At_42deg_Heat_cDNA_P Parameter: Temperature (deg C) Value: 42 vs. 22
  misc_feature: MA Experiment 108577 PARAMETER Experiment Name: At_42deg_Heat_cDNA_P Parameter: Timepoint (hr) Value: 6
  misc_feature: MA Experiment 108577 PARAMETER Experiment Name: At_42deg_Heat_cDNA_P Parameter: Tissue Value: Aerial
  misc_feature: MA Experiment ID: 108595 Result: Down-regulated in Transcription
  misc_feature: MA Experiment 108595 PARAMETER Experiment Name: At_Ler-pi_Ovule_cDNA_P Parameter: Plant Line Value: null
  misc_feature: MA Experiment ID: 20000087 Result: Down-regulated in Transcription
  misc_feature: MA Experiment 20000087 PARAMETER Experiment Name: At_100uM_ABA_Mutants_cDNA_P Parameter: Plant Line Value: WS
  misc_feature: MA Experiment 20000087 PARAMETER Experiment Name: At_100uM_ABA_Mutants_cDNA_P Parameter: Timepoint (hr) Value: 6
  misc_feature: MA Experiment 20000087 PARAMETER Experiment Name: At_100uM_ABA_Mutants_cDNA_P Parameter: Tissue Value: Aerial
  misc_feature: MA Experiment 20000087 PARAMETER Experiment Name: At_100uM_ABA_Mutants_cDNA_P Parameter: Treatment Value: 100uM ABA vs. No Treatment
  misc_feature: MA Experiment ID: 20000113 Result: Down-regulated in Transcription
  misc_feature: MA Experiment 20000113 PARAMETER Experiment Name: At_42deg_Heat_cDNA_P Parameter: Temperature (deg C) Value: 42 vs. 22
  misc_feature: MA Experiment 20000113 PARAMETER Experiment Name: At_42deg_Heat_cDNA_P Parameter: Timepoint (hr) Value: 8
  misc_feature: MA Experiment 20000113 PARAMETER Experiment Name: At_42deg_Heat_cDNA_P Parameter: Tissue Value: Aerial
  misc_feature: MA Experiment ID: 20000173 Result: Down-regulated in Transcription
  misc_feature: MA Experiment 20000173 PARAMETER Experiment Name: At_42deg_Heat_P Parameter: Age (day) Value: 14
  misc_feature: MA Experiment 20000173 PARAMETER Experiment Name: At_42deg_Heat_P Parameter: Organism Value: A. thaliana
  misc_feature: MA Experiment 20000173 PARAMETER Experiment Name: At_42deg_Heat_P Parameter: Plant Line Value: WS
  misc_feature: MA Experiment 20000173 PARAMETER Experiment Name: At_42deg_Heat_P Parameter: Temperature (deg C) Value: 42 vs. 22
  misc_feature: MA Experiment 20000173 PARAMETER Experiment Name: At_42deg_Heat_P Parameter: Timepoint (hr) Value: 6
  misc_feature: MA Experiment 20000173 PARAMETER Experiment Name: At_42deg_Heat_P Parameter: Tissue Value: Aerial
  misc_feature: MA Experiment ID: 20000180 Result: Up-regulated in Transcription
  misc_feature: MA Experiment 20000180 PARAMETER Experiment Name: At_Germinating_Seeds_P Parameter: Age (hr) Value: 24 vs. 0
  misc_feature: MA Experiment 20000180 PARAMETER Experiment Name: At_Germinating_Seeds_P Parameter: Tissue Value: Germinating Seeds
  misc_feature: MA Experiment ID: 20000227 Result: Up-regulated in Transcription
  misc_feature: MA Experiment 20000227 PARAMETER Experiment Name: At_Root-Tips-vs-Tops_P Parameter: Tissue Value: Root Tips vs. Root Tops
  misc_feature: MA Experiment ID: 20000267 Result: Down-regulated in Transcription
  misc_feature: MA Experiment 20000267 PARAMETER Experiment Name: At_Drought_P Parameter: Age (day) Value: 7
  misc_feature: MA Experiment 20000267 PARAMETER Experiment Name: At_Drought_P Parameter: Organism Value: A. thaliana
  misc_feature: MA Experiment 20000267 PARAMETER Experiment Name: At_Drought_P Parameter: Plant Line Value: WS
  misc_feature: MA Experiment 20000267 PARAMETER Experiment Name: At_Drought_P Parameter: Timepoint (hr) Value: 6
  misc_feature: MA Experiment 20000267 PARAMETER Experiment Name: At_Drought_P Parameter: Tissue Value: Whole Plant
  misc_feature: MA Experiment 20000267 PARAMETER Experiment Name: At_Drought_P Parameter: Treatment Value: Drought vs. No Drought
  misc_feature: MA Experiment ID: 20000436 Result: Down-regulated in Transcription
  misc_feature: MA Experiment 20000436 PARAMETER Experiment Name: At_Drought_P Parameter: Age (day) Value: 7
  misc_feature: MA Experiment 20000436 PARAMETER Experiment Name: At_Drought_P Parameter: Organism Value: A. thaliana
  misc_feature: MA Experiment 20000436 PARAMETER Experiment Name: At_Drought_P Parameter: Plant Line Value: WS
  misc_feature: MA Experiment 20000436 PARAMETER Experiment Name: At_Drought_P Parameter: Timepoint (hr) Value: 12
  misc_feature: MA Experiment 20000436 PARAMETER Experiment Name: At_Drought_P Parameter: Tissue Value: Whole Plant
  misc_feature: MA Experiment 20000436 PARAMETER Experiment Name: At_Drought_P Parameter: Treatment Value: Drought vs. No Drought
  misc_feature: MA Experiment ID: 20000437 Result: Down-regulated in Transcription
  misc_feature: MA Experiment 20000437 PARAMETER Experiment Name: At_Drought_P Parameter: Age (day) Value: 8
  misc_feature: MA Experiment 20000437 PARAMETER Experiment Name: At_Drought_P Parameter: Organism Value: A. thaliana
  misc_feature: MA Experiment 20000437 PARAMETER Experiment Name: At_Drought_P Parameter: Plant Line Value: WS
  misc_feature: MA Experiment 20000437 PARAMETER Experiment Name: At_Drought_P Parameter: Timepoint (hr) Value: 24
  misc_feature: MA Experiment 20000437 PARAMETER Experiment Name: At_Drought_P Parameter: Tissue Value: Whole Plant
  misc_feature: MA Experiment 20000437 PARAMETER Experiment Name: At_Drought_P Parameter: Treatment Value: Drought vs. No Drought
  misc_feature: MA Experiment ID: 20001247 Result: Up-regulated in Transcription
  misc_feature: MA Experiment 20001247 PARAMETER Experiment Name: At_Far-red-induction_P Parameter: Age (day) Value: 7
  misc_feature: MA Experiment 20001247 PARAMETER Experiment Name: At_Far-red-induction_P Parameter: Light Value: Far-red vs. White
  misc_feature: MA Experiment 20001247 PARAMETER Experiment Name: At_Far-red-induction_P Parameter: Organism Value: A. thaliana
  misc_feature: MA Experiment 20001247 PARAMETER Experiment Name: At_Far-red-induction_P Parameter: Plant Line Value: Columbia
  misc_feature: MA Experiment 20001247 PARAMETER Experiment Name: At_Far-red-induction_P Parameter: Timepoint (hr) Value: 1
  misc_feature: MA Experiment 20001247 PARAMETER Experiment Name: At_Far-red-induction_P Parameter: Tissue Value: Whole Plant
  misc_feature: MA Experiment ID: 20001248 Result: Up-regulated in Transcription
  misc_feature: MA Experiment 20001248 PARAMETER Experiment Name: At_Far-red-induction_P Parameter: Age (day) Value: 7
  misc_feature: MA Experiment 20001248 PARAMETER Experiment Name: At_Far-red-induction_P Parameter: Light Value: Far-red vs. White
  misc_feature: MA Experiment 20001248 PARAMETER Experiment Name: At_Far-red-induction_P Parameter: Organism Value: A. thaliana
  misc_feature: MA Experiment 20001248 PARAMETER Experiment Name: At_Far-red-induction_P Parameter: Plant Line Value: Columbia
  misc_feature: MA Experiment 20001248 PARAMETER Experiment Name: At_Far-red-induction_P Parameter: Timepoint (hr) Value: 4
  misc_feature: MA Experiment 20001248 PARAMETER Experiment Name: At_Far-red-induction_P Parameter: Tissue Value: Whole Plant
  misc_feature: MA Experiment ID: 20001450 Result: Up-regulated in Transcription
  misc_feature: MA Experiment 20001450 PARAMETER Experiment Name: At_Far-red-induction_P Parameter: Age (day) Value: 7
  misc_feature: MA Experiment 20001450 PARAMETER Experiment Name: At_Far-red-induction_P Parameter: Light Value: Far-red vs. White
  misc_feature: MA Experiment 20001450 PARAMETER Experiment Name: At_Far-red-induction_P Parameter: Organism Value: A. thaliana
  misc_feature: MA Experiment 20001450 PARAMETER Experiment Name: At_Far-red-induction_P Parameter: Plant Line Value: Columbia
  misc_feature: MA Experiment 20001450 PARAMETER Experiment Name: At_Far-red-induction_P Parameter: Timepoint (hr) Value: 8
  misc_feature: MA Experiment 20001450 PARAMETER Experiment Name: At_Far-red-induction_P Parameter: Tissue Value: Whole Plant
  misc_feature: MA Experiment ID: 20001451 Result: Up-regulated in Transcription
  misc_feature: MA Experiment 20001451 PARAMETER Experiment Name: At_Far-red-induction_P Parameter: Age (day) Value: 7
  misc_feature: MA Experiment 20001451 PARAMETER Experiment Name: At_Far-red-induction_P Parameter: Light Value: Far-red vs. White
  misc_feature: MA Experiment 20001451 PARAMETER Experiment Name: At_Far-red-induction_P Parameter: Organism Value: A. thaliana
  misc_feature: MA Experiment 20001451 PARAMETER Experiment Name: At_Far-red-induction_P Parameter: Plant Line Value: Columbia
  misc_feature: MA Experiment 20001451 PARAMETER Experiment Name: At_Far-red-induction_P Parameter: Timepoint (hr) Value: 24
  misc_feature: MA Experiment 20001451 PARAMETER Experiment Name: At_Far-red-induction_P Parameter: Tissue Value: Whole Plant
  misc_feature: MA Experiment ID: 20001554 Result: Down-regulated in Transcription
  misc_feature: MA Experiment 20001554 PARAMETER Experiment Name: At_Drought_Soil_Dry_P Parameter: Age (day) Value: 21
  misc_feature: MA Experiment 20001554 PARAMETER Experiment Name: At_Drought_Soil_Dry_P Parameter: Organism Value: A. thaliana
  misc_feature: MA Experiment 20001554 PARAMETER Experiment Name: At_Drought_Soil_Dry_P Parameter: Plant Line Value: WS
  misc_feature: MA Experiment 20001554 PARAMETER Experiment Name: At_Drought_Soil_Dry_P Parameter: Post Timepoint (hr) Value: None
  misc_feature: MA Experiment 20001554 PARAMETER Experiment Name: At_Drought_Soil_Dry_P Parameter: Post-Treatment Value: None
  misc_feature: MA Experiment 20001554 PARAMETER Experiment Name: At_Drought_Soil_Dry_P Parameter: Timepoint (day) Value: 7
  misc_feature: MA Experiment 20001554 PARAMETER Experiment Name: At_Drought_Soil_Dry_P Parameter: Treatment Value: Drought vs. No Drought
  misc_feature: MA Experiment ID: 20001555 Result: Down-regulated in Transcription
  misc_feature: MA Experiment 20001555 PARAMETER Experiment Name: At_Drought_Soil_Dry_P Parameter: Age (day) Value: 24
  misc_feature: MA Experiment 20001555 PARAMETER Experiment Name: At_Drought_Soil_Dry_P Parameter: Organism Value: A. thaliana
  misc_feature: MA Experiment 20001555 PARAMETER Experiment Name: At_Drought_Soil_Dry_P Parameter: Plant Line Value: WS
  misc_feature: MA Experiment 20001555 PARAMETER Experiment Name: At_Drought_Soil_Dry_P Parameter: Post Timepoint (hr) Value: None
  misc_feature: MA Experiment 20001555 PARAMETER Experiment Name: At_Drought_Soil_Dry_P Parameter: Post-Treatment Value: None
  misc_feature: MA Experiment 20001555 PARAMETER Experiment Name: At_Drought_Soil_Dry_P Parameter: Timepoint (day) Value: 10
  misc_feature: MA Experiment 20001555 PARAMETER Experiment Name: At_Drought_Soil_Dry_P Parameter: Treatment Value: Drought vs. No Drought
  misc_feature: MA Experiment ID: 20001560 Result: Up-regulated in Transcription
  misc_feature: MA Experiment 20001560 PARAMETER Experiment Name: At_Drought_Soil_Dry_P Parameter: Age (day) Value: 28
  misc_feature: MA Experiment 20001560 PARAMETER Experiment Name: At_Drought_Soil_Dry_P Parameter: Organism Value: A. thaliana
  misc_feature: MA Experiment 20001560 PARAMETER Experiment Name: At_Drought_Soil_Dry_P Parameter: Plant Line Value: WS
  misc_feature: MA Experiment 20001560 PARAMETER Experiment Name: At_Drought_Soil_Dry_P Parameter: Post Timepoint (hr) Value: None
  misc_feature: MA Experiment 20001560 PARAMETER Experiment Name: At_Drought_Soil_Dry_P Parameter: Post-Treatment Value: None
  misc_feature: MA Experiment 20001560 PARAMETER Experiment Name: At_Drought_Soil_Dry_P Parameter: Timepoint (day) Value: 14
  misc_feature: MA Experiment 20001560 PARAMETER Experiment Name: At_Drought_Soil_Dry_P Parameter: Treatment Value: Drought vs. No Drought
  misc_feature: MA Experiment ID: 20001904 Result: Down-regulated in Transcription
  misc_feature: MA Experiment 20001904 PARAMETER Experiment Name: At_Drought_Reproduction_P Parameter: Age (day) Value: 37
  misc_feature: MA Experiment 20001904 PARAMETER Experiment Name: At_Drought_Reproduction_P Parameter: Organism Value: A. thaliana
  misc_feature: MA Experiment 20001904 PARAMETER Experiment Name: At_Drought_Reproduction_P Parameter: Plant Line Value: WS
  misc_feature: MA Experiment 20001904 PARAMETER Experiment Name: At_Drought_Reproduction_P Parameter: Timepoint (day) Value: 7
  misc_feature: MA Experiment 20001904 PARAMETER Experiment Name: At_Drought_Reproduction_P Parameter: Tissue Value: Rosettes
  misc_feature: MA Experiment 20001904 PARAMETER Experiment Name: At_Drought_Reproduction_P Parameter: Treatment Value: Drought vs. No Drought
  misc_feature: MA Experiment ID: 20001905 Result: Down-regulated in Transcription
  misc_feature: MA Experiment 20001905 PARAMETER Experiment Name: At_Drought_Reproduction_P Parameter: Age (day) Value: 40
  misc_feature: MA Experiment 20001905 PARAMETER Experiment Name: At_Drought_Reproduction_P Parameter: Organism Value: A. thaliana
  misc_feature: MA Experiment 20001905 PARAMETER Experiment Name: At_Drought_Reproduction_P Parameter: Plant Line Value: WS
  misc_feature: MA Experiment 20001905 PARAMETER Experiment Name: At_Drought_Reproduction_P Parameter: Timepoint (day) Value: 10
  misc_feature: MA Experiment 20001905 PARAMETER Experiment Name: At_Drought_Reproduction_P Parameter: Tissue Value: Rosettes
  misc_feature: MA Experiment 20001905 PARAMETER Experiment Name: At_Drought_Reproduction_P Parameter: Treatment Value: Drought vs. No Drought
  misc_feature: MA Experiment ID: 20001911 Result: Down-regulated in Transcription
  misc_feature: MA Experiment 20001911 PARAMETER Experiment Name: At_Drought_Reproduction_P Parameter: Age (day) Value: 40
  misc_feature: MA Experiment 20001911 PARAMETER Experiment Name: At_Drought_Reproduction_P Parameter: Organism Value: A. thaliana
  misc_feature: MA Experiment 20001911 PARAMETER Experiment Name: At_Drought_Reproduction_P Parameter: Plant Line Value: WS
  misc_feature: MA Experiment 20001911 PARAMETER Experiment Name: At_Drought_Reproduction_P Parameter: Timepoint (day) Value: 10
  misc_feature: MA Experiment 20001911 PARAMETER Experiment Name: At_Drought_Reproduction_P Parameter: Tissue Value: Flowers
  misc_feature: MA Experiment 20001911 PARAMETER Experiment Name: At_Drought_Reproduction_P Parameter: Treatment Value: Drought vs. No Drought
atgtcgcgcctgttcttggtagtctcctccaatgtgtgttccgattccgatttctcttttctccttgatccttattctgattcagtctcactttttgcagatctcgtccgttgttgcataagtgctatggatctcgcgtcgaatcttggtgggaagatcgataaatccgatgttctcaccgccgtcgaaaagtatgagcaatatcatgtcttccatggaggaaacgaggaagagagaaaagccaattatactgacatggttaataagtactatgaccttgctactagcttttatgagtacggatggggagaatccttccattttgcacaaagatggaaaggagaatcgcttcgagagagtattaagcgacacgagcactttcttgctcttcagcttggcatccaaccaggacaaaaggtactggatgtaggatgtggaattggtggaccgttgagggaaattgcaagattcagcaattcagttgttaccgggctcaacaataacgaataccagatcaccagaggcaaggaactaaaccgacttgcaggtgtcgacaagacatgtaactttgtcaaggctgacttcatgaagatgccattcccggaaaacagtttcgatgcagtttatgcaatagaagcaacttgccatgcacctgatgcgtatggatgctacaaagagatctacagagtgctaaagcctgggcaatgttttgctgcctatgagtggtgtatgactgatgcatttgaccctgataacgccgaacatcagaaaataaagggagagatagagattggagatggtcttcctgacattaggctgactacaaaatgcctcgaagctctgaagcaggccggttttgaagtgatatgggaaaaggatctggccaaggactcgccggtcccatggtacttacctcttgacaaaaatcatttctcactcagtagcttccgccttacagctgttggacgattcataaccaaaaacatggtcaagatccttgaatacataagacttgcacctcaaggaagccaaagggtctcaaatttcctggagcaggctgcggaaggattagtcgacggtggaaggagagagattttcacgccaatgtatttcttcttggcccggaagccagagtaagcggatgagagatggcgatggtcatcgtaggtcgaatgaagtgacaaaatttctcaatttgcagtcttattttctatgtttatcggatttgttgcagagtttcttattcaccaactatattttggatgttcgt

SEQ ID NO: 104776 - protein, 378 aa, Arabidopsis thaliana
  peptide (1)..(378): Ceres Seq. ID no. 13615720
  misc_feature (93)..(294): Pfam Name: ubiE/COQ5 methyltransferase family Pfam Description: ubiE/COQ5 methyltransferase family
  misc_feature (43)..(378): Homolog of NCBI NO: 15240691 NR Description: 24-sterol C-methyltransferase [Arabidopsis
  misc_feature (43)..(378): Homolog of NCBI NO: 21434843 NR Description: cephalopod [Arabidopsis thaliana]
  misc_feature (40)..(378): Homolog of NCBI NO: 7443720 NR Description: probable sterol 24-C-methyltransferase (EC
  misc_feature (42)..(377): Homolog of NCBI NO: 7443719 NR Description: sterol 24-C-methyltransferase (EC 2.1.1.41) -
  misc_feature (42)..(377): Homolog of NCBI NO: 7443716 NR Description: sterol 24-C-methyltransferase (EC 2.1.1.41)
  misc_feature (42)..(377): Homolog of NCBI NO: 3560474 NR Description: S-adenosyl-methionine-sterol-C- methyltransferase
  misc_feature (42)..(377): Homolog of NCBI NO: 34393309 NR Description: cycloartenol-C24-methyltransferase [Oryza sativa
  misc_feature (42)..(377): Homolog of NCBI NO: 7443715 NR Description: sterol 24-C-methyltransferase (EC 2.1.1.41) -
  misc_feature (42)..(377): Homolog of NCBI NO: 3560531 NR Description: cycloartenol-C24-methyltransferase [Oryza sativa
  misc_feature (44)..(377): Homolog of NCBI NO: 3603295 NR Description: S-adenosyl-methionine
MSRLFLVVSSNVCSDSDFSFLLDPYSDSVSLFADLVRCCISAMDLASNLGGKIDKSDVLTAVEKYEQYHVFHGGNEEERKANYTDMVNKYYDLATSFYEYGWGESFHFAQRWKGESLRESIKRHEHFLALQLGIQPGQKVLDVGCGIGGPLREIARFSNSVVTGLNNNEYQITRGKELNRLAGVDKTCNFVKADFMKMPFPENSFDAVYAIEATCHAPDAYGCYKEIYRVLKPGQCFAAYEWCMTDAFDPDNAEHQKIKGEIEIGDGLPDIRLTTKCLEALKQAGFEVIWEKDLAKDSPVPWYLPLDKNHFSLSSFRLTAVGRFITKNMVKILEYIRLAPQGSQRVSNFLEQAAEGLVDGGRREIFTPMYFFLARKPE

SEQ ID NO: 104777 - protein, 336 aa, Arabidopsis thaliana; identical to SEQ ID NO: 26651
  peptide (1)..(336): Ceres Seq. ID no. 13615721
  misc_feature (51)..(252): Pfam Name: ubiE/COQ5 methyltransferase family Pfam Description: ubiE/COQ5 methyltransferase family
  misc_feature (1)..(336): Homolog of NCBI NO: 15240691 NR Description: 24-sterol C-methyltransferase [Arabidopsis
  misc_feature (1)..(336): Homolog of NCBI NO: 21434843 NR Description: cephalopod [Arabidopsis thaliana]
  misc_feature (1)..(336): Homolog of NCBI NO: 7443720 NR Description: probable sterol 24-C-methyltransferase (EC
  misc_feature (1)..(335): Homolog of NCBI NO: 7443719 NR Description: sterol 24-C-methyltransferase (EC 2.1.1.41) -
  misc_feature (1)..(335): Homolog of NCBI NO: 7443716 NR Description: sterol 24-C-methyltransferase (EC 2.1.1.41)
  misc_feature (1)..(335): Homolog of NCBI NO: 3560474 NR Description: S-adenosyl-methionine-sterol-C- methyltransferase
  misc_feature (1)..(335): Homolog of NCBI NO: 34393309 NR Description: cycloartenol-C24-methyltransferase [Oryza sativa
  misc_feature (1)..(335): Homolog of NCBI NO: 7443715 NR Description: sterol 24-C-methyltransferase (EC 2.1.1.41) -
  misc_feature (1)..(335): Homolog of NCBI NO: 3560531 NR Description: cycloartenol-C24-methyltransferase [Oryza sativa
  misc_feature (2)..(335): Homolog of NCBI NO: 3603295 NR Description: S-adenosyl-methionine

SEQ ID NO: 104778 - protein, 293 aa, Arabidopsis thaliana; identical to SEQ ID NO: 26652
  peptide (1)..(293): Ceres Seq. ID no. 13615722
  misc_feature (8)..(209): Pfam Name: ubiE/COQ5 methyltransferase family Pfam Description: ubiE/COQ5 methyltransferase family
  misc_feature (1)..(293): Homolog of NCBI NO: 15240691 NR Description: 24-sterol C-methyltransferase [Arabidopsis
  misc_feature (1)..(293): Homolog of NCBI NO: 21434843 NR Description: cephalopod [Arabidopsis thaliana]
  misc_feature (1)..(293): Homolog of NCBI NO: 7443720 NR Description: probable sterol 24-C-methyltransferase (EC
  misc_feature (1)..(292): Homolog of NCBI NO: 7443719 NR Description: sterol 24-C-methyltransferase (EC 2.1.1.41) -
  misc_feature (1)..(292): Homolog of NCBI NO: 7443716 NR Description: sterol 24-C-methyltransferase (EC 2.1.1.41)
  misc_feature (1)..(292): Homolog of NCBI NO: 3560474 NR Description: S-adenosyl-methionine-sterol-C- methyltransferase
  misc_feature (1)..(292): Homolog of NCBI NO: 34393309 NR Description: cycloartenol-C24-methyltransferase [Oryza sativa
  misc_feature (1)..(292): Homolog of NCBI NO: 7443715 NR Description: sterol 24-C-methyltransferase (EC 2.1.1.41) -
  misc_feature (1)..(292): Homolog of NCBI NO: 3560531 NR Description: cycloartenol-C24-methyltransferase [Oryza sativa
  misc_feature (1)..(292): Homolog of NCBI NO: 3603295 NR Description: S-adenosyl-methionine

SEQ ID NO: 104779 - DNA, 1656 bp, Arabidopsis thaliana
  misc_feature (1)..(1656): Ceres Seq. ID no. 13615723
  misc_feature: MA Experiment ID: 108434 Result: Down-regulated in Transcription
  misc_feature: MA Experiment 108434 PARAMETER Experiment Name: At_Root_Tips_cDNA_P Parameter: Tissue Value: Root Tips
  misc_feature: MA Experiment ID: 108488 Result: Down-regulated in Transcription
  misc_feature: MA Experiment ID: 108561 Result: Up-regulated in Transcription
  misc_feature: MA Experiment 108561 PARAMETER Experiment Name: At_100uM_ABA_cDNA_P Parameter: Timepoint (hr) Value: 6
  misc_feature: MA Experiment 108561 PARAMETER Experiment Name: At_100uM_ABA_cDNA_P Parameter: Tissue Value: Aerial
  misc_feature: MA Experiment 108561 PARAMETER Experiment Name: At_100uM_ABA_cDNA_P Parameter: Treatment Value: 100uM ABA vs. No Treatment
  misc_feature: MA Experiment ID: 108569 Result: Up-regulated in Transcription
  misc_feature: MA Experiment 108569 PARAMETER Experiment Name: At_0.001%_MeJA__cDNA_P Parameter: Timepoint (hr) Value: 6
  misc_feature: MA Experiment 108569 PARAMETER Experiment Name: At_0.001%_MeJA__cDNA_P Parameter: Tissue Value: Aerial
  misc_feature: MA Experiment 108569 PARAMETER Experiment Name: At_0.001%_MeJA__cDNA_P Parameter: Treatment Value: 0.001% MeJA vs. No Treatment
  misc_feature: MA Experiment ID: 108572 Result: Up-regulated in Transcription
  misc_feature: MA Experiment 108572 PARAMETER Experiment Name: At_Drought_cDNA_P Parameter: Timepoint (hr) Value: 1
  misc_feature: MA Experiment 108572 PARAMETER Experiment Name: At_Drought_cDNA_P Parameter: Tissue Value: Aerial
  misc_feature: MA Experiment 108572 PARAMETER Experiment Name: At_Drought_cDNA_P Parameter: Treatment Value: Drought vs. No Drought
  misc_feature: MA Experiment ID: 108573 Result: Up-regulated in Transcription
  misc_feature: MA Experiment 108573 PARAMETER Experiment Name: At_Drought_cDNA_P Parameter: Timepoint (hr) Value: 6
  misc_feature: MA Experiment 108573 PARAMETER Experiment Name: At_Drought_cDNA_P Parameter: Tissue Value: Aerial
  misc_feature: MA Experiment 108573 PARAMETER Experiment Name: At_Drought_cDNA_P Parameter: Treatment Value: Drought vs. No Drought
  misc_feature: MA Experiment ID: 108585 Result: Up-regulated in Transcription
  misc_feature: MA Experiment 108585 PARAMETER Experiment Name: At_5mM_NaNP_cDNA_P Parameter: Timepoint (hr) Value: 6
  misc_feature: MA Experiment 108585 PARAMETER Experiment Name: At_5mM_NaNP_cDNA_P Parameter: Tissue Value: Aerial
  misc_feature: MA Experiment 108585 PARAMETER Experiment Name: At_5mM_NaNP_cDNA_P Parameter: Treatment Value: null
  misc_feature: MA Experiment ID: 108595 Result: Down-regulated in Transcription
  misc_feature: MA Experiment 108595 PARAMETER Experiment Name: At_Ler-pi_Ovule_cDNA_P Parameter: Plant Line Value: null
  misc_feature: MA Experiment ID: 108605 Result: Up-regulated in Transcription
  misc_feature: MA Experiment 108605 PARAMETER Experiment Name: At_100uM_ABA_cDNA_P Parameter: Timepoint (hr) Value: 6
  misc_feature: MA Experiment 108605 PARAMETER Experiment Name: At_100uM_ABA_cDNA_P Parameter: Tissue Value: Aerial
  misc_feature: MA Experiment 108605 PARAMETER Experiment Name: At_100uM_ABA_cDNA_P Parameter: Treatment Value: 100uM ABA vs. No Treatment
  misc_feature: MA Experiment ID: 108607 Result: Up-regulated in Transcription
  misc_feature: MA Experiment 108607 PARAMETER Experiment Name: At_100uM_ABA_cDNA_P Parameter: Timepoint (hr) Value: 4
  misc_feature: MA Experiment 108607 PARAMETER Experiment Name: At_100uM_ABA_cDNA_P Parameter: Tissue Value: Aerial
  misc_feature: MA Experiment 108607 PARAMETER Experiment Name: At_100uM_ABA_cDNA_P Parameter: Treatment Value: 100uM ABA vs. No Treatment
  misc_feature: MA Experiment ID: 20000070 Result: Up-regulated in Transcription
  misc_feature: MA Experiment 20000070 PARAMETER Experiment Name: At_100uM_ABA_Mutants_cDNA_P Parameter: Plant Line Value: CS24
  misc_feature: MA Experiment 20000070 PARAMETER Experiment Name: At_100uM_ABA_Mutants_cDNA_P Parameter: Timepoint (hr) Value: 6
  misc_feature: MA Experiment 20000070 PARAMETER Experiment Name: At_100uM_ABA_Mutants_cDNA_P Parameter: Tissue Value: Aerial
  misc_feature: MA Experiment 20000070 PARAMETER Experiment Name: At_100uM_ABA_Mutants_cDNA_P Parameter: Treatment Value: 100uM ABA vs. No Treatment
  misc_feature: MA Experiment ID: 20000071 Result: Up-regulated in Transcription
  misc_feature: MA Experiment 20000071 PARAMETER Experiment Name: At_100uM_ABA_Mutants_cDNA_P Parameter: Plant Line Value: CS8104
  misc_feature: MA Experiment 20000071 PARAMETER Experiment Name: At_100uM_ABA_Mutants_cDNA_P Parameter: Timepoint (hr) Value: 6
  misc_feature: MA Experiment 20000071 PARAMETER Experiment Name: At_100uM_ABA_Mutants_cDNA_P Parameter: Tissue Value: Aerial
  misc_feature: MA Experiment 20000071 PARAMETER Experiment Name: At_100uM_ABA_Mutants_cDNA_P Parameter: Treatment Value: 100uM ABA vs. No Treatment
  misc_feature: MA Experiment ID: 20000072 Result: Up-regulated in Transcription
  misc_feature: MA Experiment 20000072 PARAMETER Experiment Name: At_100uM_ABA_Mutants_cDNA_P Parameter: Plant Line Value: CS8105
  misc_feature: MA Experiment 20000072 PARAMETER Experiment Name: At_100uM_ABA_Mutants_cDNA_P Parameter: Timepoint (hr) Value: 6
  misc_feature: MA Experiment 20000072 PARAMETER Experiment Name: At_100uM_ABA_Mutants_cDNA_P Parameter: Tissue Value: Aerial
  misc_feature: MA Experiment 20000072 PARAMETER Experiment Name: At_100uM_ABA_Mutants_cDNA_P Parameter: Treatment Value: 100uM ABA vs. No Treatment
  misc_feature: MA Experiment ID: 20000086 Result: Up-regulated in Transcription
  misc_feature: MA Experiment 20000086 PARAMETER Experiment Name: At_100uM_ABA_Mutants_cDNA_P Parameter: Plant Line Value: CS22
  misc_feature: MA Experiment 20000086 PARAMETER Experiment Name: At_100uM_ABA_Mutants_cDNA_P Parameter: Timepoint (hr) Value: 6
  misc_feature: MA Experiment 20000086 PARAMETER Experiment Name: At_100uM_ABA_Mutants_cDNA_P Parameter: Tissue Value: Aerial
  misc_feature: MA Experiment 20000086 PARAMETER Experiment Name: At_100uM_ABA_Mutants_cDNA_P Parameter: Treatment Value: 100uM ABA vs. No Treatment
  misc_feature: MA Experiment ID: 20000088 Result: Up-regulated in Transcription
  misc_feature: MA Experiment 20000088 PARAMETER Experiment Name: At_100uM_ABA_Mutants_cDNA_P Parameter: Plant Line Value: Landsberg
  misc_feature: MA Experiment 20000088 PARAMETER Experiment Name: At_100uM_ABA_Mutants_cDNA_P Parameter: Timepoint (hr) Value: 6
  misc_feature: MA Experiment 20000088 PARAMETER Experiment Name: At_100uM_ABA_Mutants_cDNA_P Parameter: Tissue Value: Aerial
  misc_feature: MA Experiment 20000088 PARAMETER Experiment Name: At_100uM_ABA_Mutants_cDNA_P Parameter: Treatment Value: 100uM ABA vs. No Treatment
  misc_feature: MA Experiment ID: 20000117 Result: Up-regulated in Transcription
  misc_feature: MA Experiment 20000117 PARAMETER Experiment Name: At_100uM_ABA_Mutants_cDNA_P Parameter: Plant Line Value: Columbia
  misc_feature: MA Experiment 20000117 PARAMETER Experiment Name: At_100uM_ABA_Mutants_cDNA_P Parameter: Timepoint (hr) Value: 6
  misc_feature: MA Experiment 20000117 PARAMETER Experiment Name: At_100uM_ABA_Mutants_cDNA_P Parameter: Tissue Value: Aerial
  misc_feature: MA Experiment 20000117 PARAMETER Experiment Name: At_100uM_ABA_Mutants_cDNA_P Parameter: Treatment Value: 100uM ABA vs. No Treatment
  misc_feature: MA Experiment ID: 20000169 Result: Up-regulated in Transcription
  misc_feature: MA Experiment 20000169 PARAMETER Experiment Name: At_100uM_ABA_P Parameter: Age (day) Value: 14
  misc_feature: MA Experiment 20000169 PARAMETER Experiment Name: At_100uM_ABA_P Parameter: Organism Value: A. thaliana
  misc_feature: MA Experiment 20000169 PARAMETER Experiment Name: At_100uM_ABA_P Parameter: Plant Line Value: WS
  misc_feature: MA Experiment 20000169 PARAMETER Experiment Name: At_100uM_ABA_P Parameter: Timepoint (hr) Value: 6
  misc_feature: MA Experiment 20000169 PARAMETER Experiment Name: At_100uM_ABA_P Parameter: Tissue Value: Aerial
  misc_feature: MA Experiment 20000169 PARAMETER Experiment Name: At_100uM_ABA_P Parameter: Treatment Value: 100uM ABA vs. No Treatment
  misc_feature: MA Experiment ID: 20000184 Result: Down-regulated in Transcription
  misc_feature: MA Experiment 20000184 PARAMETER Experiment Name: At_Shoots__P Parameter: Age (day) Value: 7
  misc_feature: MA Experiment 20000184 PARAMETER Experiment Name: At_Shoots__P Parameter: Tissue Value: Shoots vs. Whole Plant
  misc_feature: MA Experiment ID: 20000185 Result: Down-regulated in Transcription
  misc_feature: MA Experiment 20000185 PARAMETER Experiment Name: At_Roots__P Parameter: Age (day) Value: 7 vs. 21
  misc_feature: MA Experiment 20000185 PARAMETER Experiment Name: At_Roots__P Parameter: Organism Value: A. thaliana
  misc_feature: MA Experiment 20000185 PARAMETER Experiment Name: At_Roots__P Parameter: Tissue Value: Roots vs. Whole Plant
  misc_feature: MA Experiment ID: 20000234 Result: Down-regulated in Transcription
  misc_feature: MA Experiment 20000234 PARAMETER Experiment Name: At_Siliques_P Parameter: Age (day) Value: 21
  misc_feature: MA Experiment 20000234 PARAMETER Experiment Name: At_Siliques_P Parameter: Organism Value: A. thaliana
  misc_feature: MA Experiment 20000234 PARAMETER Experiment Name: At_Siliques_P Parameter: Plant Line Value: WS
  misc_feature: MA Experiment 20000234 PARAMETER Experiment Name: At_Siliques_P Parameter: Tissue Value: Less Than 5mm Siliques vs. Whole Plant
  misc_feature: MA Experiment ID: 20000235 Result: Down-regulated in Transcription
  misc_feature: MA Experiment 20000235 PARAMETER Experiment Name: At_Siliques_P Parameter: Age (day) Value: 21
  misc_feature: MA Experiment 20000235 PARAMETER Experiment Name: At_Siliques_P Parameter: Organism Value: A. thaliana
  misc_feature: MA Experiment 20000235 PARAMETER Experiment Name: At_Siliques_P Parameter: Plant Line Value: WS
  misc_feature: MA Experiment 20000235 PARAMETER Experiment Name: At_Siliques_P Parameter: Tissue Value: 5-10mm Siliques vs. Whole Plant
  misc_feature: MA Experiment ID: 20000265 Result: Down-regulated in Transcription
  misc_feature: MA Experiment 20000265 PARAMETER Experiment Name: At_Open_Flower_P Parameter: Age (day) Value: 21
  misc_feature: MA Experiment 20000265 PARAMETER Experiment Name: At_Open_Flower_P Parameter: Plant Line Value: WS
  misc_feature: MA Experiment 20000265 PARAMETER Experiment Name: At_Open_Flower_P Parameter: Tissue Value: Closed Flower vs. Whole Plant
  misc_feature: MA Experiment ID: 20000436 Result: Up-regulated in Transcription
  misc_feature: MA Experiment 20000436 PARAMETER Experiment Name: At_Drought_P Parameter: Age (day) Value: 7
  misc_feature: MA Experiment 20000436 PARAMETER Experiment Name: At_Drought_P Parameter: Organism Value: A. thaliana
  misc_feature: MA Experiment 20000436 PARAMETER Experiment Name: At_Drought_P Parameter: Plant Line Value: WS
  misc_feature: MA Experiment 20000436 PARAMETER Experiment Name: At_Drought_P Parameter: Timepoint (hr) Value: 12
  misc_feature: MA Experiment 20000436 PARAMETER Experiment Name: At_Drought_P Parameter: Tissue Value: Whole Plant
  misc_feature: MA Experiment 20000436 PARAMETER Experiment Name: At_Drought_P Parameter: Treatment Value: Drought vs. No Drought
  misc_feature: MA Experiment ID: 20000437 Result: Up-regulated in Transcription
  misc_feature: MA Experiment 20000437 PARAMETER Experiment Name: At_Drought_P Parameter: Age (day) Value: 8
  misc_feature: MA Experiment 20000437 PARAMETER Experiment Name: At_Drought_P Parameter: Organism Value: A. thaliana
  misc_feature: MA Experiment 20000437 PARAMETER Experiment Name: At_Drought_P Parameter: Plant Line Value: WS
  misc_feature: MA Experiment 20000437 PARAMETER Experiment Name: At_Drought_P Parameter: Timepoint (hr) Value: 24
  misc_feature: MA Experiment 20000437 PARAMETER Experiment Name: At_Drought_P Parameter: Tissue Value: Whole Plant
  misc_feature: MA Experiment 20000437 PARAMETER Experiment Name: At_Drought_P Parameter: Treatment Value: Drought vs. No Drought
  misc_feature: MA Experiment ID: 20000438 Result: Down-regulated in Transcription
  misc_feature: MA Experiment 20000438 PARAMETER Experiment Name: At_Shoots__P Parameter: Age (day) Value: 14
  misc_feature: MA Experiment 20000438 PARAMETER Experiment Name: At_Shoots__P Parameter: Tissue Value: Shoots vs. Whole Plant
  misc_feature: MA Experiment ID: 20000439 Result: Down-regulated in Transcription
  misc_feature: MA Experiment 20000439 PARAMETER Experiment Name: At_Roots__P Parameter: Age (day) Value: 14 vs. 21
  misc_feature: MA Experiment 20000439 PARAMETER Experiment Name: At_Roots__P Parameter: Organism Value: A. thaliana
  misc_feature: MA Experiment 20000439 PARAMETER Experiment Name: At_Roots__P Parameter: Tissue Value: Roots vs. Whole Plant
  misc_feature: MA Experiment ID: 20000453 Result: Up-regulated in Transcription
  misc_feature: MA Experiment 20000453 PARAMETER Experiment Name: At_100uM_ABA_P Parameter: Age (day) Value: 15
  misc_feature: MA Experiment 20000453 PARAMETER Experiment Name: At_100uM_ABA_P Parameter: Organism Value: A. thaliana
  misc_feature: MA Experiment 20000453 PARAMETER Experiment Name: At_100uM_ABA_P Parameter: Plant Line Value: WS
  misc_feature: MA Experiment 20000453 PARAMETER Experiment Name: At_100uM_ABA_P Parameter: Timepoint (hr) Value: 24
  misc_feature: MA Experiment 20000453 PARAMETER Experiment Name: At_100uM_ABA_P Parameter: Tissue Value: Aerial
  misc_feature: MA Experiment 20000453 PARAMETER Experiment Name: At_100uM_ABA_P Parameter: Treatment Value: 100uM ABA vs. No Treatment
  misc_feature: MA Experiment ID: 20000794 Result: Up-regulated in Transcription
  misc_feature: MA Experiment 20000794 PARAMETER Experiment Name: At_Petals_P Parameter: Age (day) Value: 23-25 days
  misc_feature: MA Experiment 20000794 PARAMETER Experiment Name: At_Petals_P Parameter: Plant Line Value: WS
  misc_feature: MA Experiment 20000794 PARAMETER Experiment Name: At_Petals_P Parameter: Tissue Value: Petals vs. Whole plant
  misc_feature: MA Experiment ID: 20001450 Result: Up-regulated in Transcription
  misc_feature: MA Experiment 20001450 PARAMETER Experiment Name: At_Far-red-induction_P Parameter: Age (day) Value: 7
  misc_feature: MA Experiment 20001450 PARAMETER Experiment Name: At_Far-red-induction_P Parameter: Light Value: Far-red vs. White
  misc_feature: MA Experiment 20001450 PARAMETER Experiment Name: At_Far-red-induction_P Parameter: Organism Value: A. thaliana
  misc_feature: MA Experiment 20001450 PARAMETER Experiment Name: At_Far-red-induction_P Parameter: Plant Line Value: Columbia
  misc_feature: MA Experiment 20001450 PARAMETER Experiment Name: At_Far-red-induction_P Parameter: Timepoint (hr) Value: 8
  misc_feature: MA Experiment 20001450 PARAMETER Experiment Name: At_Far-red-induction_P Parameter: Tissue Value: Whole Plant
  misc_feature: MA Experiment ID: 20001558 Result: Down-regulated in Transcription
  misc_feature: MA Experiment 20001558 PARAMETER Experiment Name: At_Drought_Soil_Dry_P Parameter: Age (day) Value: 27
  misc_feature: MA Experiment 20001558 PARAMETER Experiment Name: At_Drought_Soil_Dry_P Parameter: Organism Value: A. thaliana
  misc_feature: MA Experiment 20001558 PARAMETER Experiment Name: At_Drought_Soil_Dry_P Parameter: Plant Line Value: WS
  misc_feature: MA Experiment 20001558 PARAMETER Experiment Name: At_Drought_Soil_Dry_P Parameter: Post Timepoint (hr) Value: 6
  misc_feature: MA Experiment 20001558 PARAMETER Experiment Name: At_Drought_Soil_Dry_P Parameter: Post-Treatment Value: Re-Water vs. No Drought
  misc_feature: MA Experiment 20001558 PARAMETER Experiment Name: At_Drought_Soil_Dry_P Parameter: Timepoint (day) Value: 13
  misc_feature: MA Experiment 20001558 PARAMETER Experiment Name: At_Drought_Soil_Dry_P Parameter: Treatment Value: Drought vs. No Drought
  misc_feature: MA Experiment ID: 20001560 Result: Down-regulated in Transcription
  misc_feature: MA Experiment 20001560 PARAMETER Experiment Name: At_Drought_Soil_Dry_P Parameter: Age (day) Value: 28
  misc_feature: MA Experiment 20001560 PARAMETER Experiment Name: At_Drought_Soil_Dry_P Parameter: Organism Value: A. thaliana
  misc_feature: MA Experiment 20001560 PARAMETER Experiment Name: At_Drought_Soil_Dry_P Parameter: Plant Line Value: WS
  misc_feature: MA Experiment 20001560 PARAMETER Experiment Name: At_Drought_Soil_Dry_P Parameter: Post Timepoint (hr) Value: None
  misc_feature: MA Experiment 20001560 PARAMETER Experiment Name: At_Drought_Soil_Dry_P Parameter: Post-Treatment Value: None
  misc_feature: MA Experiment 20001560 PARAMETER Experiment Name: At_Drought_Soil_Dry_P Parameter: Timepoint (day) Value: 14
  misc_feature: MA Experiment 20001560 PARAMETER Experiment Name: At_Drought_Soil_Dry_P Parameter: Treatment Value: Drought vs. No Drought
  misc_feature: MA Experiment ID: 20001757 Result: Down-regulated in Transcription
  misc_feature: MA Experiment 20001757 PARAMETER Experiment Name: At_50mM_NH4NO3_L-to-H_P Parameter: Timepoint (hr) Value: 6
  misc_feature: MA Experiment 20001757 PARAMETER Experiment Name: At_50mM_NH4NO3_L-to-H_P Parameter: Tissue Value: Leaf
  misc_feature: MA Experiment 20001757 PARAMETER Experiment Name: At_50mM_NH4NO3_L-to-H_P Parameter: Treatment Value: 50mM NH4NO3 vs 100mM Mannitol
  misc_feature: MA Experiment ID: 20001911 Result: Up-regulated in Transcription
  misc_feature: MA Experiment 20001911 PARAMETER Experiment Name: At_Drought_Reproduction_P Parameter: Age (day) Value: 40
  misc_feature: MA Experiment 20001911 PARAMETER Experiment Name: At_Drought_Reproduction_P Parameter: Organism Value: A. thaliana
  misc_feature: MA Experiment 20001911 PARAMETER Experiment Name: At_Drought_Reproduction_P Parameter: Plant Line Value: WS
  misc_feature: MA Experiment 20001911 PARAMETER Experiment Name: At_Drought_Reproduction_P Parameter: Timepoint (day) Value: 10
  misc_feature: MA Experiment 20001911 PARAMETER Experiment Name: At_Drought_Reproduction_P Parameter: Tissue Value: Flowers
  misc_feature: MA Experiment 20001911 PARAMETER Experiment Name: At_Drought_Reproduction_P Parameter: Treatment Value: Drought vs. No Drought
aatttctcaataacgctctcagagagaccatttgatgaagcttctcgcttctggaatttgaaaaggaacttgttatggagataatctcactgaacgttgtgccccagtgctctgtggttacttggagtagtaaattagcaacgaaaagattggtcccaaatcggtcaagtttgttattctcaggggtcaaaaaatccagacttgtgattcgaagtggaaattccgatggttatgttgttggtgagaatgatgacttgggtcgtatagccagaagaggagaatcaacgtcaaaggttttgattcctggtttgcctgatgaatcaaatggtgaaattgctgctcgaatcagtcattctcactgcgagtggaagcccaagcttagagtacattatgagaaagccggttgtgacaatctcgatgctcctgcggtgttgtttcttcctggctttggcgttggttcatttcactatgagaagcagcttaccgatttgggaagggattatcgagtatgggctattgattttcttggacagggtttatctctccctactgaagatcctactaccatgactgaagaaaccagttcctcggaagataaggaaccattttggggatttggtgacaaaactgaaccgtgggctgatcaacttgtattctctctggatctctggagggatcaagttcagtattttgtagaagaggttatcggtgagcctgtgtacattgcagggaactcacttggagggtatgtagctctctactttgcagcaacccatcctcacctggttaagggtgttaccttgcttaatgcaacacctttctggggtttcttccctaatccagtaagatccccaaagctagcacgtctctttccatggcccggagcattccctctgccggaaagagtgaaaaaaatcacagaattggtgtggcaaaagataagtgatcctgaaagcatagctgagatacttaaacaggtctacacagaccattctatcaatgtggataaagtattctcacgtattgtggaggtcacacagcatccggctgctgcagcatcgtttgcttcaatcatgcttgctcctggtggagagctatctttctccgaagctttatctaggtgtaaggaaaacaatgttcagatatgtctcatgtatggaagagaagatccatgggtgagaccgttatggggaaagaagataaagaaggaaatccccaacgctccatactacgagatcagcccagcgggtcactgcccacacgatgaagtccctgaggtggtgaactatctgatgcgcgggtggatcaagcacctggagtctggtggttttgaagcgctcccgcttttggaggacactgaagaagattgggaggagtccaggattggtagagaaattgagttcccgagagatggttggaaaaaagcagtgaatctgtggttatatgggtcaaactatacgtactggagaggagttagagaatctttcagatccagttttataagggtgtttggagggaagtctgcatagaagaagcatggaacagtcgtctagtgtaaattaattgtaatctatgttgcatccgatgctagctatataatgttgtctgtagaatcaagtttctaaaatgttcaaaaggaaaagttagaaaaatatc

SEQ ID NO: 104780 - protein, 484 aa, Arabidopsis thaliana; identical to SEQ ID NO: 77954
  peptide (1)..(484): Ceres Seq. ID no. 13615724
  misc_feature (143)..(409): Pfam Name: alpha/beta hydrolase fold Pfam Description: alpha/beta hydrolase fold
  misc_feature (1)..(484): Homolog of NCBI NO: 15240707 NR Description: hydrolase, alpha/beta fold family [Arabidopsis >gi|30684593|ref|NP_850815.1| hydrolase, alpha/beta fold family thaliana] >gi|10177646|dbj|BAB11108.1|
  misc_feature (174)..(414): Homolog of NCBI NO: 37521904 NR Description: hypothetical protein gll2335 [Gloeobacter
  misc_feature (103)..(154): Homolog of NCBI NO: 37521904 NR Description: hypothetical protein gll2335 [Gloeobacter
  misc_feature (180)..(411): Homolog of NCBI NO: 23040754 NR Description: hypothetical protein [Trichodesmium erythraeum
  misc_feature (94)..(156): Homolog of NCBI NO: 23040754 NR Description: hypothetical protein [Trichodesmium erythraeum
  misc_feature (180)..(411): Homolog of NCBI NO: 16330114 NR Description: unknown protein [Synechocystis sp. PCC 6803]
  misc_feature (94)..(156): Homolog of NCBI NO: 16330114 NR Description: unknown protein [Synechocystis sp. PCC 6803]
  misc_feature (180)..(411): Homolog of NCBI NO: 23126297 NR Description: hypothetical protein [Nostoc punctiforme]
  misc_feature (91)..(156): Homolog of NCBI NO: 23126297 NR Description: hypothetical protein [Nostoc punctiforme]
  misc_feature (180)..(411): Homolog of NCBI NO: 17229548 NR Description: hypothetical protein [Nostoc sp. PCC 7120]

SEQ ID NO: 104781 - protein, 320 aa, Arabidopsis thaliana; identical to SEQ ID NO: 77955
  peptide (1)..(320): Ceres Seq. ID no. 13615725
  misc_feature (1)..(245): Pfam Name: alpha/beta hydrolase fold Pfam Description: alpha/beta hydrolase fold
  misc_feature (1)..(320): Homolog of NCBI NO: 15240707 NR Description: hydrolase, alpha/beta fold family [Arabidopsis >gi|30684593|ref|NP_850815.1| hydrolase, alpha/beta fold family thaliana] >gi|10177646|dbj|BAB11108.1|
  misc_feature (10)..(250): Homolog of NCBI NO: 37521904 NR Description: hypothetical protein gll2335 [Gloeobacter
  misc_feature (16)..(247): Homolog of NCBI NO: 23040754 NR Description: hypothetical protein [Trichodesmium erythraeum
  misc_feature (16)..(247): Homolog of NCBI NO: 16330114 NR Description: unknown protein [Synechocystis sp. PCC 6803]
  misc_feature (16)..(247): Homolog of NCBI NO: 23126297 NR Description: hypothetical protein [Nostoc punctiforme]
  misc_feature (16)..(247): Homolog of NCBI NO: 17229548 NR Description: hypothetical protein [Nostoc sp. PCC 7120]
  misc_feature (16)..(264): Homolog of NCBI NO: 15234433 NR Description: hydrolase, alpha/beta fold family [Arabidopsis
  misc_feature (16)..(264): Homolog of NCBI NO: 30690680 NR Description: hydrolase, alpha/beta fold family [Arabidopsis >gi|13877561|gb|AAK43858.1|AF370481_1 Unknown protein thaliana] >gi|30984538|gb|AAP42732.1| At4g36530 [Arabidopsis
  misc_feature (15)..(251): Homolog of NCBI NO: 37523246 NR Description: hypothetical protein gll3677 [Gloeobacter
  misc_feature (16)..(250): Homolog of NCBI NO: 33864695 NR Description: conserved hypothetical protein [Synechococcus sp.

SEQ ID NO: 104782 - DNA, 1534 bp, Arabidopsis thaliana
  misc_feature (1)..(1534): Ceres Seq. ID no. 13615726
  misc_feature: MA Experiment ID: 108434 Result: Down-regulated in Transcription
  misc_feature: MA Experiment 108434 PARAMETER Experiment Name: At_Root_Tips_cDNA_P Parameter: Tissue Value: Root Tips
  misc_feature: MA Experiment ID: 108488 Result: Down-regulated in Transcription
  misc_feature: MA Experiment ID: 108573 Result: Up-regulated in Transcription
  misc_feature: MA Experiment 108573 PARAMETER Experiment Name: At_Drought_cDNA_P Parameter: Timepoint (hr) Value: 6
  misc_feature: MA Experiment 108573 PARAMETER Experiment Name: At_Drought_cDNA_P Parameter: Tissue Value: Aerial
  misc_feature: MA Experiment 108573 PARAMETER Experiment Name: At_Drought_cDNA_P Parameter: Treatment Value: Drought vs. No Drought
  misc_feature: MA Experiment ID: 108577 Result: Up-regulated in Transcription
  misc_feature: MA Experiment 108577 PARAMETER Experiment Name: At_42deg_Heat_cDNA_P Parameter: Temperature (deg C) Value: 42 vs. 22
  misc_feature: MA Experiment 108577 PARAMETER Experiment Name: At_42deg_Heat_cDNA_P Parameter: Timepoint (hr) Value: 6
  misc_feature: MA Experiment 108577 PARAMETER Experiment Name: At_42deg_Heat_cDNA_P Parameter: Tissue Value: Aerial
  misc_feature: MA Experiment ID: 108585 Result: Up-regulated in Transcription
  misc_feature: MA Experiment 108585 PARAMETER Experiment Name: At_5mM_NaNP_cDNA_P Parameter: Timepoint (hr) Value: 6
  misc_feature: MA Experiment 108585 PARAMETER Experiment Name: At_5mM_NaNP_cDNA_P Parameter: Tissue Value: Aerial
  misc_feature: MA Experiment 108585 PARAMETER Experiment Name: At_5mM_NaNP_cDNA_P Parameter: Treatment Value: null
  misc_feature: MA Experiment ID: 20000111 Result: Up-regulated in Transcription
  misc_feature: MA Experiment 20000111 PARAMETER Experiment Name: At_42deg_Heat_cDNA_P Parameter: Temperature (deg C) Value: 42 vs. 22
  misc_feature: MA Experiment 20000111 PARAMETER Experiment Name: At_42deg_Heat_cDNA_P Parameter: Timepoint (hr) Value: 6
  misc_feature: MA Experiment 20000111 PARAMETER Experiment Name: At_42deg_Heat_cDNA_P Parameter: Tissue Value: Aerial
  misc_feature: MA Experiment ID: 20000112 Result: Up-regulated in Transcription
  misc_feature: MA Experiment 20000112 PARAMETER Experiment Name: At_42deg_Heat_cDNA_P Parameter: Temperature (deg C) Value: 42 vs. 22
  misc_feature: MA Experiment 20000112 PARAMETER Experiment Name: At_42deg_Heat_cDNA_P Parameter: Timepoint (hr) Value: 2
  misc_feature: MA Experiment 20000112 PARAMETER Experiment Name: At_42deg_Heat_cDNA_P Parameter: Tissue Value: Aerial
  misc_feature: MA Experiment ID: 20000173 Result: Up-regulated in Transcription
  misc_feature: MA Experiment 20000173 PARAMETER Experiment Name: At_42deg_Heat_P Parameter: Age (day) Value: 14
  misc_feature: MA Experiment 20000173 PARAMETER Experiment Name: At_42deg_Heat_P Parameter: Organism Value: A. thaliana
  misc_feature: MA Experiment 20000173 PARAMETER Experiment Name: At_42deg_Heat_P Parameter: Plant Line Value: WS
  misc_feature: MA Experiment 20000173 PARAMETER Experiment Name: At_42deg_Heat_P Parameter: Temperature (deg C) Value: 42 vs. 22
  misc_feature: MA Experiment 20000173 PARAMETER Experiment Name: At_42deg_Heat_P Parameter: Timepoint (hr) Value: 6
  misc_feature: MA Experiment 20000173 PARAMETER Experiment Name: At_42deg_Heat_P Parameter: Tissue Value: Aerial
  misc_feature: MA Experiment ID: 20000234 Result: Down-regulated in Transcription
  misc_feature: MA Experiment 20000234 PARAMETER Experiment Name: At_Siliques_P Parameter: Age (day) Value: 21
  misc_feature: MA Experiment 20000234 PARAMETER Experiment Name: At_Siliques_P Parameter: Organism Value: A. thaliana
  misc_feature: MA Experiment 20000234 PARAMETER Experiment Name: At_Siliques_P Parameter: Plant Line Value: WS
  misc_feature: MA Experiment 20000234 PARAMETER Experiment Name: At_Siliques_P Parameter: Tissue Value: Less Than 5mm Siliques vs. Whole Plant
  misc_feature: MA Experiment ID: 20000265 Result: Down-regulated in Transcription
  misc_feature: MA Experiment 20000265 PARAMETER Experiment Name: At_Open_Flower_P Parameter: Age (day) Value: 21
  misc_feature: MA Experiment 20000265 PARAMETER Experiment Name: At_Open_Flower_P Parameter: Plant Line Value: WS
  misc_feature: MA Experiment 20000265 PARAMETER Experiment Name: At_Open_Flower_P Parameter: Tissue Value: Closed Flower vs. Whole Plant
  misc_feature: MA Experiment ID: 20001560 Result: Down-regulated in Transcription
  misc_feature: MA Experiment 20001560 PARAMETER Experiment Name: At_Drought_Soil_Dry_P Parameter: Age (day) Value: 28
  misc_feature: MA Experiment 20001560 PARAMETER Experiment Name: At_Drought_Soil_Dry_P Parameter: Organism Value: A. thaliana
  misc_feature: MA Experiment 20001560 PARAMETER Experiment Name: At_Drought_Soil_Dry_P Parameter: Plant Line Value: WS
  misc_feature: MA Experiment 20001560 PARAMETER Experiment Name: At_Drought_Soil_Dry_P Parameter: Post Timepoint (hr) Value: None
  misc_feature: MA Experiment 20001560 PARAMETER Experiment Name: At_Drought_Soil_Dry_P Parameter: Post-Treatment Value: None
  misc_feature: MA Experiment 20001560 PARAMETER Experiment Name: At_Drought_Soil_Dry_P Parameter: Timepoint (day) Value: 14
  misc_feature: MA Experiment 20001560 PARAMETER Experiment Name: At_Drought_Soil_Dry_P Parameter: Treatment Value: Drought vs. No Drought
  misc_feature: MA Experiment ID: 20001905 Result: Up-regulated in Transcription
  misc_feature: MA Experiment 20001905 PARAMETER Experiment Name: At_Drought_Reproduction_P Parameter: Age (day) Value: 40
  misc_feature: MA Experiment 20001905 PARAMETER Experiment Name: At_Drought_Reproduction_P Parameter: Organism Value: A. thaliana
  misc_feature: MA Experiment 20001905 PARAMETER Experiment Name: At_Drought_Reproduction_P Parameter: Plant Line Value: WS
  misc_feature: MA Experiment 20001905 PARAMETER Experiment Name: At_Drought_Reproduction_P Parameter: Timepoint (day) Value: 10
  misc_feature: MA Experiment 20001905 PARAMETER Experiment Name: At_Drought_Reproduction_P Parameter: Tissue Value: Rosettes
  misc_feature: MA Experiment 20001905 PARAMETER Experiment Name: At_Drought_Reproduction_P Parameter: Treatment Value: Drought vs. No Drought
ataataattatatctttaaaaaaaaaacagaaaaattctttgctttgcaacaaaggcagacagacaaaaggctaattcggagctctcctccacatcttcttccaaaacacaaacaaacccccaaatttccagaaaaatcagatcattctttcatcaatctcgtcttctttaatcttaggtgagaattcatcagctcaaaaacgcagcacccgatcgttttacgactcaaatcagagaagctgattcttttccaatcattccaatttccatttcttccttgggaggtgatcgacgagttttacaccaaattagccgtcgaaaggggtgcttctttgatctaatttcgatggcgggattagagaaaaacgctgatttctcagggaagacgacgaaatcggctacaacgacgtcgttcttcaacaggtcgcttacaattcacggaagaacagtggtggattcgggccccaaatcccacaatctcaatccttctctcaatcgtaccacctccattaccaaattctacacccccgtagaatcgatgggaacttctcttaaaggcaaagtcaaaaacctttgtagattattcgagacttccaaacccgttaaacctgccttagctgagattcctcagaagcagaaatccggtaaatcccttttacccgaatcgcggatatcgcctttttcgagcttaaacaactcggtcatccgtcttcccgggacagaggacaggattgtggtgtattttactagcttgagagggattagacggacgtatgaggattgctatgctgtcagaatgatatttagagggtttcgggtttggatcgatgagcgcgacgtctccatggatatcgcttataggaaagagttgcagattgcaatgggagagaagtctgtgtctttgcctcaagttttcattatgggcaagtatgttggtggtgctgatgtgatcaagagtttgtttgagattggtgagcttgctaagattcttaaagagtttccaatgagacaaccagggtttgtttgccattgctgtggggacattcgatttgttccgtgttccaattgtagtggcagcaagaaactgtttgatgaggatgaagatagggtcaagagatgtcctgaatgcaatgagaatggattgatacgttgtcctgattgctcttcttgagatatatcatcaatgaacctgaaaaaaccattaaaaaaaagaagaaaaaagaggtatttatttctcttttgatgtttccattgttgtgtagaacagtgaatgatgctgccacaagtatccgaaaatctcttttggatcagcagcatttcactttgggttttttaaggtttgcgatcaacggtaatgggaatgccggtgatcgtggatttagtttatgtatgtgtttgctactaagggctaaatgtaattgtgtaatcaaaatgtctgaaacgggtagtaagcattttgactcttgtgtgtcaatgttgtgaaagacaactgtgttcttatgctatatatttgattgtaaatatttcgtgtgtt

SEQ ID NO: 104783 - protein, 274 aa, Arabidopsis thaliana; identical to SEQ ID NO: 40766
  peptide (1)..(274): Ceres Seq. ID no. 13615727
  misc_feature (128)..(215): Pfam Name: Glutaredoxin Pfam Description: Glutaredoxin
  misc_feature (1)..(274): Homolog of NCBI NO: 15240723 NR Description: expressed protein [Arabidopsis thaliana] contains similarity to unknown [Arabidopsis thaliana] >gi|14532460|gb|AAK63958.1|
  misc_feature (62)..(272): Homolog of NCBI NO: 15451042 NR Description: putative protein [Arabidopsis thaliana]
  misc_feature (62)..(272): Homolog of NCBI NO: 30694571 NR Description: expressed protein [Arabidopsis thaliana]
  misc_feature (126)..(272): Homolog of NCBI NO: 15227326 NR Description: expressed protein [Arabidopsis thaliana]
  misc_feature (129)..(274): Homolog of NCBI NO: 34899098 NR Description: hypothetical protein~similar to Arabidopsis
  misc_feature (120)..(272): Homolog of NCBI NO: 32490043 NR Description: OSJNBa0063C18.3 [Oryza sativa (japonica
  misc_feature (120)..(270): Homolog of NCBI NO: 10241626 NR Description: Contains similarity to F1N 19.7 [Oryza sativa
  misc_feature (15)..(273): Homolog of NCBI NO: 15237686 NR Description: expressed protein [Arabidopsis thaliana] emb|CAB72177.1~gene_id:MQJ2.15~similar to unknown protein thaliana] >gi|26449512|dbj|BAC41882.1| unknown protein
  misc_feature (124)..(273): Homolog of NCBI NO: 15223291 NR Description: expressed protein [Arabidopsis thaliana]
  misc_feature (123)..(273): Homolog of NCBI NO: 38346321 NR Description: OJ000126_13.3 [Oryza sativa (japonica

SEQ ID NO: 104784 - protein, 210 aa, Arabidopsis thaliana; identical to SEQ ID NO: 40767
  peptide (1)..(210): Ceres Seq. ID no. 13615728
  misc_feature (64)..(151): Pfam Name: Glutaredoxin Pfam Description: Glutaredoxin
  misc_feature (1)..(210): Homolog of NCBI NO: 15240723 NR Description: expressed protein [Arabidopsis thaliana] contains similarity to unknown [Arabidopsis thaliana] >gi|14532460|gb|AAK63958.1|
  misc_feature (1)..(208): Homolog of NCBI NO: 15451042 NR Description: putative protein [Arabidopsis thaliana]
  misc_feature (1)..(208): Homolog of NCBI NO: 30694571 NR Description: expressed protein [Arabidopsis thaliana]
  misc_feature (62)..(208): Homolog of NCBI NO: 15227326 NR Description: expressed protein [Arabidopsis thaliana]
  misc_feature (65)..(210): Homolog of NCBI NO: 34899098 NR Description: hypothetical protein~similar to Arabidopsis
  misc_feature (56)..(208): Homolog of NCBI NO: 32490043 NR Description: OSJNBa0063C18.3 [Oryza sativa (japonica
  misc_feature (56)..(206): Homolog of NCBI NO: 10241626 NR Description: Contains similarity to F1N 19.7 [Oryza sativa
  misc_feature (1)..(209): Homolog of NCBI NO: 15237686 NR Description: expressed protein [Arabidopsis thaliana] emb|CAB72177.1~gene_id:MQJ2.15~similar to unknown protein thaliana] >gi|26449512|dbj|BAC41882.1| unknown protein
  misc_feature (60)..(209): Homolog of NCBI NO: 15223291 NR Description: expressed protein [Arabidopsis thaliana]
  misc_feature (59)..(209): Homolog of NCBI NO: 38346321 NR Description: OJ000126_13.3 [Oryza sativa (japonica

SEQ ID NO: 104785 - DNA, 1535 bp, Arabidopsis thaliana
  misc_feature (1)..(1535): Ceres Seq. ID no. 13615742
  misc_feature: MA Experiment ID: 108434 Result: Up-regulated in Transcription
  misc_feature: MA Experiment 108434 PARAMETER Experiment Name: At_Root_Tips_cDNA_P Parameter: Tissue Value: Root Tips
  misc_feature: MA Experiment ID: 108462 Result: Down-regulated in Transcription
  misc_feature: MA Experiment 108462 PARAMETER Experiment Name: At_Germinating_Seeds_cDNA_P Parameter: Age (day) Value: 2 vs. 0
  misc_feature: MA Experiment 108462 PARAMETER Experiment Name: At_Germinating_Seeds_cDNA_P Parameter: Tissue Value: Germinating Seeds
  misc_feature: MA Experiment ID: 108463 Result: Down-regulated in Transcription
  misc_feature: MA Experiment 108463 PARAMETER Experiment Name: At_Germinating_Seeds_cDNA_P Parameter: Age (day) Value: 3 vs. 0
  misc_feature: MA Experiment 108463 PARAMETER Experiment Name: At_Germinating_Seeds_cDNA_P Parameter: Tissue Value: Germinating Seeds
  misc_feature: MA Experiment ID: 108464 Result: Down-regulated in Transcription
  misc_feature: MA Experiment 108464 PARAMETER Experiment Name: At_Germinating_Seeds_cDNA_P Parameter: Age (day) Value: 4 vs. 0
  misc_feature: MA Experiment 108464 PARAMETER Experiment Name: At_Germinating_Seeds_cDNA_P Parameter: Tissue Value: Germinating Seeds
aaacaaacagtttagcaaaagattttgagagggagaaaaagggcgatcgattagggtttttgtgttttcgtcttagtatcgaagatgatcggagctgtgaactcggtggaggctgtgataacgtcaatccaaggtttatcggggagtccagaggatttatctgcacttcacgatcttttgagaggagctcaagactcgctccgagccgaaccaggtgttaatttctctactcttgaccagctcgacgcctcgaagcactctctcggttacctgtatttccttgaggttcttacctgtggtccagtgtcgaaggagaaagctgcttatgagataccgataattgcacggttcatcaattcttgtgatgctgggcagattcgtttggcgagctataaatttgtatctctttgtaagatattgaaagaccatgttatagcactgggagatccgttgcgaggagtagggccactgttaaacgctgttcagaagcttcaggtctcctccaagcgtttgactgcattgcatccagatgttcttcaactctgtttgcaggcgaaatcgtacaaatctggtttctccattcttagtgatgatatcgtggagattgaccagccaagagacttttttctctatagctattatgggggaatgatttgtattggactgaagagatttcagaaagcattagagcttctttacaatgttgtgactgctcctatgcatcaagtcaatgccatagctcttgaggcgtacaaaaagtacatattggtgtctctcattcacaatgggcagtttactaacactctccccaagtgtgcttctacagcagcacagaggagcttcaagaactataccggaccttacattgaactgggtaattgttacaacgacgggaagattggtgaactagaggcattggttgtggccaggaatgcagaatttgaagaggataagaaccttggattagttaagcaagcagtgtcatccctttacaagcgtaacattctgagattgacacagaagtacttgaccctgtcgcttcaagatatagccaacatggtccaacttggtaatgctaaggaggcggaaatgcatgtgcttcagatgatccaggatggtcagatacatgcccttatcaaccagaaagacgggatggtcagattcttggaggaccctgagcagtacaaatctagtgagatgattgagatcatggattctgttatacaaaggactattggtctgtcgaagaatctcttagccatggatgagagcttatcatgtgaccctttatacttgggaaaggtaggaagggaaagacaaaggtacgactttggagacgatttcgatactgttcctcagaagttctccatgtaaacagcgaaagtcgagaagcaccaacaaaacttggctcaaagacaaccgtagtgtgaatcttgagaatgttacttttgatttctttgttcatttttgttggtttaaaaagtttcatatttttgtcacaattgccaacaagtagagaagaccattatggaccc

SEQ ID NO: 104786 - protein, 429 aa, Arabidopsis thaliana; identical to SEQ ID NO: 41473
  peptide (1)..(429): Ceres Seq. ID no. 13615743
  misc_feature (258)..(362): Pfam Name: PCI domain Pfam Description: PCI domain
  misc_feature (1)..(429): Homolog of NCBI NO: 18417330 NR Description: COP9 complex subunit 3, FUS11 [Arabidopsis >gi|14388969|gb|AAK61872.1| COP9 signalosome subunit 3 thaliana] >gi|14388971|gb|AAK61873.1| COP9 signalosome subunit 3
  misc_feature (1)..(429): Homolog of NCBI NO: 16930463 NR Description: AT5g14250/F18O22_40 [Arabidopsis thaliana]
  misc_feature (1)..(383): Homolog of NCBI NO: 11290078 NR Description: hypothetical protein F18O22.40 - Arabidopsis >gi|7573450|emb|CAB87764.1| putative protein [Arabidopsis
  misc_feature (189)..(409): Homolog of NCBI NO: 1001955 NR Description: unknown protein
  misc_feature (6)..(428): Homolog of NCBI NO: 6753488 NR Description: COP9 (constitutive photomorphogenic), subunit 3; (constitutive photomorphogenic), subunit 3 (Arabidopsis); COP9 S3 [Mus musculus] >gi|3309168|gb|AAC33900.1| COP9 complex subunit
  misc_feature (6)..(428): Homolog of NCBI NO: 23238222 NR Description: COP9 constitutive photomorphogenic homolog
  misc_feature (6)..(428): Homolog of NCBI NO: 34870793 NR Description: similar to COP9 constitutive photomorphogenic
  misc_feature (6)..(428): Homolog of NCBI NO: 27696965 NR Description: Similar to COP9 (constitutive photomorphogenic)
  misc_feature (6)..(406): Homolog of NCBI NO: 39795809 NR Description: Unknown (protein for MGC:77615) [Danio rerio]
  misc_feature (6)..(406): Homolog of NCBI NO: 28279587 NR Description: Similar to COP9 constitutive photomorphogenic

SEQ ID NO: 104787 - protein, 241 aa, Arabidopsis thaliana; identical to SEQ ID NO: 41474
  peptide (1)..(241): Ceres Seq. ID no. 13615744
  misc_feature (70)..(174): Pfam Name: PCI domain Pfam Description: PCI domain
  misc_feature (1)..(241): Homolog of NCBI NO: 18417330 NR Description: COP9 complex subunit 3, FUS11 [Arabidopsis >gi|14388969|gb|AAK61872.1| COP9 signalosome subunit 3 thaliana] >gi|14388971|gb|AAK61873.1| COP9 signalosome subunit 3
  misc_feature (1)..(241): Homolog of NCBI NO: 16930463 NR Description: AT5g14250/F18O22_40 [Arabidopsis thaliana]
  misc_feature (1)..(195): Homolog of NCBI NO: 11290078 NR Description: hypothetical protein F18O22.40 - Arabidopsis >gi|7573450|emb|CAB87764.1| putative protein [Arabidopsis
  misc_feature (1)..(221): Homolog of NCBI NO: 1001955 NR Description: unknown protein
  misc_feature (1)..(240): Homolog of NCBI NO: 6753488 NR Description: COP9 (constitutive photomorphogenic), subunit 3; (constitutive photomorphogenic), subunit 3 (Arabidopsis); COP9 S3 [Mus musculus] >gi|3309168|gb|AAC33900.1| COP9 complex subunit
  misc_feature (1)..(240): Homolog of NCBI NO: 23238222 NR Description: COP9 constitutive photomorphogenic homolog
  misc_feature (1)..(240): Homolog of NCBI NO: 34870793 NR Description: similar to COP9 constitutive photomorphogenic
  misc_feature (1)..(240): Homolog of NCBI NO: 27696965 NR Description: Similar to COP9 (constitutive photomorphogenic)
  misc_feature (1)..(218): Homolog of NCBI NO: 39795809 NR Description: Unknown (protein for MGC:77615) [Danio rerio]
  misc_feature (1)..(218): Homolog of NCBI NO: 28279587 NR Description: Similar to COP9 constitutive photomorphogenic

SEQ ID NO: 104788 - protein, 218 aa, Arabidopsis thaliana; identical to SEQ ID NO: 41475
  peptide (1)..(218): Ceres Seq. ID no. 13615745
  misc_feature (47)..(151): Pfam Name: PCI domain Pfam Description: PCI domain
  misc_feature (1)..(218): Homolog of NCBI NO: 18417330 NR Description: COP9 complex subunit 3, FUS11 [Arabidopsis >gi|14388969|gb|AAK61872.1| COP9 signalosome subunit 3 thaliana] >gi|14388971|gb|AAK61873.1| COP9 signalosome subunit 3
  misc_feature (1)..(218): Homolog of NCBI NO: 16930463 NR Description: AT5g14250/F18O22_40 [Arabidopsis thaliana]
  misc_feature (1)..(172): Homolog of NCBI NO: 11290078 NR Description: hypothetical protein F18O22.40 - Arabidopsis >gi|7573450|emb|CAB87764.1| putative protein [Arabidopsis
  misc_feature (1)..(198): Homolog of NCBI NO: 1001955 NR Description: unknown protein
  misc_feature (1)..(217): Homolog of NCBI NO: 6753488 NR Description: COP9 (constitutive photomorphogenic), subunit 3; (constitutive photomorphogenic), subunit 3 (Arabidopsis); COP9 S3 [Mus musculus] >gi|3309168|gb|AAC33900.1| COP9 complex subunit
  misc_feature (1)..(217): Homolog of NCBI NO: 23238222 NR Description: COP9 constitutive photomorphogenic homolog
  misc_feature (1)..(217): Homolog of NCBI NO: 34870793 NR Description: similar to COP9 constitutive photomorphogenic
  misc_feature (1)..(217): Homolog of NCBI NO: 27696965 NR Description: Similar to COP9 (constitutive photomorphogenic)
  misc_feature (1)..(195): Homolog of NCBI NO: 39795809 NR Description: Unknown (protein for MGC:77615) [Danio rerio]
  misc_feature (1)..(195): Homolog of NCBI NO: 28279587 NR Description: Similar to COP9 constitutive photomorphogenic

SEQ ID NO: 104789 - DNA, 1888 bp, Arabidopsis thaliana
  misc_feature (1)..(1888): Ceres Seq. ID no. 13615746
  misc_feature: MA Experiment ID: 108488 Result: Down-regulated in Transcription
  misc_feature: MA Experiment ID: 108561 Result: Up-regulated in Transcription
  misc_feature: MA Experiment 108561 PARAMETER Experiment Name: At_100uM_ABA_cDNA_P Parameter: Timepoint (hr) Value: 6
  misc_feature: MA Experiment 108561 PARAMETER Experiment Name: At_100uM_ABA_cDNA_P Parameter: Tissue Value: Aerial
  misc_feature: MA Experiment 108561 PARAMETER Experiment Name: At_100uM_ABA_cDNA_P Parameter: Treatment Value: 100uM ABA vs. No Treatment
  misc_feature: MA Experiment ID: 108569 Result: Up-regulated in Transcription
  misc_feature: MA Experiment 108569 PARAMETER Experiment Name: At_0.001%_MeJA__cDNA_P Parameter: Timepoint (hr) Value: 6
  misc_feature: MA Experiment 108569 PARAMETER Experiment Name: At_0.001%_MeJA__cDNA_P Parameter: Tissue Value: Aerial
  misc_feature: MA Experiment 108569 PARAMETER Experiment Name: At_0.001%_MeJA__cDNA_P Parameter: Treatment Value: 0.001% MeJA vs. No Treatment
  misc_feature: MA Experiment ID: 108573 Result: Up-regulated in Transcription
  misc_feature: MA Experiment 108573 PARAMETER Experiment Name: At_Drought_cDNA_P Parameter: Timepoint (hr) Value: 6
  misc_feature: MA Experiment 108573 PARAMETER Experiment Name: At_Drought_cDNA_P Parameter: Tissue Value: Aerial
  misc_feature: MA Experiment 108573 PARAMETER Experiment Name: At_Drought_cDNA_P Parameter: Treatment Value: Drought vs. No Drought
  misc_feature: MA Experiment ID: 108577 Result: Down-regulated in Transcription
  misc_feature: MA Experiment 108577 PARAMETER Experiment Name: At_42deg_Heat_cDNA_P Parameter: Temperature (deg C) Value: 42 vs. 22
  misc_feature: MA Experiment 108577 PARAMETER Experiment Name: At_42deg_Heat_cDNA_P Parameter: Timepoint (hr) Value: 6
  misc_feature: MA Experiment 108577 PARAMETER Experiment Name: At_42deg_Heat_cDNA_P Parameter: Tissue Value: Aerial
  misc_feature: MA Experiment ID: 108605 Result: Up-regulated in Transcription
  misc_feature: MA Experiment 108605 PARAMETER Experiment Name: At_100uM_ABA_cDNA_P Parameter: Timepoint (hr) Value: 6
  misc_feature: MA Experiment 108605 PARAMETER Experiment Name: At_100uM_ABA_cDNA_P Parameter: Tissue Value: Aerial
  misc_feature: MA Experiment 108605 PARAMETER Experiment Name: At_100uM_ABA_cDNA_P Parameter: Treatment Value: 100uM ABA vs. No Treatment
  misc_feature: MA Experiment ID: 108607 Result: Up-regulated in Transcription
  misc_feature: MA Experiment 108607 PARAMETER Experiment Name: At_100uM_ABA_cDNA_P Parameter: Timepoint (hr) Value: 4
  misc_feature: MA Experiment 108607 PARAMETER Experiment Name: At_100uM_ABA_cDNA_P Parameter: Tissue Value: Aerial
  misc_feature: MA Experiment 108607 PARAMETER Experiment Name: At_100uM_ABA_cDNA_P Parameter: Treatment Value: 100uM ABA vs. No Treatment
  misc_feature: MA Experiment ID: 108608 Result: Up-regulated in Transcription
  misc_feature: MA Experiment 108608 PARAMETER Experiment Name: At_100uM_ABA_cDNA_P Parameter: Timepoint (hr) Value: 1
  misc_feature: MA Experiment 108608 PARAMETER Experiment Name: At_100uM_ABA_cDNA_P Parameter: Tissue Value: Aerial
  misc_feature: MA Experiment 108608 PARAMETER Experiment Name: At_100uM_ABA_cDNA_P Parameter: Treatment Value: 100uM ABA vs. No Treatment
  misc_feature: MA Experiment ID: 108609 Result: Up-regulated in Transcription
  misc_feature: MA Experiment 108609 PARAMETER Experiment Name: At_100uM_ABA_cDNA_P Parameter: Timepoint (hr) Value: 24
  misc_feature: MA Experiment 108609 PARAMETER Experiment Name: At_100uM_ABA_cDNA_P Parameter: Tissue Value: Aerial
  misc_feature: MA Experiment 108609 PARAMETER Experiment Name: At_100uM_ABA_cDNA_P Parameter: Treatment Value: 100uM ABA vs. No Treatment
  misc_feature: MA Experiment ID: 108668 Result: Up-regulated in Transcription
  misc_feature: MA Experiment 108668 PARAMETER Experiment Name: At_2mM_SA_cDNA_P Parameter: Plant Line Value: WS
  misc_feature: MA Experiment 108668 PARAMETER Experiment Name: At_2mM_SA_cDNA_P Parameter: Timepoint (hr) Value: 6
  misc_feature: MA Experiment 108668 PARAMETER Experiment Name: At_2mM_SA_cDNA_P Parameter: Treatment Value: 2mM SA vs. No Treatment
  misc_feature: MA Experiment ID: 20000069 Result: Up-regulated in Transcription
  misc_feature: MA Experiment 20000069 PARAMETER Experiment Name: At_100uM_ABA_Mutants_cDNA_P Parameter: Plant Line Value: CS23
  misc_feature: MA Experiment 20000069 PARAMETER Experiment Name: At_100uM_ABA_Mutants_cDNA_P Parameter: Timepoint (hr) Value: 6
  misc_feature: MA Experiment 20000069 PARAMETER Experiment Name: At_100uM_ABA_Mutants_cDNA_P Parameter: Tissue Value: Aerial
  misc_feature: MA Experiment 20000069 PARAMETER Experiment Name: At_100uM_ABA_Mutants_cDNA_P Parameter: Treatment Value: 100uM ABA vs. No Treatment
  misc_feature: MA Experiment ID: 20000070 Result: Up-regulated in Transcription
  misc_feature: MA Experiment 20000070 PARAMETER Experiment Name: At_100uM_ABA_Mutants_cDNA_P Parameter: Plant Line Value: CS24
  misc_feature: MA Experiment 20000070 PARAMETER Experiment Name: At_100uM_ABA_Mutants_cDNA_P Parameter: Timepoint (hr) Value: 6
  misc_feature: MA Experiment 20000070 PARAMETER Experiment Name: At_100uM_ABA_Mutants_cDNA_P Parameter: Tissue Value: Aerial
  misc_feature: MA Experiment 20000070 PARAMETER Experiment Name: At_100uM_ABA_Mutants_cDNA_P Parameter: Treatment Value: 100uM ABA vs. No Treatment
  misc_feature: MA Experiment ID: 20000071 Result: Up-regulated in Transcription
  misc_feature: MA Experiment 20000071 PARAMETER Experiment Name: At_100uM_ABA_Mutants_cDNA_P Parameter: Plant Line Value: CS8104
  misc_feature: MA Experiment 20000071 PARAMETER Experiment Name: At_100uM_ABA_Mutants_cDNA_P Parameter: Timepoint (hr) Value: 6
  misc_feature: MA Experiment 20000071 PARAMETER Experiment Name: At_100uM_ABA_Mutants_cDNA_P Parameter: Tissue Value: Aerial
  misc_feature: MA Experiment 20000071 PARAMETER Experiment Name: At_100uM_ABA_Mutants_cDNA_P Parameter: Treatment Value: 100uM ABA vs. No Treatment
  misc_feature: MA Experiment ID: 20000072 Result: Up-regulated in Transcription
  misc_feature: MA Experiment 20000072 PARAMETER Experiment Name: At_100uM_ABA_Mutants_cDNA_P Parameter: Plant Line Value: CS8105
  misc_feature: MA Experiment 20000072 PARAMETER Experiment Name: At_100uM_ABA_Mutants_cDNA_P Parameter: Timepoint (hr) Value: 6
  misc_feature: MA Experiment 20000072 PARAMETER Experiment Name: At_100uM_ABA_Mutants_cDNA_P Parameter: Tissue Value: Aerial
  misc_feature: MA Experiment 20000072 PARAMETER Experiment Name: At_100uM_ABA_Mutants_cDNA_P Parameter: Treatment Value: 100uM ABA vs. No Treatment
  misc_feature: MA Experiment ID: 20000088 Result: Up-regulated in Transcription
  misc_feature: MA Experiment 20000088 PARAMETER Experiment Name: At_100uM_ABA_Mutants_cDNA_P Parameter: Plant Line Value: Landsberg
  misc_feature: MA Experiment 20000088 PARAMETER Experiment Name: At_100uM_ABA_Mutants_cDNA_P Parameter: Timepoint (hr) Value: 6
  misc_feature: MA Experiment 20000088 PARAMETER Experiment Name: At_100uM_ABA_Mutants_cDNA_P Parameter: Tissue Value: Aerial
  misc_feature: MA Experiment 20000088 PARAMETER Experiment Name: At_100uM_ABA_Mutants_cDNA_P Parameter: Treatment Value: 100uM ABA vs. No Treatment
  misc_feature: MA Experiment ID: 20000112 Result: Down-regulated in Transcription
  misc_feature: MA Experiment 20000112 PARAMETER Experiment Name: At_42deg_Heat_cDNA_P Parameter: Temperature (deg C) Value: 42 vs. 22
  misc_feature: MA Experiment 20000112 PARAMETER Experiment Name: At_42deg_Heat_cDNA_P Parameter: Timepoint (hr) Value: 2
  misc_feature: MA Experiment 20000112 PARAMETER Experiment Name: At_42deg_Heat_cDNA_P Parameter: Tissue Value: Aerial
  misc_feature: MA Experiment ID: 20000113 Result: Down-regulated in Transcription
  misc_feature: MA Experiment 20000113 PARAMETER Experiment Name: At_42deg_Heat_cDNA_P Parameter: Temperature (deg C) Value: 42 vs. 22
  misc_feature: MA Experiment 20000113 PARAMETER Experiment Name: At_42deg_Heat_cDNA_P Parameter: Timepoint (hr) Value: 8
  misc_feature: MA Experiment 20000113 PARAMETER Experiment Name: At_42deg_Heat_cDNA_P Parameter: Tissue Value: Aerial
  misc_feature: MA Experiment ID: 20000144 Result: Down-regulated in Transcription
  misc_feature: MA Experiment 20000144 PARAMETER Experiment Name: At_42deg_Heat_cDNA_P Parameter: Temperature (deg C) Value: 42 vs. 22
  misc_feature: MA Experiment 20000144 PARAMETER Experiment Name: At_42deg_Heat_cDNA_P Parameter: Timepoint (hr) Value: 1
  misc_feature: MA Experiment 20000144 PARAMETER Experiment Name: At_42deg_Heat_cDNA_P Parameter: Tissue Value: Aerial
  misc_feature: MA Experiment ID: 20000166 Result: Up-regulated in Transcription
  misc_feature: MA Experiment 20000166 PARAMETER Experiment Name: At_100uM_ABA_P Parameter: Age (day) Value: 14
  misc_feature: MA Experiment 20000166 PARAMETER Experiment Name: At_100uM_ABA_P Parameter: Organism Value: A. thaliana
  misc_feature: MA Experiment 20000166 PARAMETER Experiment Name: At_100uM_ABA_P Parameter: Plant Line Value: WS
  misc_feature: MA Experiment 20000166 PARAMETER Experiment Name: At_100uM_ABA_P Parameter: Timepoint (hr) Value: 1
  misc_feature: MA Experiment 20000166 PARAMETER Experiment Name: At_100uM_ABA_P Parameter: Tissue Value: Aerial
  misc_feature: MA Experiment 20000166 PARAMETER Experiment Name: At_100uM_ABA_P Parameter: Treatment Value: 100uM ABA vs. No Treatment
  misc_feature: MA Experiment ID: 20000169 Result: Up-regulated in Transcription
  misc_feature: MA Experiment 20000169 PARAMETER Experiment Name: At_100uM_ABA_P Parameter: Age (day) Value: 14
  misc_feature: MA Experiment 20000169 PARAMETER Experiment Name: At_100uM_ABA_P Parameter: Organism Value: A. thaliana
  misc_feature: MA Experiment 20000169 PARAMETER Experiment Name: At_100uM_ABA_P Parameter: Plant Line Value: WS
  misc_feature: MA Experiment 20000169 PARAMETER Experiment Name: At_100uM_ABA_P Parameter: Timepoint (hr) Value: 6
  misc_feature: MA Experiment 20000169 PARAMETER Experiment Name: At_100uM_ABA_P Parameter: Tissue Value: Aerial
  misc_feature: MA Experiment 20000169 PARAMETER Experiment Name: At_100uM_ABA_P Parameter: Treatment Value: 100uM ABA vs. No Treatment
  misc_feature: MA Experiment ID: 20000171 Result: Down-regulated in Transcription
  misc_feature: MA Experiment 20000171 PARAMETER Experiment Name: At_42deg_Heat_P Parameter: Age (day) Value: 14
  misc_feature: MA Experiment 20000171 PARAMETER Experiment Name: At_42deg_Heat_P Parameter: Organism Value: A. thaliana
  misc_feature: MA Experiment 20000171 PARAMETER Experiment Name: At_42deg_Heat_P Parameter: Plant Line Value: WS
  misc_feature: MA Experiment 20000171 PARAMETER Experiment Name: At_42deg_Heat_P Parameter: Temperature (deg C) Value: 42 vs. 22
  misc_feature: MA Experiment 20000171 PARAMETER Experiment Name: At_42deg_Heat_P Parameter: Timepoint (hr) Value: 1
  misc_feature: MA Experiment 20000171 PARAMETER Experiment Name: At_42deg_Heat_P Parameter: Tissue Value: Aerial
  misc_feature: MA Experiment ID: 20000182 Result: Up-regulated in Transcription
  misc_feature: MA Experiment 20000182 PARAMETER Experiment Name: At_2mM_SA_P Parameter: Age (day) Value: 14
  misc_feature: MA Experiment 20000182 PARAMETER Experiment Name: At_2mM_SA_P Parameter: Organism Value: A. thaliana
  misc_feature: MA Experiment 20000182 PARAMETER Experiment Name: At_2mM_SA_P Parameter: Plant Line Value: WS
  misc_feature: MA Experiment 20000182 PARAMETER Experiment Name: At_2mM_SA_P Parameter: Timepoint (hr) Value: 6
  misc_feature: MA Experiment 20000182 PARAMETER Experiment Name: At_2mM_SA_P Parameter: Tissue Value: Aerial
  misc_feature: MA Experiment 20000182 PARAMETER Experiment Name: At_2mM_SA_P Parameter: Treatment Value: 2mM SA vs. No Treatment
  misc_feature: MA Experiment ID: 20000224 Result: Up-regulated in Transcription
  misc_feature: MA Experiment ID: 20000268 Result: Up-regulated in Transcription
  misc_feature: MA Experiment 20000268 PARAMETER Experiment Name: At_100mM_NaCl__P Parameter: Age (day) Value: 14
  misc_feature: MA Experiment 20000268 PARAMETER Experiment Name: At_100mM_NaCl__P Parameter: Organism Value: A. thaliana
  misc_feature: MA Experiment 20000268 PARAMETER Experiment Name: At_100mM_NaCl__P Parameter: Plant Line Value: WS
  misc_feature: MA Experiment 20000268 PARAMETER Experiment Name: At_100mM_NaCl__P Parameter: Timepoint (hr) Value: 6
  misc_feature: MA Experiment 20000268 PARAMETER Experiment Name: At_100mM_NaCl__P Parameter: Tissue Value: Whole Plant
  misc_feature: MA Experiment 20000268 PARAMETER Experiment Name: At_100mM_NaCl__P Parameter: Treatment Value: 100mM NaCl vs. No Treatment
  misc_feature: MA Experiment ID: 20000436 Result: Up-regulated in Transcription
  misc_feature: MA Experiment 20000436 PARAMETER Experiment Name: At_Drought_P Parameter: Age (day) Value: 7
  misc_feature: MA Experiment 20000436 PARAMETER Experiment Name: At_Drought_P Parameter: Organism Value: A. thaliana
  misc_feature: MA Experiment 20000436 PARAMETER Experiment Name: At_Drought_P Parameter: Plant Line Value: WS
  misc_feature: MA Experiment 20000436 PARAMETER Experiment Name: At_Drought_P Parameter: Timepoint (hr) Value: 12
  misc_feature: MA Experiment 20000436 PARAMETER Experiment Name: At_Drought_P Parameter: Tissue Value: Whole Plant
  misc_feature: MA Experiment 20000436 PARAMETER Experiment Name: At_Drought_P Parameter: Treatment Value: Drought vs. No Drought
  misc_feature: MA Experiment ID: 20000437 Result: Up-regulated in Transcription
  misc_feature: MA Experiment 20000437 PARAMETER Experiment Name: At_Drought_P Parameter: Age (day) Value: 8
  misc_feature: MA Experiment 20000437 PARAMETER Experiment Name: At_Drought_P Parameter: Organism Value: A. thaliana
  misc_feature: MA Experiment 20000437 PARAMETER Experiment Name: At_Drought_P Parameter: Plant Line Value: WS
  misc_feature: MA Experiment 20000437 PARAMETER Experiment Name: At_Drought_P Parameter: Timepoint (hr) Value: 24
  misc_feature: MA Experiment 20000437 PARAMETER Experiment Name: At_Drought_P Parameter: Tissue Value: Whole Plant
  misc_feature: MA Experiment 20000437 PARAMETER Experiment Name: At_Drought_P Parameter: Treatment Value: Drought vs. No Drought
  misc_feature: MA Experiment ID: 20000453 Result: Up-regulated in Transcription
  misc_feature: MA Experiment 20000453 PARAMETER Experiment Name: At_100uM_ABA_P Parameter: Age (day) Value: 15
  misc_feature: MA Experiment 20000453 PARAMETER Experiment Name: At_100uM_ABA_P Parameter: Organism Value: A. thaliana
  misc_feature: MA Experiment 20000453 PARAMETER Experiment Name: At_100uM_ABA_P Parameter: Plant Line Value: WS
  misc_feature: MA Experiment 20000453 PARAMETER Experiment Name: At_100uM_ABA_P Parameter: Timepoint (hr) Value: 24
  misc_feature: MA Experiment 20000453 PARAMETER Experiment Name: At_100uM_ABA_P Parameter: Tissue Value: Aerial
  misc_feature: MA Experiment 20000453 PARAMETER Experiment Name: At_100uM_ABA_P Parameter: Treatment Value: 100uM ABA vs. No Treatment
  misc_feature: MA Experiment ID: 20000455 Result: Up-regulated in Transcription
  misc_feature: MA Experiment 20000455 PARAMETER Experiment Name: At_100uM_ABA_P Parameter: Age (day) Value: 16
  misc_feature: MA Experiment 20000455 PARAMETER Experiment Name: At_100uM_ABA_P Parameter: Organism Value: A. thaliana
  misc_feature: MA Experiment 20000455 PARAMETER Experiment Name: At_100uM_ABA_P Parameter: Plant Line Value: WS
  misc_feature: MA Experiment 20000455 PARAMETER Experiment Name: At_100uM_ABA_P Parameter: Timepoint (hr) Value: 48
  misc_feature: MA Experiment 20000455 PARAMETER Experiment Name: At_100uM_ABA_P Parameter: Tissue Value: Aerial
  misc_feature: MA Experiment 20000455 PARAMETER Experiment Name: At_100uM_ABA_P Parameter: Treatment Value: 100uM ABA vs. No Treatment
  misc_feature: MA Experiment ID: 20001554 Result: Up-regulated in Transcription
  misc_feature: MA Experiment 20001554 PARAMETER Experiment Name: At_Drought_Soil_Dry_P Parameter: Age (day) Value: 21
  misc_feature: MA Experiment 20001554 PARAMETER Experiment Name: At_Drought_Soil_Dry_P Parameter: Organism Value: A. thaliana
  misc_feature: MA Experiment 20001554 PARAMETER Experiment Name: At_Drought_Soil_Dry_P Parameter: Plant Line Value: WS
  misc_feature: MA Experiment 20001554 PARAMETER Experiment Name: At_Drought_Soil_Dry_P Parameter: Post Timepoint (hr) Value: None
  misc_feature: MA Experiment 20001554 PARAMETER Experiment Name: At_Drought_Soil_Dry_P Parameter: Post-Treatment Value: None
  misc_feature: MA Experiment 20001554 PARAMETER Experiment Name: At_Drought_Soil_Dry_P Parameter: Timepoint (day) Value: 7
  misc_feature: MA Experiment 20001554 PARAMETER Experiment Name: At_Drought_Soil_Dry_P Parameter: Treatment Value: Drought vs. No Drought
  misc_feature: MA Experiment ID: 20001555 Result: Up-regulated in Transcription
  misc_feature: MA Experiment 20001555 PARAMETER Experiment Name: At_Drought_Soil_Dry_P Parameter: Age (day) Value: 24
  misc_feature: MA Experiment 20001555 PARAMETER Experiment Name: At_Drought_Soil_Dry_P Parameter: Organism Value: A. thaliana
  misc_feature: MA Experiment 20001555 PARAMETER Experiment Name: At_Drought_Soil_Dry_P Parameter: Plant Line Value: WS
  misc_feature: MA Experiment 20001555 PARAMETER Experiment Name: At_Drought_Soil_Dry_P Parameter: Post Timepoint (hr) Value: None
  misc_feature: MA Experiment 20001555 PARAMETER Experiment Name: At_Drought_Soil_Dry_P Parameter: Post-Treatment Value: None
  misc_feature: MA Experiment 20001555 PARAMETER Experiment Name: At_Drought_Soil_Dry_P Parameter: Timepoint (day) Value: 10
  misc_feature: MA Experiment 20001555 PARAMETER Experiment Name: At_Drought_Soil_Dry_P Parameter: Treatment Value: Drought vs. No Drought
  misc_feature: MA Experiment ID: 20001559 Result: Up-regulated in Transcription
  misc_feature: MA Experiment 20001559 PARAMETER Experiment Name: At_Drought_Soil_Dry_P Parameter: Age (day) Value: 28
  misc_feature: MA Experiment 20001559 PARAMETER Experiment Name: At_Drought_Soil_Dry_P Parameter: Organism Value: A. thaliana
  misc_feature: MA Experiment 20001559 PARAMETER Experiment Name: At_Drought_Soil_Dry_P Parameter: Plant Line Value: WS
  misc_feature: MA Experiment 20001559 PARAMETER Experiment Name: At_Drought_Soil_Dry_P Parameter: Post Timepoint (hr) Value: 29
  misc_feature: MA Experiment 20001559 PARAMETER Experiment Name: At_Drought_Soil_Dry_P Parameter: Post-Treatment Value: Re-Water vs. No Drought
  misc_feature: MA Experiment 20001559 PARAMETER Experiment Name: At_Drought_Soil_Dry_P Parameter: Timepoint (day) Value: 14
  misc_feature: MA Experiment 20001559 PARAMETER Experiment Name: At_Drought_Soil_Dry_P Parameter: Treatment Value: Drought vs. No Drought
  misc_feature: MA Experiment ID: 20001904 Result: Up-regulated in Transcription
  misc_feature: MA Experiment 20001904 PARAMETER Experiment Name: At_Drought_Reproduction_P Parameter: Age (day) Value: 37
  misc_feature: MA Experiment 20001904 PARAMETER Experiment Name: At_Drought_Reproduction_P Parameter: Organism Value: A. thaliana
  misc_feature: MA Experiment 20001904 PARAMETER Experiment Name: At_Drought_Reproduction_P Parameter: Plant Line Value: WS
  misc_feature: MA Experiment 20001904 PARAMETER Experiment Name: At_Drought_Reproduction_P Parameter: Timepoint (day) Value: 7
  misc_feature: MA Experiment 20001904 PARAMETER Experiment Name: At_Drought_Reproduction_P Parameter: Tissue Value: Rosettes
  misc_feature: MA Experiment 20001904 PARAMETER Experiment Name: At_Drought_Reproduction_P Parameter: Treatment Value: Drought vs. No Drought
  misc_feature: MA Experiment ID: 20001905 Result: Up-regulated in Transcription
  misc_feature: MA Experiment 20001905 PARAMETER Experiment Name: At_Drought_Reproduction_P Parameter: Age (day) Value: 40
  misc_feature: MA Experiment 20001905 PARAMETER Experiment Name: At_Drought_Reproduction_P Parameter: Organism Value: A. thaliana
  misc_feature: MA Experiment 20001905 PARAMETER Experiment Name: At_Drought_Reproduction_P Parameter: Plant Line Value: WS
  misc_feature: MA Experiment 20001905 PARAMETER Experiment Name: At_Drought_Reproduction_P Parameter: Timepoint (day) Value: 10
  misc_feature: MA Experiment 20001905 PARAMETER Experiment Name: At_Drought_Reproduction_P Parameter: Tissue Value: Rosettes
  misc_feature: MA Experiment 20001905 PARAMETER Experiment Name: At_Drought_Reproduction_P Parameter: Treatment Value: Drought vs. No Drought
  misc_feature: MA Experiment ID: 20001906 Result: Up-regulated in Transcription
  misc_feature: MA Experiment 20001906 PARAMETER Experiment Name: At_Drought_Reproduction_P Parameter: Age (day) Value: 35
  misc_feature: MA Experiment 20001906 PARAMETER Experiment Name: At_Drought_Reproduction_P Parameter: Organism Value: A. thaliana
  misc_feature: MA Experiment 20001906 PARAMETER Experiment Name: At_Drought_Reproduction_P Parameter: Plant Line Value: WS
  misc_feature: MA Experiment 20001906 PARAMETER Experiment Name: At_Drought_Reproduction_P Parameter: Timepoint (day) Value: 5
  misc_feature: MA Experiment 20001906 PARAMETER Experiment Name: At_Drought_Reproduction_P Parameter: Tissue Value: Siliques
  misc_feature: MA Experiment 20001906 PARAMETER Experiment Name: At_Drought_Reproduction_P Parameter: Treatment Value: Drought vs. No Drought
  misc_feature: MA Experiment ID: 20001908 Result: Up-regulated in Transcription
  misc_feature: MA Experiment 20001908 PARAMETER Experiment Name: At_Drought_Reproduction_P Parameter: Age (day) Value: 40
  misc_feature: MA Experiment 20001908 PARAMETER Experiment Name: At_Drought_Reproduction_P Parameter: Organism Value: A. thaliana
  misc_feature: MA Experiment 20001908 PARAMETER Experiment Name: At_Drought_Reproduction_P Parameter: Plant Line Value: WS
  misc_feature: MA Experiment 20001908 PARAMETER Experiment Name: At_Drought_Reproduction_P Parameter: Timepoint (day) Value: 10
  misc_feature: MA Experiment 20001908 PARAMETER Experiment Name: At_Drought_Reproduction_P Parameter: Tissue Value: Siliques
  misc_feature: MA Experiment 20001908 PARAMETER Experiment Name: At_Drought_Reproduction_P Parameter: Treatment Value: Drought vs. No Drought
  misc_feature: MA Experiment ID: 20001911 Result: Up-regulated in Transcription
  misc_feature: MA Experiment 20001911 PARAMETER Experiment Name: At_Drought_Reproduction_P Parameter: Age (day) Value: 40
  misc_feature: MA Experiment 20001911 PARAMETER Experiment Name: At_Drought_Reproduction_P Parameter: Organism Value: A. thaliana
  misc_feature: MA Experiment 20001911 PARAMETER Experiment Name: At_Drought_Reproduction_P Parameter: Plant Line Value: WS
  misc_feature: MA Experiment 20001911 PARAMETER Experiment Name: At_Drought_Reproduction_P Parameter: Timepoint (day) Value: 10
  misc_feature: MA Experiment 20001911 PARAMETER Experiment Name: At_Drought_Reproduction_P Parameter: Tissue Value: Flowers
  misc_feature: MA Experiment 20001911 PARAMETER Experiment Name: At_Drought_Reproduction_P Parameter: Treatment Value: Drought vs. No Drought
accaccgtgataaaacagtcctctccatttctctactcaacatccatccgaaccaactcgaagatattatttttcatggattgagcaaagaagaggacgataatttcgaaaatatcgcgatacaatggacaagttctcgtacaattcgtatccagattcagctgaatcgtcgccaagatctcgcgatgtcgaatttgaaaatccgtcgccatgggaggaccagcagcagcagaactacaaggtgaagctcatgtgcagctatggcggcaagatccagcctcgtccacacgataaccagcttacttatgtaaacggcgataccaaaatcatgtcggtcgatcgtggtatcagatttccggctttagtatcgaagctctccgccgtctgcagcggtggtggtgatggaggagaaatctcgttcaagtatcagcttccaggtgaagatctagatgcgttgatttcggtgactaatgatgaggatctggagcacatgatgcatgagtacgatcggttgcttcgtttgtctactaaaccagctaggatgcgtttgtttctcttcccgtcttctcccatttccggcggatttggctccgaaggttcgactaaatcggatcgggatacgcttaatccaatccctagccgacctgaatcggagaaatctgtaaccgctcctccgaataatgctgatttcttgtttggatcggagaaagtagctccaattccgccgtcgccagtgaaggttcctcaaccggtaccggaaccagtggtgcttgaaccgccgcagatgttcgtagatcaacggatgttacaaccggaacacggcgtaaatccggcggagattcaaagacaaatccaggaatttcagatgattcaaatcagagaccaagagcaacaaatgcttcatcagaatcagctacatcaacaacaacaacaacaagaggctatacatcaaaatcagcttcatcaccaacaagaggttatacatcagaatcagctgcttcaacaagaggctatacatcagaatcagatgcttcaacaacaacaacaacaagaggctatgtacagaagaaaaaccgaagacgaagccggaagatacttccctcccacatacactcaaaatccggcgccggtgacgaatcaacaacctccggttggctactggcaaggaaacaccaacaacagtaatattcaggggaatatctacacaacaacgtcacagaatctaccggagcaacaacaacaacaacaacaagtatacatgattccagctcaatctcaagctccagggacattataccaaagcgtcatgagaccaacggtacaaggaaaccaaggttattacccatcacctgttcagcgacttcatcatcctgatgcatacatggaacagcagaaccagccaggttacaacgtggttcaaccacagccaacgttttcaggtggtccacaagttatgactagtgttggtccgcaagttatgactagtgtcggtcctccaatggggttacaggaaccttattcacagatggggaagcctgtgtactatacggtggctggagaaggcatgatggttcaaccgccaccagcccagcctcagcagcagcagcagcagtaccagggaatgggtcaaccggttagtggcatgaccgatctcagaaccggaccggatgggaaagtggcggttaacatggctgcaccacaagtttcagattcggtgtgagtgtgagattgagttaacattgaggttaatgttatgattatccatttctttaaactttatgatatatgtgtaaaagtgtttttttagatcaaactaggaatctggatttctgatgaatcaattgaagcacttttgatgtttttattttattttattttggtaaacttc

SEQ ID NO: 104790 - protein, 531 aa, Arabidopsis thaliana
  peptide (1)..(531): Ceres Seq. ID no. 13615747
  misc_feature (54)..(147): Pfam Name: PB1 domain Pfam Description: PB1 domain
  misc_feature (1)..(531): Homolog of NCBI NO: 15242462 NR Description: octicosapeptide/Phox/Bem1p (PB1) protein [Arabidopsis thaliana] >gi|11357503|pir||T49936
  misc_feature (1)..(476): Homolog of NCBI NO: 15237703 NR Description: octicosapeptide/Phox/Bem1p (PB1) protein [Arabidopsis thaliana] >gi|10178224|dbj|BAB11604.1| similarity to unknown protein~gb|AAD14519.1~gene_id:T12B11.2
  misc_feature (7)..(192): Homolog of NCBI NO: 21553908 NR Description: unknown [Arabidopsis thaliana]
  misc_feature (7)..(192): Homolog of NCBI NO: 18379168 NR Description: octicosapeptide/Phox/Bem1p (PB1) protein [Arabidopsis thaliana] >gi|17979119|gb|AAL49817.1| protein [Arabidopsis thaliana] >gi|20197587|gb|AAD14519.2|
  misc_feature (43)..(172): Homolog of NCBI NO: 25410886 NR Description: hypothetical protein At2g01190 [imported] -
  misc_feature (37)..(213): Homolog of NCBI NO: 9293928 NR Description: gb|AAF04880.1~gene_id:MFE16.2~similar to unknown
  misc_feature (37)..(213): Homolog of NCBI NO: 15231568 NR Description: octicosapeptide/Phox/Bem1p (PB1)
  misc_feature (9)..(168): Homolog of NCBI NO: 34895646 NR Description: P0480E02.2 [Oryza sativa (japonica
  misc_feature (269)..(528): Homolog of NCBI NO: 15237703 NR Description: octicosapeptide/Phox/Bem1p (PB1) protein [Arabidopsis thaliana] >gi|10178224|dbj|BAB11604.1| similarity to unknown protein~gb|AAD14519.1~gene_id:T12B11.2
  misc_feature (13)..(175): Homolog of NCBI NO: 25407315 NR Description: hypothetical protein AT4g05150 [imported] - thaliana >gi|7267274|emb|CAB81057.1| putative protein
MDKFSYNSYPDSAESSPRSRDVEFENPSPWEDQQQQNYKVKLMCSYGGKIQPRPHDNQLTYVNGDTKIMSVDRGIRFPALVSKLSAVCSGGGDGGEISFKYQLPGEDLDALISVTNDEDLEHMMHEYDRLLRLSTKPARMRLFLFPSSPISGGFGSEGSTKSDRDTLNPIPSRPESEKSVTAPPNNADFLFGSEKVAPIPPSPVKVPQPVPEPVVLEPPQMFVDQRMLQPEHGVNPAEIQRQIQEFQMIQIRDQEQQMLHQNQLHQQQQQQEAIHQNQLHHQQEVIHQNQLLQQEAIHQNQMLQQQQQQEAMYRRKTEDEAGRYFPPTYTQNPAPVTNQQPPVGYWQGNTNNSNIQGNIYTTTSQNLPEQQQQQQQVYMIPAQSQAPGTLYQSVMRPTVQGNQGYYPSPVQRLHHPDAYMEQQNQPGYNVVQPQPTFSGGPQVMTSVGPQVMTSVGPPMGLQEPYSQMGKPVYYTVAGEGMMVQPPPAQPQQQQQQYQGMGQPVSGMTDLRTGPDGKVAVNMAAPQVSDSV

SEQ ID NO: 104791 - protein, 489 aa, Arabidopsis thaliana
  peptide (1)..(489): Ceres Seq. ID no. 13615748
  misc_feature (12)..(105): Pfam Name: PB1 domain Pfam Description: PB1 domain
  misc_feature (1)..(489): Homolog of NCBI NO: 15242462 NR Description: octicosapeptide/Phox/Bem1p (PB1) protein [Arabidopsis thaliana] >gi|11357503|pir||T49936
  misc_feature (1)..(434): Homolog of NCBI NO: 15237703 NR Description: octicosapeptide/Phox/Bem1p (PB1) protein [Arabidopsis thaliana] >gi|10178224|dbj|BAB11604.1| similarity to unknown protein~gb|AAD14519.1~gene_id:T12B11.2
  misc_feature (1)..(150): Homolog of NCBI NO: 21553908 NR Description: unknown [Arabidopsis thaliana]
  misc_feature (1)..(150): Homolog of NCBI NO: 18379168 NR Description: octicosapeptide/Phox/Bem1p (PB1) protein [Arabidopsis thaliana] >gi|17979119|gb|AAL49817.1| protein [Arabidopsis thaliana] >gi|20197587|gb|AAD14519.2|
  misc_feature (1)..(130): Homolog of NCBI NO: 25410886 NR Description: hypothetical protein At2g01190 [imported] -
  misc_feature (1)..(171): Homolog of NCBI NO: 9293928 NR Description: gb|AAF04880.1~gene_id:MFE16.2~similar to unknown
  misc_feature (1)..(171): Homolog of NCBI NO: 15231568 NR Description: octicosapeptide/Phox/Bem1p (PB1)
  misc_feature (1)..(126): Homolog of NCBI NO: 34895646 NR Description: P0480E02.2 [Oryza sativa (japonica
  misc_feature (227)..(486): Homolog of NCBI NO: 15237703 NR Description: octicosapeptide/Phox/Bem1p (PB1) protein [Arabidopsis thaliana] >gi|10178224|dbj|BAB11604.1| similarity to unknown protein~gb|AAD14519.1~gene_id:T12B11.2
  misc_feature (1)..(133): Homolog of NCBI NO: 25407315 NR Description: hypothetical protein AT4g05150 [imported] - thaliana >gi|7267274|emb|CAB81057.1| putative protein
MCSYGGKIQPRPHDNQLTYVNGDTKIMSVDRGIRFPALVSKLSAVCSGGGDGGEISFKYQLPGEDLDALISVTNDEDLEHMMHEYDRLLRLSTKPARMRLFLFPSSPISGGFGSEGSTKSDRDTLNPIPSRPESEKSVTAPPNNADFLFGSEKVAPIPPSPVKVPQPVPEPVVLEPPQMFVDQRMLQPEHGVNPAEIQRQIQEFQMIQIRDQEQQMLHQNQLHQQQQQQEAIHQNQLHHQQEVIHQNQLLQQEAIHQNQMLQQQQQQEAMYRRKTEDEAGRYFPPTYTQNPAPVTNQQPPVGYWQGNTNNSNIQGNIYTTTSQNLPEQQQQQQQVYMIPAQSQAPGTLYQSVMRPTVQGNQGYYPSPVQRLHHPDAYMEQQNQPGYNVVQPQPTFSGGPQVMTSVGPQVMTSVGPPMGLQEPYSQMGKPVYYTVAGEGMMVQPPPAQPQQQQQQYQGMGQPVSGMTDLRTGPDGKVAVNMAAPQVSDSV

SEQ ID NO: 104792 - protein, 463 aa, Arabidopsis thaliana
  peptide (1)..(463): Ceres Seq. ID no. 13615749
  misc_feature (1)..(79): Pfam Name: PB1 domain Pfam Description: PB1 domain
  misc_feature (1)..(463): Homolog of NCBI NO: 15242462 NR Description: octicosapeptide/Phox/Bem1p (PB1) protein [Arabidopsis thaliana] >gi|11357503|pir||T49936
  misc_feature (1)..(408): Homolog of NCBI NO: 15237703 NR Description: octicosapeptide/Phox/Bem1p (PB1) protein [Arabidopsis thaliana] >gi|10178224|dbj|BAB11604.1| similarity to unknown protein~gb|AAD14519.1~gene_id:T12B11.2
  misc_feature (1)..(124): Homolog of NCBI NO: 21553908 NR Description: unknown [Arabidopsis thaliana]
  misc_feature (1)..(124): Homolog of NCBI NO: 18379168 NR Description: octicosapeptide/Phox/Bem1p (PB1) protein [Arabidopsis thaliana] >gi|17979119|gb|AAL49817.1| protein [Arabidopsis thaliana] >gi|20197587|gb|AAD14519.2|
  misc_feature (1)..(104): Homolog of NCBI NO: 25410886 NR Description: hypothetical protein At2g01190 [imported] -
  misc_feature (1)..(145): Homolog of NCBI NO: 9293928 NR Description: gb|AAF04880.1~gene_id:MFE16.2~similar to unknown
  misc_feature (1)..(145): Homolog of NCBI NO: 15231568 NR Description: octicosapeptide/Phox/Bem1p (PB1)
  misc_feature (1)..(100): Homolog of NCBI NO: 34895646 NR Description: P0480E02.2 [Oryza sativa (japonica
  misc_feature (201)..(460): Homolog of NCBI NO: 15237703 NR Description: octicosapeptide/Phox/Bem1p (PB1) protein [Arabidopsis thaliana] >gi|10178224|dbj|BAB11604.1| similarity to unknown protein~gb|AAD14519.1~gene_id:T12B11.2
  misc_feature (1)..(107): Homolog of NCBI NO: 25407315 NR Description: hypothetical protein AT4g05150 [imported] - thaliana >gi|7267274|emb|CAB81057.1| putative protein
MSVDRGIRFPALVSKLSAVCSGGGDGGEISFKYQLPGEDLDALISVTNDEDLEHMMHEYDRLLRLSTKPARMRLFLFPSSPISGGFGSEGSTKSDRDTLNPIPSRPESEKSVTAPPNNADFLFGSEKVAPIPPSPVKVPQPVPEPVVLEPPQMFVDQRMLQPEHGVNPAEIQRQIQEFQMIQIRDQEQQMLHQNQLHQQQQQQEAIHQNQLHHQQEVIHQNQLLQQEAIHQNQMLQQQQQQEAMYRRKTEDEAGRYFPPTYTQNPAPVTNQQPPVGYWQGNTNNSNIQGNIYTTTSQNLPEQQQQQQQVYMIPAQSQAPGTLYQSVMRPTVQGNQGYYPSPVQRLHHPDAYMEQQNQPGYNVVQPQPTFSGGPQVMTSVGPQVMTSVGPPMGLQEPYSQMGKPVYYTVAGEGMMVQPPPAQPQQQQQQYQGMGQPVSGMTDLRTGPDGKVAVNMAAPQVSDSV

SEQ ID NO: 104793 - DNA, 1516 bp, Arabidopsis thaliana
  misc_feature (1)..(1516): Ceres Seq. ID no. 13615750
  misc_feature: MA Experiment ID: 108488 Result: Down-regulated in Transcription
  misc_feature: MA Experiment ID: 20000069 Result: Up-regulated in Transcription
  misc_feature: MA Experiment 20000069 PARAMETER Experiment Name: At_100uM_ABA_Mutants_cDNA_P Parameter: Plant Line Value: CS23
  misc_feature: MA Experiment 20000069 PARAMETER Experiment Name: At_100uM_ABA_Mutants_cDNA_P Parameter: Timepoint (hr) Value: 6
  misc_feature: MA Experiment 20000069 PARAMETER Experiment Name: At_100uM_ABA_Mutants_cDNA_P Parameter: Tissue Value: Aerial
  misc_feature: MA Experiment 20000069 PARAMETER Experiment Name: At_100uM_ABA_Mutants_cDNA_P Parameter: Treatment Value: 100uM ABA vs. No Treatment
  misc_feature: MA Experiment ID: 20000070 Result: Up-regulated in Transcription
  misc_feature: MA Experiment 20000070 PARAMETER Experiment Name: At_100uM_ABA_Mutants_cDNA_P Parameter: Plant Line Value: CS24
  misc_feature: MA Experiment 20000070 PARAMETER Experiment Name: At_100uM_ABA_Mutants_cDNA_P Parameter: Timepoint (hr) Value: 6
  misc_feature: MA Experiment 20000070 PARAMETER Experiment Name: At_100uM_ABA_Mutants_cDNA_P Parameter: Tissue Value: Aerial
  misc_feature: MA Experiment 20000070 PARAMETER Experiment Name: At_100uM_ABA_Mutants_cDNA_P Parameter: Treatment Value: 100uM ABA vs. No Treatment
  misc_feature: MA Experiment ID: 20000071 Result: Up-regulated in Transcription
  misc_feature: MA Experiment 20000071 PARAMETER Experiment Name: At_100uM_ABA_Mutants_cDNA_P Parameter: Plant Line Value: CS8104
  misc_feature: MA Experiment 20000071 PARAMETER Experiment Name: At_100uM_ABA_Mutants_cDNA_P Parameter: Timepoint (hr) Value: 6
  misc_feature: MA Experiment 20000071 PARAMETER Experiment Name: At_100uM_ABA_Mutants_cDNA_P Parameter: Tissue Value: Aerial
  misc_feature: MA Experiment 20000071 PARAMETER Experiment Name: At_100uM_ABA_Mutants_cDNA_P Parameter: Treatment Value: 100uM ABA vs. No Treatment
  misc_feature: MA Experiment ID: 20000315 Result: Down-regulated in Transcription
  misc_feature: MA Experiment 20000315 PARAMETER Experiment Name: At_14day_Shoots-Roots_Sub_P Parameter: Age (day) Value: 14
  misc_feature: MA Experiment 20000315 PARAMETER Experiment Name: At_14day_Shoots-Roots_Sub_P Parameter: Organism Value: A. thaliana
  misc_feature: MA Experiment 20000315 PARAMETER Experiment Name: At_14day_Shoots-Roots_Sub_P Parameter: Plant Line Value: WS
  misc_feature: MA Experiment 20000315 PARAMETER Experiment Name: At_14day_Shoots-Roots_Sub_P Parameter: Tissue Value: Shoots vs. Whole Plant
  misc_feature: MA Experiment ID: 20000328 Result: Down-regulated in Transcription
  misc_feature: MA Experiment 20000328 PARAMETER Experiment Name: At_42deg_Heat_Sub_P Parameter: Age (day) Value: 14
  misc_feature: MA Experiment 20000328 PARAMETER Experiment Name: At_42deg_Heat_Sub_P Parameter: Organism Value: A. thaliana
  misc_feature: MA Experiment 20000328 PARAMETER Experiment Name: At_42deg_Heat_Sub_P Parameter: Plant Line Value: WS
  misc_feature: MA Experiment 20000328 PARAMETER Experiment Name: At_42deg_Heat_Sub_P Parameter: Temperature (deg C) Value: 42 vs. 22
  misc_feature: MA Experiment 20000328 PARAMETER Experiment Name: At_42deg_Heat_Sub_P Parameter: Timepoint (hr) Value: 6
  misc_feature: MA Experiment 20000328 PARAMETER Experiment Name: At_42deg_Heat_Sub_P Parameter: Tissue Value: Aerial
aatcttaacgatttagatactcagtgattcggcttggatcatctttgccaatcatcatctccctctatatatcatcatttaatggcttttggttcgtctctgtgaaaaattctgacggcacaatcagaaattctcagtcgcgtttccgttgttgatgcgttttggggactaattggtagtacactttaagcttattagtcagaacaaatatggatgtgactggcactgtgactgtgagagatgcatttgatcgagtttctaaaaaacagaagctgtatcactcagttactcaagatgtcattgatctagtttgtgatggaatccaagatacattgactcgaatccaattaggtaacgacgatggagtagaaccggaatcggttcttaccgagttgagacgcaagcttgatgctcttttaccgattatccagcttcagaaatcacataaggaaactaaatggagtcttagtaagttggtgaaattgcttgaggtttcttaccatcctgatatatctctagcctgctttagcgttgatttcgatatcaacttagtgaataagatacttatccaccattgttaccgagaagggttgttcgacgttggtgattgtctggttaaggaggctggaagagaggaagaaactgaggttagatctcagttcttagagttccaccagatagtggactcattgaagctcagaaacattgagcctgcaatgagatggatctttgcgaaccgcggaaagctgaagcaaaagagttcaaagctggagtttaagctcttaagtttgaagtactgtgatatattaagagaaggaaagagtgatgatgctttggagtatgcaagaacccattttacgcaatatccactccattttaaggagatacaaaagcttatcacttgtttattatggattggaaactttgagaaaagtccttatgcagagatagtttctccatcatgttgggacaaggtaaccaaagagctaatcatggaatatcaccatcttctcgatcagccaattaactccccgttgaaagtcgctttatccgcgggttatgagagcttaccgtcactgttaaagctggttcatctaatggcattgacgaaacaagaatggcaagcaatgaaacagcttccggttcctctggagttagggaatgagtataagttccactcggcttttgtttgtcccgtgagtagagatcaaagcagcgaagaaaacccgccgatgcagttgccttgtggtcatgttattagcaagcagtcaatgatgagactcagcaagaactgcgctttccgcacattcaaatgcccttattgtcctgcagagactttagcttcagcatgcaggcaattatacttttgaaggatttggtaatttagttaatttgattgtttcacctcaataaatcgatgtgaacaaagcatttcatttgttctttcatcatttaaaaactcttgtttactagatcttgatttgatcttgttctctaatatgttgcatttagttgt

SEQ ID NO: 104794 - protein, 386 aa, Arabidopsis thaliana; identical to SEQ ID NO: 22450
  peptide (1)..(386): Ceres Seq. ID no. 13615751
  misc_feature (1)..(386): Homolog of NCBI NO: 15242463 NR Description: expressed protein [Arabidopsis thaliana]
  misc_feature (9)..(386): Homolog of NCBI NO: 18400050 NR Description: expressed protein [Arabidopsis thaliana]
  misc_feature (9)..(386): Homolog of NCBI NO: 21593562 NR Description: unknown [Arabidopsis thaliana]
  misc_feature (8)..(386): Homolog of NCBI NO: 15235735 NR Description: expressed protein [Arabidopsis thaliana]
  misc_feature (11)..(386): Homolog of NCBI NO: 28829262 NR Description: similar to Arabidopsis thaliana (Mouse-ear
  misc_feature (9)..(386): Homolog of NCBI NO: 31240441 NR Description: ENSANGP00000021271 [Anopheles gambiae]
  misc_feature (7)..(386): Homolog of NCBI NO: 10434433 NR Description: unnamed protein product [Homo sapiens]
  misc_feature (7)..(386): Homolog of NCBI NO: 12232469 NR Description: hypothetical protein FLJ13910 [Homo sapiens] hypothetical protein, clone MTA.D02.090 [Mus musculus] unnamed protein product [Homo sapiens]
  misc_feature (7)..(386): Homolog of NCBI NO: 31044429 NR Description: hypothetical protein MGC59617 [Mus musculus]
  misc_feature (75)..(386): Homolog of NCBI NO: 37590378 NR Description: Unknown (protein for MGC:73277) [Danio rerio]

SEQ ID NO: 104795 - protein, 217 aa, Arabidopsis thaliana; identical to SEQ ID NO: 22451
  peptide (1)..(217): Ceres Seq. ID no. 13615752
  misc_feature (1)..(217): Homolog of NCBI NO: 15242463 NR Description: expressed protein [Arabidopsis thaliana]
  misc_feature (1)..(217): Homolog of NCBI NO: 18400050 NR Description: expressed protein [Arabidopsis thaliana]
  misc_feature (1)..(217): Homolog of NCBI NO: 21593562 NR Description: unknown [Arabidopsis thaliana]
  misc_feature (1)..(217): Homolog of NCBI NO: 15235735 NR Description: expressed protein [Arabidopsis thaliana]
  misc_feature (1)..(217): Homolog of NCBI NO: 28829262 NR Description: similar to Arabidopsis thaliana (Mouse-ear
  misc_feature (1)..(217): Homolog of NCBI NO: 31240441 NR Description: ENSANGP00000021271 [Anopheles gambiae]
  misc_feature (1)..(217): Homolog of NCBI NO: 10434433 NR Description: unnamed protein product [Homo sapiens]
  misc_feature (1)..(217): Homolog of NCBI NO: 12232469 NR Description: hypothetical protein FLJ13910 [Homo sapiens] hypothetical protein, clone MTA.D02.090 [Mus musculus] unnamed protein product [Homo sapiens]
  misc_feature (1)..(217): Homolog of NCBI NO: 31044429 NR Description: hypothetical protein MGC59617 [Mus musculus]
  misc_feature (1)..(217): Homolog of NCBI NO: 37590378 NR Description: Unknown (protein for MGC:73277) [Danio rerio]

SEQ ID NO: 104796 - DNA, 1156 bp, Arabidopsis thaliana
  misc_feature (1)..(1156): Ceres Seq. ID no. 13615753
  misc_feature: MA Experiment ID: 108434 Result: Up-regulated in Transcription
  misc_feature: MA Experiment 108434 PARAMETER Experiment Name: At_Root_Tips_cDNA_P Parameter: Tissue Value: Root Tips
  misc_feature: MA Experiment ID: 108463 Result: Down-regulated in Transcription
  misc_feature: MA Experiment 108463 PARAMETER Experiment Name: At_Germinating_Seeds_cDNA_P Parameter: Age (day) Value: 3 vs. 0
  misc_feature: MA Experiment 108463 PARAMETER Experiment Name: At_Germinating_Seeds_cDNA_P Parameter: Tissue Value: Germinating Seeds
  misc_feature: MA Experiment ID: 108464 Result: Down-regulated in Transcription
  misc_feature: MA Experiment 108464 PARAMETER Experiment Name: At_Germinating_Seeds_cDNA_P Parameter: Age (day) Value: 4 vs. 0
  misc_feature: MA Experiment 108464 PARAMETER Experiment Name: At_Germinating_Seeds_cDNA_P Parameter: Tissue Value: Germinating Seeds
  misc_feature: MA Experiment ID: 108488 Result: Up-regulated in Transcription
  misc_feature: MA Experiment ID: 108579 Result: Up-regulated in Transcription
  misc_feature: MA Experiment 108579 PARAMETER Experiment Name: At_4deg_Cold_cDNA_P Parameter: Temperature (deg C) Value: 4 vs. 22
  misc_feature: MA Experiment 108579 PARAMETER Experiment Name: At_4deg_Cold_cDNA_P Parameter: Timepoint (hr) Value: 6
  misc_feature: MA Experiment 108579 PARAMETER Experiment Name: At_4deg_Cold_cDNA_P Parameter: Tissue Value: Aerial
  misc_feature: MA Experiment ID: 108595 Result: Down-regulated in Transcription
  misc_feature: MA Experiment 108595 PARAMETER Experiment Name: At_Ler-pi_Ovule_cDNA_P Parameter: Plant Line Value: null
  misc_feature: MA Experiment ID: 20000069 Result: Down-regulated in Transcription
  misc_feature: MA Experiment 20000069 PARAMETER Experiment Name: At_100uM_ABA_Mutants_cDNA_P Parameter: Plant Line Value: CS23
  misc_feature: MA Experiment 20000069 PARAMETER Experiment Name: At_100uM_ABA_Mutants_cDNA_P Parameter: Timepoint (hr) Value: 6
  misc_feature: MA Experiment 20000069 PARAMETER Experiment Name: At_100uM_ABA_Mutants_cDNA_P Parameter: Tissue Value: Aerial
  misc_feature: MA Experiment 20000069 PARAMETER Experiment Name: At_100uM_ABA_Mutants_cDNA_P Parameter: Treatment Value: 100uM ABA vs. No Treatment
  misc_feature: MA Experiment ID: 20000070 Result: Down-regulated in Transcription
  misc_feature: MA Experiment 20000070 PARAMETER Experiment Name: At_100uM_ABA_Mutants_cDNA_P Parameter: Plant Line Value: CS24
  misc_feature: MA Experiment 20000070 PARAMETER Experiment Name: At_100uM_ABA_Mutants_cDNA_P Parameter: Timepoint (hr) Value: 6
  misc_feature: MA Experiment 20000070 PARAMETER Experiment Name: At_100uM_ABA_Mutants_cDNA_P Parameter: Tissue Value: Aerial
  misc_feature: MA Experiment 20000070 PARAMETER Experiment Name: At_100uM_ABA_Mutants_cDNA_P Parameter: Treatment Value: 100uM ABA vs. No Treatment
  misc_feature: MA Experiment ID: 20000071 Result: Down-regulated in Transcription
  misc_feature: MA Experiment 20000071 PARAMETER Experiment Name: At_100uM_ABA_Mutants_cDNA_P Parameter: Plant Line Value: CS8104
  misc_feature: MA Experiment 20000071 PARAMETER Experiment Name: At_100uM_ABA_Mutants_cDNA_P Parameter: Timepoint (hr) Value: 6
  misc_feature: MA Experiment 20000071 PARAMETER Experiment Name: At_100uM_ABA_Mutants_cDNA_P Parameter: Tissue Value: Aerial
  misc_feature: MA Experiment 20000071 PARAMETER Experiment Name: At_100uM_ABA_Mutants_cDNA_P Parameter: Treatment Value: 100uM ABA vs. No Treatment
  misc_feature: MA Experiment ID: 20000087 Result: Down-regulated in Transcription
  misc_feature: MA Experiment 20000087 PARAMETER Experiment Name: At_100uM_ABA_Mutants_cDNA_P Parameter: Plant Line Value: WS
  misc_feature: MA Experiment 20000087 PARAMETER Experiment Name: At_100uM_ABA_Mutants_cDNA_P Parameter: Timepoint (hr) Value: 6
  misc_feature: MA Experiment 20000087 PARAMETER Experiment Name: At_100uM_ABA_Mutants_cDNA_P Parameter: Tissue Value: Aerial
  misc_feature: MA Experiment 20000087 PARAMETER Experiment Name: At_100uM_ABA_Mutants_cDNA_P Parameter: Treatment Value: 100uM ABA vs. No Treatment
  misc_feature: MA Experiment ID: 20000113 Result: Up-regulated in Transcription
  misc_feature: MA Experiment 20000113 PARAMETER Experiment Name: At_42deg_Heat_cDNA_P Parameter: Temperature (deg C) Value: 42 vs. 22
  misc_feature: MA Experiment 20000113 PARAMETER Experiment Name: At_42deg_Heat_cDNA_P Parameter: Timepoint (hr) Value: 8
  misc_feature: MA Experiment 20000113 PARAMETER Experiment Name: At_42deg_Heat_cDNA_P Parameter: Tissue Value: Aerial
  misc_feature: MA Experiment ID: 20000117 Result: Down-regulated in Transcription
  misc_feature: MA Experiment 20000117 PARAMETER Experiment Name: At_100uM_ABA_Mutants_cDNA_P Parameter: Plant Line Value: Columbia
  misc_feature: MA Experiment 20000117 PARAMETER Experiment Name: At_100uM_ABA_Mutants_cDNA_P Parameter: Timepoint (hr) Value: 6
  misc_feature: MA Experiment 20000117 PARAMETER Experiment Name: At_100uM_ABA_Mutants_cDNA_P Parameter: Tissue Value: Aerial
  misc_feature: MA Experiment 20000117 PARAMETER Experiment Name: At_100uM_ABA_Mutants_cDNA_P Parameter: Treatment Value: 100uM ABA vs. No Treatment
  misc_feature: MA Experiment ID: 20000224 Result: Up-regulated in Transcription
  misc_feature: MA Experiment ID: 20000437 Result: Down-regulated in Transcription
  misc_feature: MA Experiment 20000437 PARAMETER Experiment Name: At_Drought_P Parameter: Age (day) Value: 8
  misc_feature: MA Experiment 20000437 PARAMETER Experiment Name: At_Drought_P Parameter: Organism Value: A. thaliana
  misc_feature: MA Experiment 20000437 PARAMETER Experiment Name: At_Drought_P Parameter: Plant Line Value: WS
  misc_feature: MA Experiment 20000437 PARAMETER Experiment Name: At_Drought_P Parameter: Timepoint (hr) Value: 24
  misc_feature: MA Experiment 20000437 PARAMETER Experiment Name: At_Drought_P Parameter: Tissue Value: Whole Plant
  misc_feature: MA Experiment 20000437 PARAMETER Experiment Name: At_Drought_P Parameter: Treatment Value: Drought vs. No Drought
  misc_feature: MA Experiment ID: 20000438 Result: Up-regulated in Transcription
  misc_feature: MA Experiment 20000438 PARAMETER Experiment Name: At_Shoots__P Parameter: Age (day) Value: 14
  misc_feature: MA Experiment 20000438 PARAMETER Experiment Name: At_Shoots__P Parameter: Tissue Value: Shoots vs. Whole Plant
  misc_feature: MA Experiment ID: 20000794 Result: Down-regulated in Transcription
  misc_feature: MA Experiment 20000794 PARAMETER Experiment Name: At_Petals_P Parameter: Age (day) Value: 23-25 days
  misc_feature: MA Experiment 20000794 PARAMETER Experiment Name: At_Petals_P Parameter: Plant Line Value: WS
  misc_feature: MA Experiment 20000794 PARAMETER Experiment Name: At_Petals_P Parameter: Tissue Value: Petals vs. Whole plant
  misc_feature: MA Experiment ID: 20001248 Result: Down-regulated in Transcription
  misc_feature: MA Experiment 20001248 PARAMETER Experiment Name: At_Far-red-induction_P Parameter: Age (day) Value: 7
  misc_feature: MA Experiment 20001248 PARAMETER Experiment Name: At_Far-red-induction_P Parameter: Light Value: Far-red vs. White
  misc_feature: MA Experiment 20001248 PARAMETER Experiment Name: At_Far-red-induction_P Parameter: Organism Value: A. thaliana
  misc_feature: MA Experiment 20001248 PARAMETER Experiment Name: At_Far-red-induction_P Parameter: Plant Line Value: Columbia
  misc_feature: MA Experiment 20001248 PARAMETER Experiment Name: At_Far-red-induction_P Parameter: Timepoint (hr) Value: 4
  misc_feature: MA Experiment 20001248 PARAMETER Experiment Name: At_Far-red-induction_P Parameter: Tissue Value: Whole Plant
  misc_feature: MA Experiment ID: 20001450 Result: Down-regulated in Transcription
  misc_feature: MA Experiment 20001450 PARAMETER Experiment Name: At_Far-red-induction_P Parameter: Age (day) Value: 7
  misc_feature: MA Experiment 20001450 PARAMETER Experiment Name: At_Far-red-induction_P Parameter: Light Value: Far-red vs. White
  misc_feature: MA Experiment 20001450 PARAMETER Experiment Name: At_Far-red-induction_P Parameter: Organism Value: A. thaliana
  misc_feature: MA Experiment 20001450 PARAMETER Experiment Name: At_Far-red-induction_P Parameter: Plant Line Value: Columbia
  misc_feature: MA Experiment 20001450 PARAMETER Experiment Name: At_Far-red-induction_P Parameter: Timepoint (hr) Value: 8
  misc_feature: MA Experiment 20001450 PARAMETER Experiment Name: At_Far-red-induction_P Parameter: Tissue Value: Whole Plant
  misc_feature: MA Experiment ID: 20001451 Result: Down-regulated in Transcription
  misc_feature: MA Experiment 20001451 PARAMETER Experiment Name: At_Far-red-induction_P Parameter: Age (day) Value: 7
  misc_feature: MA Experiment 20001451 PARAMETER Experiment Name: At_Far-red-induction_P Parameter: Light Value: Far-red vs. White
  misc_feature: MA Experiment 20001451 PARAMETER Experiment Name: At_Far-red-induction_P Parameter: Organism Value: A. thaliana
  misc_feature: MA Experiment 20001451 PARAMETER Experiment Name: At_Far-red-induction_P Parameter: Plant Line Value: Columbia
  misc_feature: MA Experiment 20001451 PARAMETER Experiment Name: At_Far-red-induction_P Parameter: Timepoint (hr) Value: 24
  misc_feature: MA Experiment 20001451 PARAMETER Experiment Name: At_Far-red-induction_P Parameter: Tissue Value: Whole Plant
  misc_feature: MA Experiment ID: 20001558 Result: Up-regulated in Transcription
  misc_feature: MA Experiment 20001558 PARAMETER Experiment Name: At_Drought_Soil_Dry_P Parameter: Age (day) Value: 27
  misc_feature: MA Experiment 20001558 PARAMETER Experiment Name: At_Drought_Soil_Dry_P Parameter: Organism Value: A. thaliana
  misc_feature: MA Experiment 20001558 PARAMETER Experiment Name: At_Drought_Soil_Dry_P Parameter: Plant Line Value: WS
  misc_feature: MA Experiment 20001558 PARAMETER Experiment Name: At_Drought_Soil_Dry_P Parameter: Post Timepoint (hr) Value: 6
  misc_feature: MA Experiment 20001558 PARAMETER Experiment Name: At_Drought_Soil_Dry_P Parameter: Post-Treatment Value: Re-Water vs. No Drought
  misc_feature: MA Experiment 20001558 PARAMETER Experiment Name: At_Drought_Soil_Dry_P Parameter: Timepoint (day) Value: 13
  misc_feature: MA Experiment 20001558 PARAMETER Experiment Name: At_Drought_Soil_Dry_P Parameter: Treatment Value: Drought vs. No Drought
  misc_feature: MA Experiment ID: 20001560 Result: Up-regulated in Transcription
  misc_feature: MA Experiment 20001560 PARAMETER Experiment Name: At_Drought_Soil_Dry_P Parameter: Age (day) Value: 28
  misc_feature: MA Experiment 20001560 PARAMETER Experiment Name: At_Drought_Soil_Dry_P Parameter: Organism Value: A. thaliana
  misc_feature: MA Experiment 20001560 PARAMETER Experiment Name: At_Drought_Soil_Dry_P Parameter: Plant Line Value: WS
  misc_feature: MA Experiment 20001560 PARAMETER Experiment Name: At_Drought_Soil_Dry_P Parameter: Post Timepoint (hr) Value: None
  misc_feature: MA Experiment 20001560 PARAMETER Experiment Name: At_Drought_Soil_Dry_P Parameter: Post-Treatment Value: None
  misc_feature: MA Experiment 20001560 PARAMETER Experiment Name: At_Drought_Soil_Dry_P Parameter: Timepoint (day) Value: 14
  misc_feature: MA Experiment 20001560 PARAMETER Experiment Name: At_Drought_Soil_Dry_P Parameter: Treatment Value: Drought vs. No Drought
  misc_feature: MA Experiment ID: 20001757 Result: Up-regulated in Transcription
  misc_feature: MA Experiment 20001757 PARAMETER Experiment Name: At_50mM_NH4NO3_L-to-H_P Parameter: Timepoint (hr) Value: 6
  misc_feature: MA Experiment 20001757 PARAMETER Experiment Name: At_50mM_NH4NO3_L-to-H_P Parameter: Tissue Value: Leaf
  misc_feature: MA Experiment 20001757 PARAMETER Experiment Name: At_50mM_NH4NO3_L-to-H_P Parameter: Treatment Value: 50mM NH4NO3 vs 100mM Mannitol
  misc_feature: MA Experiment ID: 20001905 Result: Down-regulated in Transcription
  misc_feature: MA Experiment 20001905 PARAMETER Experiment Name: At_Drought_Reproduction_P Parameter: Age (day) Value: 40
  misc_feature: MA Experiment 20001905 PARAMETER Experiment Name: At_Drought_Reproduction_P Parameter: Organism Value: A. thaliana
  misc_feature: MA Experiment 20001905 PARAMETER Experiment Name: At_Drought_Reproduction_P Parameter: Plant Line Value: WS
  misc_feature: MA Experiment 20001905 PARAMETER Experiment Name: At_Drought_Reproduction_P Parameter: Timepoint (day) Value: 10
  misc_feature: MA Experiment 20001905 PARAMETER Experiment Name: At_Drought_Reproduction_P Parameter: Tissue Value: Rosettes
  misc_feature: MA Experiment 20001905 PARAMETER Experiment Name: At_Drought_Reproduction_P Parameter: Treatment Value: Drought vs. No Drought
  misc_feature: MA Experiment ID: 20001911 Result: Down-regulated in Transcription
  misc_feature: MA Experiment 20001911 PARAMETER Experiment Name: At_Drought_Reproduction_P Parameter: Age (day) Value: 40
  misc_feature: MA Experiment 20001911 PARAMETER Experiment Name: At_Drought_Reproduction_P Parameter: Organism Value: A. thaliana
  misc_feature: MA Experiment 20001911 PARAMETER Experiment Name: At_Drought_Reproduction_P Parameter: Plant Line Value: WS
  misc_feature: MA Experiment 20001911 PARAMETER Experiment Name: At_Drought_Reproduction_P Parameter: Timepoint (day) Value: 10
  misc_feature: MA Experiment 20001911 PARAMETER Experiment Name: At_Drought_Reproduction_P Parameter: Tissue Value: Flowers
  misc_feature: MA Experiment 20001911 PARAMETER Experiment Name: At_Drought_Reproduction_P Parameter: Treatment Value: Drought vs. No Drought
tttttgtgttctgtctttcttggtggtgtgataaagaataaagagagccagtcgagggtaaaacgaaaggccaccattttcaatctttccacaataatggcggctactagagtgttaactgcagcgacggccgtgacccaaaccacctcctgtttcctcgccaagcaagctttcactcttccggcgaagaaatcctgcggcggatttggtggtctctgcttcagcagaagagctttggtgttgaaatctaagagacctttctcctgcagtgccatttacaatcctcaggttaaggttcaagaagaaggtccggccgaatccctagattatcgagttttcttcctcgatggttctggaaagaaggtttctccatggcatgatataccattgaccttaggcgatggagttttcaactttatagttgaaatacctaaagagtcaaaagcaaaaatggaggttgctactgatgaagatttcactcctattaagcaggatactaagaaggggaagctcagatattatccgtataacattaactggaactatgggttgcttcctcaaacatgggaagatccatctcatgcaaattctgaagttgaaggatgttttggggataatgatccagttgatgttgttgagattggtgaaacacaaaggaagataggcgatattctaaagataaagcctttagctgctttagctatgattgatgaaggtgagctagactggaagattgttgccatttctttggatgacccaaaagctcatcttgtgaatgatgttgaagatgttgagaaacatttcccgggtacactaacagccattagagactggtttagagactacaagatcccagatggaaagcctgctaacagatttggtcttggagacaaaccagcaaacaaagactatgctttgaagatcatccaagaaacaaatgaatcatgggctaaacttgtgaagagatcagttgatgctggagacctttcactttactgaacatattttgcaatgtcgacttatgaggtcgaataatgaatagactcaagattcctatatcattcttgttgtttcctttcaattgagatgtaaacattgggatttggattttgtttttcaccattgatgactgagaagtaataaaatgactttctgc

SEQ ID NO: 104797 - protein, 332 aa, Arabidopsis thaliana; identical to SEQ ID NO: 22434
  peptide (1)..(332): Ceres Seq. ID no. 13615754
  misc_feature (138)..(318): Pfam Name: Inorganic pyrophosphatase Pfam Description: Inorganic pyrophosphatase
  misc_feature (33)..(332): Homolog of NCBI NO: 15242465 NR Description: inorganic pyrophosphatase - like protein
  misc_feature (33)..(332): Homolog of NCBI NO: 21592878 NR Description: inorganic pyrophosphatase-like protein
  misc_feature (99)..(331): Homolog of NCBI NO: 14571671 NR Description: inorganic pyrophosphatase precursor
  misc_feature (80)..(323): Homolog of NCBI NO: 29420791 NR Description: inorganic pyrophosphatase [Ascaris suum]
  misc_feature (99)..(330): Homolog of NCBI NO: 32450373 NR Description: Unknown (protein for IMAGE:6880302) [Xenopus
  misc_feature (100)..(332): Homolog of NCBI NO: 4583153 NR Description: cytosolic inorganic pyrophosphatase [Homo sapiens]
  misc_feature (100)..(332): Homolog of NCBI NO: 27754065 NR Description: RIKEN cDNA 2010317E03 [Mus musculus] unnamed protein product [Mus musculus]
  misc_feature (107)..(332): Homolog of NCBI NO: 26353394 NR Description: unnamed protein product [Mus musculus]
  misc_feature (100)..(332): Homolog of NCBI NO: 34852506 NR Description: similar to RIKEN cDNA 2010317E03 [Rattus
  misc_feature (100)..(332): Homolog of NCBI NO: 11056044 NR Description: inorganic pyrophosphatase; cytosolic inorganic

SEQ ID NO: 104798 - protein, 300 aa, Arabidopsis thaliana; identical to SEQ ID NO: 22435
  peptide (1)..(300): Ceres Seq. ID no. 13615755
  misc_feature (106)..(286): Pfam Name: Inorganic pyrophosphatase Pfam Description: Inorganic pyrophosphatase
  misc_feature (1)..(300): Homolog of NCBI NO: 15242465 NR Description: inorganic pyrophosphatase - like protein
  misc_feature (1)..(300): Homolog of NCBI NO: 21592878 NR Description: inorganic pyrophosphatase-like protein
  misc_feature (67)..(299): Homolog of NCBI NO: 14571671 NR Description: inorganic pyrophosphatase precursor
  misc_feature (48)..(291): Homolog of NCBI NO: 29420791 NR Description: inorganic pyrophosphatase [Ascaris suum]
  misc_feature (67)..(298): Homolog of NCBI NO: 32450373 NR Description: Unknown (protein for IMAGE:6880302) [Xenopus
  misc_feature (68)..(300): Homolog of NCBI NO: 4583153 NR Description: cytosolic inorganic pyrophosphatase [Homo sapiens]
  misc_feature (68)..(300): Homolog of NCBI NO: 27754065 NR Description: RIKEN cDNA 2010317E03 [Mus musculus] unnamed protein product [Mus musculus]
  misc_feature (75)..(300): Homolog of NCBI NO: 26353394 NR Description: unnamed protein product [Mus musculus]
  misc_feature (68)..(300): Homolog of NCBI NO: 34852506 NR Description: similar to RIKEN cDNA 2010317E03 [Rattus
  misc_feature (68)..(300): Homolog of NCBI NO: 11056044 NR Description: inorganic pyrophosphatase; cytosolic inorganic

SEQ ID NO: 104799 - protein, 182 aa, Arabidopsis thaliana; identical to SEQ ID NO: 22436
  peptide (1)..(182): Ceres Seq. ID no. 13615756
  misc_feature (1)..(168): Pfam Name: Inorganic pyrophosphatase Pfam Description: Inorganic pyrophosphatase
  misc_feature (1)..(182): Homolog of NCBI NO: 15242465 NR Description: inorganic pyrophosphatase - like protein
  misc_feature (1)..(182): Homolog of NCBI NO: 21592878 NR Description: inorganic pyrophosphatase-like protein
  misc_feature (1)..(181): Homolog of NCBI NO: 14571671 NR Description: inorganic pyrophosphatase precursor
  misc_feature (1)..(173): Homolog of NCBI NO: 29420791 NR Description: inorganic pyrophosphatase [Ascaris suum]
  misc_feature (1)..(180): Homolog of NCBI NO: 32450373 NR Description: Unknown (protein for IMAGE:6880302) [Xenopus
  misc_feature (1)..(182): Homolog of NCBI NO: 4583153 NR Description: cytosolic inorganic pyrophosphatase [Homo sapiens]
  misc_feature (1)..(182): Homolog of NCBI NO: 27754065 NR Description: RIKEN cDNA 2010317E03 [Mus musculus] unnamed protein product [Mus musculus]
  misc_feature (1)..(182): Homolog of NCBI NO: 26353394 NR Description: unnamed protein product [Mus musculus]
  misc_feature (1)..(182): Homolog of NCBI NO: 34852506 NR Description: similar to RIKEN cDNA 2010317E03 [Rattus
  misc_feature (1)..(182): Homolog of NCBI NO: 11056044 NR Description: inorganic pyrophosphatase; cytosolic inorganic

SEQ ID NO: 104800 - DNA, 2424 bp, Arabidopsis thaliana
  misc_feature (1)..(2424): Ceres Seq. ID no. 13615757
  misc_feature: MA Experiment ID: 108501 Result: Up-regulated in Transcription
  misc_feature: MA Experiment 108501 PARAMETER Experiment Name: At_ap2_floral_buds_cDNA_P Parameter: Plant Line Value: ap2 (Ler.)
  misc_feature: MA Experiment 108501 PARAMETER Experiment Name: At_ap2_floral_buds_cDNA_P Parameter: Tissue Value: Closed Flower
  misc_feature: MA Experiment ID: 108595 Result: Up-regulated in Transcription
  misc_feature: MA Experiment 108595 PARAMETER Experiment Name: At_Ler-pi_Ovule_cDNA_P Parameter: Plant Line Value: null
  misc_feature: MA Experiment ID: 20000184 Result: Down-regulated in Transcription
  misc_feature: MA Experiment 20000184 PARAMETER Experiment Name: At_Shoots__P Parameter: Age (day) Value: 7
  misc_feature: MA Experiment 20000184 PARAMETER Experiment Name: At_Shoots__P Parameter: Tissue Value: Shoots vs. Whole Plant
  misc_feature: MA Experiment ID: 20000185 Result: Down-regulated in Transcription
  misc_feature: MA Experiment 20000185 PARAMETER Experiment Name: At_Roots__P Parameter: Age (day) Value: 7 vs. 21
  misc_feature: MA Experiment 20000185 PARAMETER Experiment Name: At_Roots__P Parameter: Organism Value: A. thaliana
  misc_feature: MA Experiment 20000185 PARAMETER Experiment Name: At_Roots__P Parameter: Tissue Value: Roots vs. Whole Plant
  misc_feature: MA Experiment ID: 20000234 Result: Up-regulated in Transcription
  misc_feature: MA Experiment 20000234 PARAMETER Experiment Name: At_Siliques_P Parameter: Age (day) Value: 21
  misc_feature: MA Experiment 20000234 PARAMETER Experiment Name: At_Siliques_P Parameter: Organism Value: A. thaliana
  misc_feature: MA Experiment 20000234 PARAMETER Experiment Name: At_Siliques_P Parameter: Plant Line Value: WS
  misc_feature: MA Experiment 20000234 PARAMETER Experiment Name: At_Siliques_P Parameter: Tissue Value: Less Than 5mm Siliques vs. Whole Plant
  misc_feature: MA Experiment ID: 20000264 Result: Up-regulated in Transcription
  misc_feature: MA Experiment 20000264 PARAMETER Experiment Name: At_Open_Flower_P Parameter: Age (day) Value: 21
  misc_feature: MA Experiment 20000264 PARAMETER Experiment Name: At_Open_Flower_P Parameter: Plant Line Value: WS
  misc_feature: MA Experiment 20000264 PARAMETER Experiment Name: At_Open_Flower_P Parameter: Tissue Value: Open Flower vs. Whole Plant
  misc_feature: MA Experiment ID: 20000265 Result: Up-regulated in Transcription
  misc_feature: MA Experiment 20000265 PARAMETER Experiment Name: At_Open_Flower_P Parameter: Age (day) Value: 21
  misc_feature: MA Experiment 20000265 PARAMETER Experiment Name: At_Open_Flower_P Parameter: Plant Line Value: WS
  misc_feature: MA Experiment 20000265 PARAMETER Experiment Name: At_Open_Flower_P Parameter: Tissue Value: Closed Flower vs. Whole Plant
  misc_feature: MA Experiment ID: 20000286 Result: Up-regulated in Transcription
  misc_feature: MA Experiment 20000286 PARAMETER Experiment Name: At_Open_Flower_P Parameter: Age (day) Value: 21
  misc_feature: MA Experiment 20000286 PARAMETER Experiment Name: At_Open_Flower_P Parameter: Plant Line Value: WS
  misc_feature: MA Experiment 20000286 PARAMETER Experiment Name: At_Open_Flower_P Parameter: Tissue Value: Half Open vs. Whole Plant
  misc_feature: MA Experiment ID: 20000438 Result: Down-regulated in Transcription
  misc_feature: MA Experiment 20000438 PARAMETER Experiment Name: At_Shoots__P Parameter: Age (day) Value: 14
  misc_feature: MA Experiment 20000438 PARAMETER Experiment Name: At_Shoots__P Parameter: Tissue Value: Shoots vs. Whole Plant
  misc_feature: MA Experiment ID: 20000495 Result: Up-regulated in Transcription
  misc_feature: MA Experiment 20000495 PARAMETER Experiment Name: At_Guard_Cells_P Parameter: Harvest Date Value: 8/2/2002
  misc_feature: MA Experiment 20000495 PARAMETER Experiment Name: At_Guard_Cells_P Parameter: Organism Value: A. thaliana
  misc_feature: MA Experiment 20000495 PARAMETER Experiment Name: At_Guard_Cells_P Parameter: Tissue Value: Guard Cells vs. Leaves
acaaaccacaacaaaaaatctcgagacaaagatacaatggcgagccgaaacagagcactcttctctgtttccactcttttcctctgtttcatcgtctgcatctccgagcaatcgaacaatcagtcttctccagtcttcgcctgtgacgtcaccggaaacccttctcttgccgggcttagattctgcaacgcggggttgagtatcaaagcccgagtcaccgatcttgtcggaagattgacgttggaggagaaaatcgggtttttgaccagcaaagctatcggcgttagccgccttgggattccgtcttacaaatggtggtcggaggcacttcatggcgtctctaacgtcggaggtggtagtcggttcaccggtcaagtccctggcgccactagcttcccacaagttatactcacggccgcttctttcaatgtgtctttgttccaagccattggcaaggttgtatcgacagaggcgagggcaatgtacaatgtgggatcagccggtttaacgttttggtcacctaatgtgaacatattccgggacccgagatggggaagaggacaagagactcccggtgaggacccaacactctcaagcaaatacgcagtggcctacgttaaaggtcttcaggagactgacggtggagatcctaaccgtctcaaagtcgctgcttgctgcaaacactacaccgcctatgatattgacaattggagaaatgtcaatcgtctcactttcaacgctgtggtaaaccaacaagatctggctgatacgtttcaaccaccgttcaagagctgtgtggttgatgggcatgttgctagtgtcatgtgttcttacaaccaagttaacggtaaaccaacatgtgccgatcctgatctgctttccggtgtgatccgcggacaatggcagctcaacggatacattgtttcggattgtgattcggtagatgtgttgttcagaaaacaacactatgctaagactccagaagaagctgtggccaaatctctattggcaggtttggatttgaattgtgatcatttcaatggtcaacacgcgatgggagcggtcaaggcgggtttggtaaacgaaacagctattgacaaagcgatttcaaacaatttcgcgactctgatgcgtttagggttcttcgatggagaccctaagaagcagctctacggtggtcttggtcctaaggatgtttgcaccgctgataaccaagaactcgcaagagatggcgcaagacaaggcattgtcttgcttaagaactctgctggttcgcttccgctctcaccttccgcaatcaaaacattagccgtgatcggaccaaacgccaatgccacagaaacaatgatcggaaactaccacggtgtaccatgcaagtacacaacgccgcttcagggattggcagaaacggtgtcgtctacctatcaactgggatgtaacgtggcttgcgtagatgcggatataggctcagccgtggatctggctgcttctgcggatgctgttgtgctcgtggtgggcgcagaccaatcaattgagagggagggccatgaccgagtcgacctgtatcttcctggaaagcagcaagagcttgtgactcgagttgctatggcagcaagaggaccggtggtgctagttatcatgtccggtggaggatttgacattacattcgccaagaatgataaaaagatcacaagcataatgtgggtcggataccctggtgaagccggtggtctcgccattgctgacgttatcttcggacgtcataatccgagtggaaatttgccgatgacgtggtatcctcaatcgtacgtggaaaaagttccgatgtcaaatatgaacatgagacccgacaaatcaaaggggtatccgggtcggagttacaggttttacaccggagaaaccgtatacgccttcgcagacgcgcttacctacactaaattcgaccatcagctaatcaaagcgccaagactcgtctctctcagtctcgacgagaaccacccttgccgatcatcggagtgccaatctttggacgcgatcggacctcactgcgagaacgccgttgagggaggatcggatttcgaggttcatttgaatgtaaagaacaccggagacagagcgggaagccacacggtgtttctgttcacgacgtcgccgcaagtacacggatctccgattaagcaactactaggatttgagaagattcgtctgggaaagagtgaagaagcggtggttaggtttaacgtcaatgtgtgtaaggatctgagtgtggttgatgagaccgggaagaggaaaatcgcgttaggtcatcatcttctccatgtaggaagcttgaaacactctttgaacattagtgtttgattcgacggctcgttttgtttttaacttaagatattaattatggtaataaaatgagatagcaatttt

SEQ ID NO: 104801 - protein, 785 aa, Arabidopsis thaliana; identical to SEQ ID NO: 42028
  peptide (1)..(785): Ceres Seq. ID no. 13615758
  misc_feature (416)..(646): Pfam Name: Glycosyl hydrolase family 3 C terminal domain Pfam Description: Glycosyl hydrolase family 3 C terminal domain
  misc_feature (43)..(785): Homolog of NCBI NO: 18025340 NR Description: alpha-L-arabinofuranosidase/beta-D-xylosidase
  misc_feature (27)..(785): Homolog of NCBI NO: 32481073 NR Description: auxin-induced beta-glucosidase [Chenopodium
  misc_feature (13)..(781): Homolog of NCBI NO: 15239867 NR Description: glycosyl hydrolase family 3 [Arabidopsis >gi|9759419|dbj|BAB09906.1| xylosidase [Arabidopsis thaliana]
  misc_feature (26)..(783): Homolog of NCBI NO: 15230897 NR Description: glycosyl hydrolase family 3 [Arabidopsis thaliana]
  misc_feature (26)..(783): Homolog of NCBI NO: 25453520 NR Description: beta-1,4-xylosidase [imported] - Arabidopsis
  misc_feature (28)..(783): Homolog of NCBI NO: 18378991 NR Description: glycosyl hydrolase family 3 [Arabidopsis >gi|14194121|gb|AAK56255.1|AF367266_1 At1g02640/T14P4_11 thaliana] >gi|23506063|gb|AAN28891.1| At1g02640/T14P4_11
  misc_feature (28)..(783): Homolog of NCBI NO: 25518461 NR Description: hypothetical protein T14P4.8 - Arabidopsis >gi|9972374|gb|AAG10624.1|AC022521_2 Similar to xylosidase
  misc_feature (213)..(783): Homolog of NCBI NO: 15238197 NR Description: glycosyl hydrolase family 3 [Arabidopsis thaliana]
  misc_feature (17)..(211): Homolog of NCBI NO: 15238197 NR Description: glycosyl hydrolase family 3 [Arabidopsis thaliana]
  misc_feature (13)..(782): Homolog of NCBI NO: 18025342 NR Description: beta-D-xylosidase [Hordeum vulgare]

SEQ ID NO: 104802 - protein, 773 aa, Arabidopsis thaliana; identical to SEQ ID NO: 42029
  peptide (1)..(773): Ceres Seq. ID no. 13615759
  misc_feature (404)..(634): Pfam Name: Glycosyl hydrolase family 3 C terminal domain Pfam Description: Glycosyl hydrolase family 3 C terminal domain
  misc_feature (31)..(773): Homolog of NCBI NO: 18025340 NR Description: alpha-L-arabinofuranosidase/beta-D-xylosidase
  misc_feature (15)..(773): Homolog of NCBI NO: 32481073 NR Description: auxin-induced beta-glucosidase [Chenopodium
  misc_feature (1)..(769): Homolog of NCBI NO: 15239867 NR Description: glycosyl hydrolase family 3 [Arabidopsis >gi|9759419|dbj|BAB09906.1| xylosidase [Arabidopsis thaliana]
  misc_feature (14)..(771): Homolog of NCBI NO: 15230897 NR Description: glycosyl hydrolase family 3 [Arabidopsis thaliana]
  misc_feature (14)..(771): Homolog of NCBI NO: 25453520 NR Description: beta-1,4-xylosidase [imported] - Arabidopsis
  misc_feature (16)..(771): Homolog of NCBI NO: 18378991 NR Description: glycosyl hydrolase family 3 [Arabidopsis >gi|14194121|gb|AAK56255.1|AF367266_1 At1g02640/T14P4_11 thaliana] >gi|23506063|gb|AAN28891.1| At1g02640/T14P4_11
  misc_feature (16)..(771): Homolog of NCBI NO: 25518461 NR Description: hypothetical protein T14P4.8 - Arabidopsis >gi|9972374|gb|AAG10624.1|AC022521_2 Similar to xylosidase
  misc_feature (201)..(771): Homolog of NCBI NO: 15238197 NR Description: glycosyl hydrolase family 3 [Arabidopsis thaliana]
  misc_feature (5)..(199): Homolog of NCBI NO: 15238197 NR Description: glycosyl hydrolase family 3 [Arabidopsis thaliana]
  misc_feature (1)..(770): Homolog of NCBI NO: 18025342 NR Description: beta-D-xylosidase [Hordeum vulgare]

SEQ ID NO: 104803 - protein, 625 aa, Arabidopsis thaliana; identical to SEQ ID NO: 42030
  peptide (1)..(625): Ceres Seq. ID no. 13615760
  misc_feature (256)..(486): Pfam Name: Glycosyl hydrolase family 3 C terminal domain Pfam Description: Glycosyl hydrolase family 3 C terminal domain
  misc_feature (1)..(625): Homolog of NCBI NO: 18025340 NR Description: alpha-L-arabinofuranosidase/beta-D-xylosidase
  misc_feature (1)..(625): Homolog of NCBI NO: 32481073 NR Description: auxin-induced beta-glucosidase [Chenopodium
  misc_feature (1)..(621): Homolog of NCBI NO: 15239867 NR Description: glycosyl hydrolase family 3 [Arabidopsis >gi|9759419|dbj|BAB09906.1| xylosidase [Arabidopsis thaliana]
  misc_feature (1)..(623): Homolog of NCBI NO: 15230897 NR Description: glycosyl hydrolase family 3 [Arabidopsis thaliana]
  misc_feature (1)..(623): Homolog of NCBI NO: 25453520 NR Description: beta-1,4-xylosidase [imported] - Arabidopsis
  misc_feature (1)..(623): Homolog of NCBI NO: 18378991 NR Description: glycosyl hydrolase family 3 [Arabidopsis >gi|14194121|gb|AAK56255.1|AF367266_1 At1g02640/T14P4_11 thaliana] >gi|23506063|gb|AAN28891.1| At1g02640/T14P4_11
  misc_feature (1)..(623): Homolog of NCBI NO: 25518461 NR Description: hypothetical protein T14P4.8 - Arabidopsis >gi|9972374|gb|AAG10624.1|AC022521_2 Similar to xylosidase
  misc_feature (53)..(623): Homolog of NCBI NO: 15238197 NR Description: glycosyl hydrolase family 3 [Arabidopsis thaliana]
  misc_feature (1)..(51): Homolog of NCBI NO: 15238197 NR Description: glycosyl hydrolase family 3 [Arabidopsis thaliana]
  misc_feature (1)..(622): Homolog of NCBI NO: 18025342 NR Description: beta-D-xylosidase [Hordeum vulgare]

SEQ ID NO: 104804 - DNA, 1148 bp, Arabidopsis thaliana
  misc_feature (1)..(1148): Ceres Seq. ID no. 13615784
  misc_feature: MA Experiment ID: 108461 Result: Up-regulated in Transcription
  misc_feature: MA Experiment 108461 PARAMETER Experiment Name: At_Germinating_Seeds_cDNA_P Parameter: Age (day) Value: 1 vs. 0
  misc_feature: MA Experiment 108461 PARAMETER Experiment Name: At_Germinating_Seeds_cDNA_P Parameter: Tissue Value: Germinating Seeds
  misc_feature: MA Experiment ID: 108462 Result: Up-regulated in Transcription
  misc_feature: MA Experiment 108462 PARAMETER Experiment Name: At_Germinating_Seeds_cDNA_P Parameter: Age (day) Value: 2 vs. 0
  misc_feature: MA Experiment 108462 PARAMETER Experiment Name: At_Germinating_Seeds_cDNA_P Parameter: Tissue Value: Germinating Seeds
  misc_feature: MA Experiment ID: 108463 Result: Up-regulated in Transcription
  misc_feature: MA Experiment 108463 PARAMETER Experiment Name: At_Germinating_Seeds_cDNA_P Parameter: Age (day) Value: 3 vs. 0
  misc_feature: MA Experiment 108463 PARAMETER Experiment Name: At_Germinating_Seeds_cDNA_P Parameter: Tissue Value: Germinating Seeds
  misc_feature: MA Experiment ID: 108464 Result: Up-regulated in Transcription
  misc_feature: MA Experiment 108464 PARAMETER Experiment Name: At_Germinating_Seeds_cDNA_P Parameter: Age (day) Value: 4 vs. 0
  misc_feature: MA Experiment 108464 PARAMETER Experiment Name: At_Germinating_Seeds_cDNA_P Parameter: Tissue Value: Germinating Seeds
  misc_feature: MA Experiment ID: 108594 Result: Down-regulated in Transcription
  misc_feature: MA Experiment 108594 PARAMETER Experiment Name: At_Ler-rhl_Root_cDNA_P Parameter: Plant Line Value: null
  misc_feature: MA Experiment ID: 108595 Result: Up-regulated in Transcription
  misc_feature: MA Experiment 108595 PARAMETER Experiment Name: At_Ler-pi_Ovule_cDNA_P Parameter: Plant Line Value: null
  misc_feature: MA Experiment ID: 20000439 Result: Up-regulated in Transcription
  misc_feature: MA Experiment 20000439 PARAMETER Experiment Name: At_Roots__P Parameter: Age (day) Value: 14 vs. 21
  misc_feature: MA Experiment 20000439 PARAMETER Experiment Name: At_Roots__P Parameter: Organism Value: A. thaliana
  misc_feature: MA Experiment 20000439 PARAMETER Experiment Name: At_Roots__P Parameter: Tissue Value: Roots vs. Whole Plant
aatggatagattagagaaatagaaaaatcaaaagaagctttggcaaagagctaaagatcaaagcttttctttgagaatgagattgtggattgtgagtgtactcgtgcttacacaccttgtccatggagctctctgttgggggaaggatggtcactacactgtttgcaaattagctgagggattctttgaggatgatactattgctgcagtgaagaaacttctgcctgaatcagttgatggtggtggactagcagatttttgctcatggcctgatgaaattaaaaaactctcgcaatggcaatggactagcactttgcactatgttaacacacctgaatacaggtgcaactacgagtattgccgggactgccatgacactcataagcataaggactggtgtgtgacaggagcgatcttcaattacacaaaccagttaatgtctgcttctgaaaactcacagaatatagtccactacaacttgacagaggctctcttgttcttgtcacattatatgggagatgttcatcagcccttgcatactggttttcttggagatctaggtggtaacacaataatagtcaactggtaccataacaaatcaaatttgcaccatgtctgggacaacatgataattgactctgctctagaaacatactacaattcaagccttccacacatgattcaagctcttcaagccaaactcaagaacggctggtcgaatgatgttccgtcgtggaagtcatgtcactttcaccaaaaggcctgtccaaatctgtatgcttctgaaagcattgatctcgcctgcaagtatgcttacaggaacgctactccggggactactttaggagatgagtatttcctttctcggttacccgttgtagagaagagacttgcacaaggtgggattcgcttggcagctactcttaatcgtatcttttctgcaaaaccgaagctcgcaggattatgaatctaagaaaaagatccttgagaacccacgtaacaactccttttaagtgttttttataacactgtgaatggttgagtcatgactaatgagtgaacctccaaaatcttcatgcaaaaatttgttattttgggacatggttcaaacttccaataacaaaccacactaacggataacactttgc

SEQ ID NO: 104805 - protein, 296 aa, Arabidopsis thaliana
  peptide (1)..(296): Ceres Seq. ID no. 13615785
  misc_feature (1)..(296): Homolog of NCBI NO: 18415729 NR Description: endonuclease -related [Arabidopsis thaliana]
  misc_feature (1)..(296): Homolog of NCBI NO: 21593575 NR Description: endonuclease, putative [Arabidopsis thaliana]
  misc_feature (1)..(295): Homolog of NCBI NO: 22328857 NR Description: expressed protein [Arabidopsis thaliana]
  misc_feature (1)..(294): Homolog of NCBI NO: 18415727 NR Description: bifunctional nuclease -related [Arabidopsis >gi|21553881|gb|AAM62974.1| putative bifunctional nuclease
  misc_feature (4)..(294): Homolog of NCBI NO: 4099835 NR Description: bifunctional nuclease [Zinnia elegans]
  misc_feature (133)..(294): Homolog of NCBI NO: 7485717 NR Description: hypothetical protein F18E5.210 - Arabidopsis >gi|3080403|emb|CAA18723.1| hypothetical protein [Arabidopsis >gi|4455267|emb|CAB36803.1| putative bifunctional nuclease
  misc_feature (32)..(94): Homolog of NCBI NO: 7485717 NR Description: hypothetical protein F18E5.210 - Arabidopsis >gi|3080403|emb|CAA18723.1| hypothetical protein [Arabidopsis >gi|4455267|emb|CAB36803.1| putative bifunctional nuclease
  misc_feature (34)..(199): Homolog of NCBI NO: 7485718 NR Description: hypothetical protein F18E5.220 - Arabidopsis >gi|3080404|emb|CAA18724.1| putative protein [Arabidopsis >gi|4455268|emb|CAB36804.1| putative bifunctional nuclease
  misc_feature (258)..(283): Homolog of NCBI NO: 7485718 NR Description: hypothetical protein F18E5.220 - Arabidopsis >gi|3080404|emb|CAA18724.1| putative protein [Arabidopsis >gi|4455268|emb|CAB36804.1| putative bifunctional nuclease
  misc_feature (1)..(291): Homolog of NCBI NO: 9558456 NR Description: unnamed protein product [Oryza sativa (japonica
MRLWIVSVLVLTHLVHGALCWGKDGHYTVCKLAEGFFEDDTIAAVKKLLPESVDGGGLADFCSWPDEIKKLSQWQWTSTLHYVNTPEYRCNYEYCRDCHDTHKHKDWCVTGAIFNYTNQLMSASENSQNIVHYNLTEALLFLSHYMGDVHQPLHTGFLGDLGGNTIIVNWYHNKSNLHHVWDNMIIDSALETYYNSSLPHMIQALQAKLKNGWSNDVPSWKSCHFHQKACPNLYASESIDLACKYAYRNATPGTTLGDEYFLSRLPVVEKRLAQGGIRLAATLNRIFSAKPKLAGL

SEQ ID NO: 104806 - protein, 176 aa, Arabidopsis thaliana; identical to SEQ ID NO: 25297
  peptide (1)..(176): Ceres Seq. ID no. 13615786
  misc_feature (1)..(176): Homolog of NCBI NO: 18415729 NR Description: endonuclease -related [Arabidopsis thaliana]
  misc_feature (1)..(176): Homolog of NCBI NO: 21593575 NR Description: endonuclease, putative [Arabidopsis thaliana]
  misc_feature (1)..(175): Homolog of NCBI NO: 22328857 NR Description: expressed protein [Arabidopsis thaliana]
  misc_feature (1)..(174): Homolog of NCBI NO: 18415727 NR Description: bifunctional nuclease -related [Arabidopsis >gi|21553881|gb|AAM62974.1| putative bifunctional nuclease
  misc_feature (1)..(174): Homolog of NCBI NO: 4099835 NR Description: bifunctional nuclease [Zinnia elegans]
  misc_feature (13)..(174): Homolog of NCBI NO: 7485717 NR Description: hypothetical protein F18E5.210 - Arabidopsis >gi|3080403|emb|CAA18723.1| hypothetical protein [Arabidopsis >gi|4455267|emb|CAB36803.1| putative bifunctional nuclease
  misc_feature (1)..(79): Homolog of NCBI NO: 7485718 NR Description: hypothetical protein F18E5.220 - Arabidopsis >gi|3080404|emb|CAA18724.1| putative protein [Arabidopsis >gi|4455268|emb|CAB36804.1| putative bifunctional nuclease
  misc_feature (138)..(163): Homolog of NCBI NO: 7485718 NR Description: hypothetical protein F18E5.220 - Arabidopsis >gi|3080404|emb|CAA18724.1| putative protein [Arabidopsis >gi|4455268|emb|CAB36804.1| putative bifunctional nuclease
  misc_feature (1)..(171): Homolog of NCBI NO: 9558456 NR Description: unnamed protein product [Oryza sativa (japonica
  misc_feature (1)..(171): Homolog of NCBI NO: 34895514 NR Description: putative bifunctional nuclease [Oryza sativa

SEQ ID NO: 104807 - protein, 151 aa, Arabidopsis thaliana; identical to SEQ ID NO: 25298
  peptide (1)..(151): Ceres Seq. ID no. 13615787
  misc_feature (1)..(151): Homolog of NCBI NO: 18415729 NR Description: endonuclease -related [Arabidopsis thaliana]
  misc_feature (1)..(151): Homolog of NCBI NO: 21593575 NR Description: endonuclease, putative [Arabidopsis thaliana]
  misc_feature (1)..(150): Homolog of NCBI NO: 22328857 NR Description: expressed protein [Arabidopsis thaliana]
  misc_feature (1)..(149): Homolog of NCBI NO: 18415727 NR Description: bifunctional nuclease -related [Arabidopsis >gi|21553881|gb|AAM62974.1| putative bifunctional nuclease
  misc_feature (1)..(149): Homolog of NCBI NO: 4099835 NR Description: bifunctional nuclease [Zinnia elegans]
  misc_feature (1)..(149): Homolog of NCBI NO: 7485717 NR Description: hypothetical protein F18E5.210 - Arabidopsis >gi|3080403|emb|CAA18723.1| hypothetical protein [Arabidopsis >gi|4455267|emb|CAB36803.1| putative bifunctional nuclease
  misc_feature (1)..(54): Homolog of NCBI NO: 7485718 NR Description: hypothetical protein F18E5.220 - Arabidopsis >gi|3080404|emb|CAA18724.1| putative protein [Arabidopsis >gi|4455268|emb|CAB36804.1| putative bifunctional nuclease
  misc_feature (113)..(138): Homolog of NCBI NO: 7485718 NR Description: hypothetical protein F18E5.220 - Arabidopsis >gi|3080404|emb|CAA18724.1| putative protein [Arabidopsis >gi|4455268|emb|CAB36804.1| putative bifunctional nuclease
  misc_feature (1)..(146): Homolog of NCBI NO: 9558456 NR Description: unnamed protein product [Oryza sativa (japonica
  misc_feature (1)..(146): Homolog of NCBI NO: 34895514 NR Description: putative bifunctional nuclease [Oryza sativa

SEQ ID NO: 104808 - DNA, 2146 bp, Arabidopsis thaliana
  misc_feature (1)..(2146): Ceres Seq. ID no. 13615788
  misc_feature: MA Experiment ID: 20000166 Result: Up-regulated in Transcription
  misc_feature: MA Experiment 20000166 PARAMETER Experiment Name: At_100uM_ABA_P Parameter: Age (day) Value: 14
  misc_feature: MA Experiment 20000166 PARAMETER Experiment Name: At_100uM_ABA_P Parameter: Organism Value: A. thaliana
  misc_feature: MA Experiment 20000166 PARAMETER Experiment Name: At_100uM_ABA_P Parameter: Plant Line Value: WS
  misc_feature: MA Experiment 20000166 PARAMETER Experiment Name: At_100uM_ABA_P Parameter: Timepoint (hr) Value: 1
  misc_feature: MA Experiment 20000166 PARAMETER Experiment Name: At_100uM_ABA_P Parameter: Tissue Value: Aerial
  misc_feature: MA Experiment 20000166 PARAMETER Experiment Name: At_100uM_ABA_P Parameter: Treatment Value: 100uM ABA vs. No Treatment
  misc_feature: MA Experiment ID: 20000169 Result: Up-regulated in Transcription
  misc_feature: MA Experiment 20000169 PARAMETER Experiment Name: At_100uM_ABA_P Parameter: Age (day) Value: 14
  misc_feature: MA Experiment 20000169 PARAMETER Experiment Name: At_100uM_ABA_P Parameter: Organism Value: A. thaliana
  misc_feature: MA Experiment 20000169 PARAMETER Experiment Name: At_100uM_ABA_P Parameter: Plant Line Value: WS
  misc_feature: MA Experiment 20000169 PARAMETER Experiment Name: At_100uM_ABA_P Parameter: Timepoint (hr) Value: 6
  misc_feature: MA Experiment 20000169 PARAMETER Experiment Name: At_100uM_ABA_P Parameter: Tissue Value: Aerial
  misc_feature: MA Experiment 20000169 PARAMETER Experiment Name: At_100uM_ABA_P Parameter: Treatment Value: 100uM ABA vs. No Treatment
  misc_feature: MA Experiment ID: 20000179 Result: Down-regulated in Transcription
  misc_feature: MA Experiment 20000179 PARAMETER Experiment Name: At_Germinating_Seeds_P Parameter: Age (hr) Value: 6 vs. 0
  misc_feature: MA Experiment 20000179 PARAMETER Experiment Name: At_Germinating_Seeds_P Parameter: Tissue Value: Germinating Seeds
  misc_feature: MA Experiment ID: 20000180 Result: Down-regulated in Transcription
  misc_feature: MA Experiment 20000180 PARAMETER Experiment Name: At_Germinating_Seeds_P Parameter: Age (hr) Value: 24 vs. 0
  misc_feature: MA Experiment 20000180 PARAMETER Experiment Name: At_Germinating_Seeds_P Parameter: Tissue Value: Germinating Seeds
  misc_feature: MA Experiment ID: 20000182 Result: Up-regulated in Transcription
  misc_feature: MA Experiment 20000182 PARAMETER Experiment Name: At_2mM_SA_P Parameter: Age (day) Value: 14
  misc_feature: MA Experiment 20000182 PARAMETER Experiment Name: At_2mM_SA_P Parameter: Organism Value: A. thaliana
  misc_feature: MA Experiment 20000182 PARAMETER Experiment Name: At_2mM_SA_P Parameter: Plant Line Value: WS
  misc_feature: MA Experiment 20000182 PARAMETER Experiment Name: At_2mM_SA_P Parameter: Timepoint (hr) Value: 6
  misc_feature: MA Experiment 20000182 PARAMETER Experiment Name: At_2mM_SA_P Parameter: Tissue Value: Aerial
  misc_feature: MA Experiment 20000182 PARAMETER Experiment Name: At_2mM_SA_P Parameter: Treatment Value: 2mM SA vs. No Treatment
  misc_feature: MA Experiment ID: 20000211 Result: Up-regulated in Transcription
  misc_feature: MA Experiment 20000211 PARAMETER Experiment Name: At_0.001percent_MeJA__P Parameter: Age (day) Value: 14
  misc_feature: MA Experiment 20000211 PARAMETER Experiment Name: At_0.001percent_MeJA__P Parameter: Organism Value: A. thaliana
  misc_feature: MA Experiment 20000211 PARAMETER Experiment Name: At_0.001percent_MeJA__P Parameter: Plant Line Value: WS
  misc_feature: MA Experiment 20000211 PARAMETER Experiment Name: At_0.001percent_MeJA__P Parameter: Timepoint (hr) Value: 1
  misc_feature: MA Experiment 20000211 PARAMETER Experiment Name: At_0.001percent_MeJA__P Parameter: Tissue Value: Aerial
  misc_feature: MA Experiment 20000211 PARAMETER Experiment Name: At_0.001percent_MeJA__P Parameter: Treatment Value: 0.001percent MeJA vs. No Treatment
  misc_feature: MA Experiment ID: 20000308 Result: Up-regulated in Transcription
  misc_feature: MA Experiment 20000308 PARAMETER Experiment Name: At_100mM_NaCl__P Parameter: Age (day) Value: 17
  misc_feature: MA Experiment 20000308 PARAMETER Experiment Name: At_100mM_NaCl__P Parameter: Organism Value: A. thaliana
  misc_feature: MA Experiment 20000308 PARAMETER Experiment Name: At_100mM_NaCl__P Parameter: Plant Line Value: WS
  misc_feature: MA Experiment 20000308 PARAMETER Experiment Name: At_100mM_NaCl__P Parameter: Timepoint (hr) Value: 72
  misc_feature: MA Experiment 20000308 PARAMETER Experiment Name: At_100mM_NaCl__P Parameter: Tissue Value: Whole Plant
  misc_feature: MA Experiment 20000308 PARAMETER Experiment Name: At_100mM_NaCl__P Parameter: Treatment Value: 100mM NaCl vs. No Treatment
  misc_feature: MA Experiment ID: 20000436 Result: Up-regulated in Transcription
  misc_feature: MA Experiment 20000436 PARAMETER Experiment Name: At_Drought_P Parameter: Age (day) Value: 7
  misc_feature: MA Experiment 20000436 PARAMETER Experiment Name: At_Drought_P Parameter: Organism Value: A. thaliana
  misc_feature: MA Experiment 20000436 PARAMETER Experiment Name: At_Drought_P Parameter: Plant Line Value: WS
  misc_feature: MA Experiment 20000436 PARAMETER Experiment Name: At_Drought_P Parameter: Timepoint (hr) Value: 12
  misc_feature: MA Experiment 20000436 PARAMETER Experiment Name: At_Drought_P Parameter: Tissue Value: Whole Plant
  misc_feature: MA Experiment 20000436 PARAMETER Experiment Name: At_Drought_P Parameter: Treatment Value: Drought vs. No Drought
  misc_feature: MA Experiment ID: 20000437 Result: Up-regulated in Transcription
  misc_feature: MA Experiment 20000437 PARAMETER Experiment Name: At_Drought_P Parameter: Age (day) Value: 8
  misc_feature: MA Experiment 20000437 PARAMETER Experiment Name: At_Drought_P Parameter: Organism Value: A. thaliana
  misc_feature: MA Experiment 20000437 PARAMETER Experiment Name: At_Drought_P Parameter: Plant Line Value: WS
  misc_feature: MA Experiment 20000437 PARAMETER Experiment Name: At_Drought_P Parameter: Timepoint (hr) Value: 24
  misc_feature: MA Experiment 20000437 PARAMETER Experiment Name: At_Drought_P Parameter: Tissue Value: Whole Plant
  misc_feature: MA Experiment 20000437 PARAMETER Experiment Name: At_Drought_P Parameter: Treatment Value: Drought vs. No Drought
  misc_feature: MA Experiment ID: 20000453 Result: Up-regulated in Transcription
  misc_feature: MA Experiment 20000453 PARAMETER Experiment Name: At_100uM_ABA_P Parameter: Age (day) Value: 15
  misc_feature: MA Experiment 20000453 PARAMETER Experiment Name: At_100uM_ABA_P Parameter: Organism Value: A. thaliana
  misc_feature: MA Experiment 20000453 PARAMETER Experiment Name: At_100uM_ABA_P Parameter: Plant Line Value: WS
  misc_feature: MA Experiment 20000453 PARAMETER Experiment Name: At_100uM_ABA_P Parameter: Timepoint (hr) Value: 24
  misc_feature: MA Experiment 20000453 PARAMETER Experiment Name: At_100uM_ABA_P Parameter: Tissue Value: Aerial
  misc_feature: MA Experiment 20000453 PARAMETER Experiment Name: At_100uM_ABA_P Parameter: Treatment Value: 100uM ABA vs. No Treatment
  misc_feature: MA Experiment ID: 20000460 Result: Up-regulated in Transcription
  misc_feature: MA Experiment 20000460 PARAMETER Experiment Name: At_10percent_PEG_P Parameter: Age (day) Value: 12
  misc_feature: MA Experiment 20000460 PARAMETER Experiment Name: At_10percent_PEG_P Parameter: Organism Value: A. thaliana
  misc_feature: MA Experiment 20000460 PARAMETER Experiment Name: At_10percent_PEG_P Parameter: Plant Line Value: WS
  misc_feature: MA Experiment 20000460 PARAMETER Experiment Name: At_10percent_PEG_P Parameter: Timepoint (day) Value: 12
  misc_feature: MA Experiment 20000460 PARAMETER Experiment Name: At_10percent_PEG_P Parameter: Tissue Value: Whole Plant
  misc_feature: MA Experiment 20000460 PARAMETER Experiment Name: At_10percent_PEG_P Parameter: Treatment Value: 10percent PEG vs. No Treatment
  misc_feature: MA Experiment ID: 20000527 Result: Down-regulated in Transcription
  misc_feature: MA Experiment 20000527 PARAMETER Experiment Name: At_10percent_PEG_P Parameter: Age (day) Value: 20
  misc_feature: MA Experiment 20000527 PARAMETER Experiment Name: At_10percent_PEG_P Parameter: Organism Value: A. thaliana
  misc_feature: MA Experiment 20000527 PARAMETER Experiment Name: At_10percent_PEG_P Parameter: Plant Line Value: WS
  misc_feature: MA Experiment 20000527 PARAMETER Experiment Name: At_10percent_PEG_P Parameter: Timepoint (day) Value: 20
  misc_feature: MA Experiment 20000527 PARAMETER Experiment Name: At_10percent_PEG_P Parameter: Tissue Value: Whole Plant
  misc_feature: MA Experiment 20000527 PARAMETER Experiment Name: At_10percent_PEG_P Parameter: Treatment Value: 10percent PEG vs. No Treatment
  misc_feature: MA Experiment ID: 20000573 Result: Up-regulated in Transcription
  misc_feature: MA Experiment 20000573 PARAMETER Experiment Name: At_100uM_ABA_Mutants__P Parameter: Organism Value: A. thaliana
  misc_feature: MA Experiment 20000573 PARAMETER Experiment Name: At_100uM_ABA_Mutants__P Parameter: Plant Line Value: CS22 vs. Ler wt
  misc_feature: MA Experiment 20000573 PARAMETER Experiment Name: At_100uM_ABA_Mutants__P Parameter: Timepoint (hr) Value: N/A
  misc_feature: MA Experiment 20000573 PARAMETER Experiment Name: At_100uM_ABA_Mutants__P Parameter: Tissue Value: Whole Plant
  misc_feature: MA Experiment 20000573 PARAMETER Experiment Name: At_100uM_ABA_Mutants__P Parameter: Treatment Value: None
  misc_feature: MA Experiment ID: 20000574 Result: Up-regulated in Transcription
  misc_feature: MA Experiment 20000574 PARAMETER Experiment Name: At_100uM_ABA_Mutants__P Parameter: Organism Value: A. thaliana
  misc_feature: MA Experiment 20000574 PARAMETER Experiment Name: At_100uM_ABA_Mutants__P Parameter: Plant Line Value: CS23 vs. Ler wt
  misc_feature: MA Experiment 20000574 PARAMETER Experiment Name: At_100uM_ABA_Mutants__P Parameter: Timepoint (hr) Value: N/A
  misc_feature: MA Experiment 20000574 PARAMETER Experiment Name: At_100uM_ABA_Mutants__P Parameter: Tissue Value: Whole Plant
  misc_feature: MA Experiment 20000574 PARAMETER Experiment Name: At_100uM_ABA_Mutants__P Parameter: Treatment Value: None
  misc_feature: MA Experiment ID: 20000576 Result: Down-regulated in Transcription
  misc_feature: MA Experiment 20000576 PARAMETER Experiment Name: At_100uM_ABA_Mutants__P Parameter: Organism Value: A. thaliana
  misc_feature: MA Experiment 20000576 PARAMETER Experiment Name: At_100uM_ABA_Mutants__P Parameter: Plant Line Value: CS23
  misc_feature: MA Experiment 20000576 PARAMETER Experiment Name: At_100uM_ABA_Mutants__P Parameter: Timepoint (hr) Value: 6
  misc_feature: MA Experiment 20000576 PARAMETER Experiment Name: At_100uM_ABA_Mutants__P Parameter: Tissue Value: Whole Plant
  misc_feature: MA Experiment 20000576 PARAMETER Experiment Name: At_100uM_ABA_Mutants__P Parameter: Treatment Value: 1uM ABA vs. No Treatment
  misc_feature: MA Experiment ID: 20000709 Result: Up-regulated in Transcription
  misc_feature: MA Experiment 20000709 PARAMETER Experiment Name: At_15mM_NH4NO3_L-to-H_P Parameter: Age (hr) Value: 14
  misc_feature: MA Experiment 20000709 PARAMETER Experiment Name: At_15mM_NH4NO3_L-to-H_P Parameter: Organism Value: A. thaliana
  misc_feature: MA Experiment 20000709 PARAMETER Experiment Name: At_15mM_NH4NO3_L-to-H_P Parameter: Plant Line Value: WS
  misc_feature: MA Experiment 20000709 PARAMETER Experiment Name: At_15mM_NH4NO3_L-to-H_P Parameter: Timepoint (hr) Value: 4
  misc_feature: MA Experiment 20000709 PARAMETER Experiment Name: At_15mM_NH4NO3_L-to-H_P Parameter: Tissue Value: Aerial
  misc_feature: MA Experiment 20000709 PARAMETER Experiment Name: At_15mM_NH4NO3_L-to-H_P Parameter: Treatment Value: 15mM NH4NO3 vs. 30mM Mannitol
  misc_feature: MA Experiment ID: 20001450 Result: Down-regulated in Transcription
  misc_feature: MA Experiment 20001450 PARAMETER Experiment Name: At_Far-red-induction_P Parameter: Age (day) Value: 7
  misc_feature: MA Experiment 20001450 PARAMETER Experiment Name: At_Far-red-induction_P Parameter: Light Value: Far-red vs. White
  misc_feature: MA Experiment 20001450 PARAMETER Experiment Name: At_Far-red-induction_P Parameter: Organism Value: A. thaliana
  misc_feature: MA Experiment 20001450 PARAMETER Experiment Name: At_Far-red-induction_P Parameter: Plant Line Value: Columbia
  misc_feature: MA Experiment 20001450 PARAMETER Experiment Name: At_Far-red-induction_P Parameter: Timepoint (hr) Value: 8
  misc_feature: MA Experiment 20001450 PARAMETER Experiment Name: At_Far-red-induction_P Parameter: Tissue Value: Whole Plant
  misc_feature: MA Experiment ID: 20001451 Result: Down-regulated in Transcription
  misc_feature: MA Experiment 20001451 PARAMETER Experiment Name: At_Far-red-induction_P Parameter: Age (day) Value: 7
  misc_feature: MA Experiment 20001451 PARAMETER Experiment Name: At_Far-red-induction_P Parameter: Light Value: Far-red vs. White
  misc_feature: MA Experiment 20001451 PARAMETER Experiment Name: At_Far-red-induction_P Parameter: Organism Value: A. thaliana
  misc_feature: MA Experiment 20001451 PARAMETER Experiment Name: At_Far-red-induction_P Parameter: Plant Line Value: Columbia
  misc_feature: MA Experiment 20001451 PARAMETER Experiment Name: At_Far-red-induction_P Parameter: Timepoint (hr) Value: 24
  misc_feature: MA Experiment 20001451 PARAMETER Experiment Name: At_Far-red-induction_P Parameter: Tissue Value: Whole Plant
  misc_feature: MA Experiment ID: 20001557 Result: Up-regulated in Transcription
  misc_feature: MA Experiment 20001557 PARAMETER Experiment Name: At_Drought_Soil_Dry_P Parameter: Age (day) Value: 27
  misc_feature: MA Experiment 20001557 PARAMETER Experiment Name: At_Drought_Soil_Dry_P Parameter: Organism Value: A. thaliana
  misc_feature: MA Experiment 20001557 PARAMETER Experiment Name: At_Drought_Soil_Dry_P Parameter: Plant Line Value: WS
  misc_feature: MA Experiment 20001557 PARAMETER Experiment Name: At_Drought_Soil_Dry_P Parameter: Post Timepoint (hr) Value: 3
  misc_feature: MA Experiment 20001557 PARAMETER Experiment Name: At_Drought_Soil_Dry_P Parameter: Post-Treatment Value: Re-Water vs. No Drought
  misc_feature: MA Experiment 20001557 PARAMETER Experiment Name: At_Drought_Soil_Dry_P Parameter: Timepoint (day) Value: 13
  misc_feature: MA Experiment 20001557 PARAMETER Experiment Name: At_Drought_Soil_Dry_P Parameter: Treatment Value: Drought vs. No Drought
  misc_feature: MA Experiment ID: 20001558 Result: Up-regulated in Transcription
  misc_feature: MA Experiment 20001558 PARAMETER Experiment Name: At_Drought_Soil_Dry_P Parameter: Age (day) Value: 27
  misc_feature: MA Experiment 20001558 PARAMETER Experiment Name: At_Drought_Soil_Dry_P Parameter: Organism Value: A. thaliana
  misc_feature: MA Experiment 20001558 PARAMETER Experiment Name: At_Drought_Soil_Dry_P Parameter: Plant Line Value: WS
  misc_feature: MA Experiment 20001558 PARAMETER Experiment Name: At_Drought_Soil_Dry_P Parameter: Post Timepoint (hr) Value: 6
  misc_feature: MA Experiment 20001558 PARAMETER Experiment Name: At_Drought_Soil_Dry_P Parameter: Post-Treatment Value: Re-Water vs. No Drought
  misc_feature: MA Experiment 20001558 PARAMETER Experiment Name: At_Drought_Soil_Dry_P Parameter: Timepoint (day) Value: 13
  misc_feature: MA Experiment 20001558 PARAMETER Experiment Name: At_Drought_Soil_Dry_P Parameter: Treatment Value: Drought vs. No Drought
  misc_feature: MA Experiment ID: 20001560 Result: Up-regulated in Transcription
  misc_feature: MA Experiment 20001560 PARAMETER Experiment Name: At_Drought_Soil_Dry_P Parameter: Age (day) Value: 28
  misc_feature: MA Experiment 20001560 PARAMETER Experiment Name: At_Drought_Soil_Dry_P Parameter: Organism Value: A. thaliana
  misc_feature: MA Experiment 20001560 PARAMETER Experiment Name: At_Drought_Soil_Dry_P Parameter: Plant Line Value: WS
  misc_feature: MA Experiment 20001560 PARAMETER Experiment Name: At_Drought_Soil_Dry_P Parameter: Post Timepoint (hr) Value: None
  misc_feature: MA Experiment 20001560 PARAMETER Experiment Name: At_Drought_Soil_Dry_P Parameter: Post-Treatment Value: None
  misc_feature: MA Experiment 20001560 PARAMETER Experiment Name: At_Drought_Soil_Dry_P Parameter: Timepoint (day) Value: 14
  misc_feature: MA Experiment 20001560 PARAMETER Experiment Name: At_Drought_Soil_Dry_P Parameter: Treatment Value: Drought vs. No Drought
  misc_feature: MA Experiment ID: 20001910 Result: Up-regulated in Transcription
  misc_feature: MA Experiment 20001910 PARAMETER Experiment Name: At_Drought_Reproduction_P Parameter: Age (day) Value: 37
  misc_feature: MA Experiment 20001910 PARAMETER Experiment Name: At_Drought_Reproduction_P Parameter: Organism Value: A. thaliana
  misc_feature: MA Experiment 20001910 PARAMETER Experiment Name: At_Drought_Reproduction_P Parameter: Plant Line Value: WS
  misc_feature: MA Experiment 20001910 PARAMETER Experiment Name: At_Drought_Reproduction_P Parameter: Timepoint (day) Value: 7
  misc_feature: MA Experiment 20001910 PARAMETER Experiment Name: At_Drought_Reproduction_P Parameter: Tissue Value: Flowers
  misc_feature: MA Experiment 20001910 PARAMETER Experiment Name: At_Drought_Reproduction_P Parameter: Treatment Value: Drought vs. No Drought
tactctcaatatcactattaaatatctttctcttttcacttcttcactttcctcgattcctgagttttcgatccttttgttctctaaccaccggtttcctctttaaccggtctctggataatcatcataatcattaggatcatcaagataaggaatctttttgagtatatctctacaccaaatcgaatctatggatcaaaaagttagacagtttgaggtttgcactcaagacggtagcgttgatcgtcacggcaatccagctatccgagctaataccggcaaatggctcactgctattctcattctagtgaatcaaggactagctacgcttgcgttcttcggtgtaggagtgaatttggttctgtttctgactcgagtgatgggacaagacaatgcagaagcggctaataatgttagtaaatggacaggaactgtctatatcttctctttgcttggtgctttcctcagtgactcttattggggacgttacaagacttgtgctatctttcaagcaagtttcgttgcagggttgatgatgttatctttatctactggtgcgttattgcttgaaccaagtggttgtggagttgaagattcgccgtgtaagcctcattcgacgtttaagacggttctgttttatctgtcggtgtatctaatcgcgttagggtatggtggttatcagccgaacatagctacttttggagctgatcagtttgatgcggaggattccgttgaaggacactcgaaaatcgcgtttttcagttacttttacttggctctgaatcttggatcgctcttctcaaatactgtcttgggttactttgaggatcaaggggaatggccgcttggattttgggcgtctgctggctctgcttttgcggggttagtgcttttcttgattggcacgccaaagtaccgacactttacgcctagagagagtccttggtctagattctgccaagtgttggttgctgcaacaagaaaggctaagattgatgtgcaccatgaagagttgaatctctatgattctgagactcaatacactggagataagaagattcttcataccaaaggcttcagattcttggatagagctgctattgttacacctgatgatgaggctgagaaagtagagagcggatcgaaatacgatccatggaggctctgctcggtgactcaagtcgaagaagtgaaatgtgtattaagactcttaccaatctggctctgcaccatcctctactctgtggttttcacccaaatggcttcactgttcgttgtgcaaggagcagcgatgaagacaaacatcaaaaacttccggattccagcttcaagcatgtctagtttcgacattctcagtgtcgccttcttcatcttcgcatacaggcggtttcttgatccactctttgcaagacttaacaaaacagaacgcaacaaaggtctcactgagcttcagaggatggggattgggcttgtgattgcgataatggcgatgatttccgcaggaatcgtagagatacacagactgaaaaataaggaaccggaaagtgctacttcgatctcaagctccagcactttgagcattttttggcaagtacctcagtacatgttgataggtgcatcagaagtgttcatgtacgttggtcaactcgagttcttcaacagccaagcaccaaccgggctaaagagctttgcaagcgcgctatgtatggcttcaatatctcttgggaactatgtaagcagtttgttagtttccattgtcatgaagatctctacaacagatgatgtgcatggctggattcctgaaaatctcaacaaaggacacttggagagattctacttccttttagctggtctaaccgctgctgatttcgtggtttacttgatttgtgccaaatggtacaagtatattaaatctgaagcaagtttctctgagtccgtaactgaagaggaggaagtctgagtcaggagctagagagttttgtgttttattttaatgctgtgaagctttttacagtaatttgtttaaagctgagcttgttctgtgatataaactggtcttattgtgtttttatttttgggttatactcttgtgcaaagtttagttgatgtttctcaataaaggataagttgattccacagttccaac

SEQ ID NO: 104809 - protein, 589 aa, Arabidopsis thaliana
  peptide (1)..(589): Ceres Seq. ID no. 13615789
  misc_feature (100)..(509): Pfam Name: POT family Pfam Description: POT family
  misc_feature (1)..(589): Homolog of NCBI NO: 30685529 NR Description: peptide transporter - like protein [Arabidopsis
  misc_feature (1)..(589): Homolog of NCBI NO: 26451333 NR Description: putative peptide transporter [Arabidopsis
  misc_feature (1)..(589): Homolog of NCBI NO: 7488004 NR Description: peptide transport protein homolog F17L22.140 -
  misc_feature (1)..(576): Homolog of NCBI NO: 30692706 NR Description: peptide transporter PTR2-B -related [Arabidopsis
  misc_feature (4)..(576): Homolog of NCBI NO: 25513683 NR Description: F5D14.23 protein - Arabidopsis thaliana Contains similarity to a peptide transport protein homolog gi|7488004 from Arabidopsis thaliana BAC F17L22 gb|AL035527. It
  misc_feature (9)..(575): Homolog of NCBI NO: 15232435 NR Description: peptide transport - like protein [Arabidopsis
  misc_feature (9)..(575): Homolog of NCBI NO: 7489404 NR Description: peptide transport protein - barley
  misc_feature (9)..(578): Homolog of NCBI NO: 34895718 NR Description: putative peptide transport protein [Oryza sativa
  misc_feature (12)..(575): Homolog of NCBI NO: 15076661 NR Description: peptide transporter [Oryza sativa (japonica >gi|15076663|dbj|BAB62327.1| peptide transporter [Oryza sativa
  misc_feature (9)..(571): Homolog of NCBI NO: 34394155 NR Description: putative peptide transport protein [Oryza sativa
MDQKVRQFEVCTQDGSVDRHGNPAIRANTGKWLTAILILVNQGLATLAFFGVGVNLVLFLTRVMGQDNAEAANNVSKWTGTVYIFSLLGAFLSDSYWGRYKTCAIFQASFVAGLMMLSLSTGALLLEPSGCGVEDSPCKPHSTFKTVLFYLSVYLIALGYGGYQPNIATFGADQFDAEDSVEGHSKIAFFSYFYLALNLGSLFSNTVLGYFEDQGEWPLGFWASAGSAFAGLVLFLIGTPKYRHFTPRESPWSRFCQVLVAATRKAKIDVHHEELNLYDSETQYTGDKKILHTKGFRFLDRAAIVTPDDEAEKVESGSKYDPWRLCSVTQVEEVKCVLRLLPIWLCTILYSVVFTQMASLFVVQGAAMKTNIKNFRIPASSMSSFDILSVAFFIFAYRRFLDPLFARLNKTERNKGLTELQRMGIGLVIAIMAMISAGIVEIHRLKNKEPESATSISSSSTLSIFWQVPQYMLIGASEVFMYVGQLEFFNSQAPTGLKSFASALCMASISLGNYVSSLLVSIVMKISTTDDVHGWIPENLNKGHLERFYFLLAGLTAADFVVYLICAKWYKYIKSEASFSESVTEEEEV

SEQ ID NO: 104810 - protein, 526 aa, Arabidopsis thaliana; identical to SEQ ID NO: 69606
  peptide (1)..(526): Ceres Seq. ID no. 13615790
  misc_feature (37)..(446): Pfam Name: POT family Pfam Description: POT family
  misc_feature (1)..(526): Homolog of NCBI NO: 30685529 NR Description: peptide transporter - like protein [Arabidopsis
  misc_feature (1)..(526): Homolog of NCBI NO: 26451333 NR Description: putative peptide transporter [Arabidopsis
  misc_feature (1)..(526): Homolog of NCBI NO: 7488004 NR Description: peptide transport protein homolog F17L22.140 -
  misc_feature (1)..(513): Homolog of NCBI NO: 30692706 NR Description: peptide transporter PTR2-B -related [Arabidopsis
  misc_feature (1)..(513): Homolog of NCBI NO: 25513683 NR Description: F5D14.23 protein - Arabidopsis thaliana Contains similarity to a peptide transport protein homolog gi|7488004 from Arabidopsis thaliana BAC F17L22 gb|AL035527. It
  misc_feature (1)..(512): Homolog of NCBI NO: 15232435 NR Description: peptide transport - like protein [Arabidopsis
  misc_feature (1)..(512): Homolog of NCBI NO: 7489404 NR Description: peptide transport protein - barley
  misc_feature (1)..(515): Homolog of NCBI NO: 34895718 NR Description: putative peptide transport protein [Oryza sativa
  misc_feature (1)..(512): Homolog of NCBI NO: 15076661 NR Description: peptide transporter [Oryza sativa (japonica >gi|15076663|dbj|BAB62327.1| peptide transporter [Oryza sativa
  misc_feature (1)..(508): Homolog of NCBI NO: 34394155 NR Description: putative peptide transport protein [Oryza sativa

SEQ ID NO: 104811 - protein, 475 aa, Arabidopsis thaliana; identical to SEQ ID NO: 69607
  peptide (1)..(475): Ceres Seq. ID no. 13615791
  misc_feature (1)..(395): Pfam Name: POT family Pfam Description: POT family
  misc_feature (1)..(475): Homolog of NCBI NO: 30685529 NR Description: peptide transporter - like protein [Arabidopsis
  misc_feature (1)..(475): Homolog of NCBI NO: 26451333 NR Description: putative peptide transporter [Arabidopsis
  misc_feature (1)..(475): Homolog of NCBI NO: 7488004 NR Description: peptide transport protein homolog F17L22.140 -
  misc_feature (1)..(462): Homolog of NCBI NO: 30692706 NR Description: peptide transporter PTR2-B -related [Arabidopsis
  misc_feature (1)..(462): Homolog of NCBI NO: 25513683 NR Description: F5D14.23 protein - Arabidopsis thaliana Contains similarity to a peptide transport protein homolog gi|7488004 from Arabidopsis thaliana BAC F17L22 gb|AL035527. It
  misc_feature (1)..(461): Homolog of NCBI NO: 15232435 NR Description: peptide transport - like protein [Arabidopsis
  misc_feature (1)..(461): Homolog of NCBI NO: 7489404 NR Description: peptide transport protein - barley
  misc_feature (1)..(464): Homolog of NCBI NO: 34895718 NR Description: putative peptide transport protein [Oryza sativa
  misc_feature (1)..(461): Homolog of NCBI NO: 15076661 NR Description: peptide transporter [Oryza sativa (japonica >gi|15076663|dbj|BAB62327.1| peptide transporter [Oryza sativa
  misc_feature (1)..(457): Homolog of NCBI NO: 34394155 NR Description: putative peptide transport protein [Oryza sativa

SEQ ID NO: 104812 - DNA, 1403 bp, Arabidopsis thaliana
  misc_feature (1)..(1403): Ceres Seq. ID no. 13615796
  misc_feature: MA Experiment ID: 108569 Result: Up-regulated in Transcription
  misc_feature: MA Experiment 108569 PARAMETER Experiment Name: At_0.001%_MeJA__cDNA_P Parameter: Timepoint (hr) Value: 6
  misc_feature: MA Experiment 108569 PARAMETER Experiment Name: At_0.001%_MeJA__cDNA_P Parameter: Tissue Value: Aerial
  misc_feature: MA Experiment 108569 PARAMETER Experiment Name: At_0.001%_MeJA__cDNA_P Parameter: Treatment Value: 0.001% MeJA vs. No Treatment
  misc_feature: MA Experiment ID: 108573 Result: Up-regulated in Transcription
  misc_feature: MA Experiment 108573 PARAMETER Experiment Name: At_Drought_cDNA_P Parameter: Timepoint (hr) Value: 6
  misc_feature: MA Experiment 108573 PARAMETER Experiment Name: At_Drought_cDNA_P Parameter: Tissue Value: Aerial
  misc_feature: MA Experiment 108573 PARAMETER Experiment Name: At_Drought_cDNA_P Parameter: Treatment Value: Drought vs. No Drought
  misc_feature: MA Experiment ID: 108595 Result: Down-regulated in Transcription
  misc_feature: MA Experiment 108595 PARAMETER Experiment Name: At_Ler-pi_Ovule_cDNA_P Parameter: Plant Line Value: null
  misc_feature: MA Experiment ID: 20000113 Result: Up-regulated in Transcription
  misc_feature: MA Experiment 20000113 PARAMETER Experiment Name: At_42deg_Heat_cDNA_P Parameter: Temperature (deg C) Value: 42 vs. 22
  misc_feature: MA Experiment 20000113 PARAMETER Experiment Name: At_42deg_Heat_cDNA_P Parameter: Timepoint (hr) Value: 8
  misc_feature: MA Experiment 20000113 PARAMETER Experiment Name: At_42deg_Heat_cDNA_P Parameter: Tissue Value: Aerial
  misc_feature: MA Experiment ID: 20000235 Result: Down-regulated in Transcription
  misc_feature: MA Experiment 20000235 PARAMETER Experiment Name: At_Siliques_P Parameter: Age (day) Value: 21
  misc_feature: MA Experiment 20000235 PARAMETER Experiment Name: At_Siliques_P Parameter: Organism Value: A. thaliana
  misc_feature: MA Experiment 20000235 PARAMETER Experiment Name: At_Siliques_P Parameter: Plant Line Value: WS
  misc_feature: MA Experiment 20000235 PARAMETER Experiment Name: At_Siliques_P Parameter: Tissue Value: 5-10mm Siliques vs. Whole Plant
  misc_feature: MA Experiment ID: 20000574 Result: Down-regulated in Transcription
  misc_feature: MA Experiment 20000574 PARAMETER Experiment Name: At_100uM_ABA_Mutants__P Parameter: Organism Value: A. thaliana
  misc_feature: MA Experiment 20000574 PARAMETER Experiment Name: At_100uM_ABA_Mutants__P Parameter: Plant Line Value: CS23 vs. Ler wt
  misc_feature: MA Experiment 20000574 PARAMETER Experiment Name: At_100uM_ABA_Mutants__P Parameter: Timepoint (hr) Value: N/A
  misc_feature: MA Experiment 20000574 PARAMETER Experiment Name: At_100uM_ABA_Mutants__P Parameter: Tissue Value: Whole Plant
  misc_feature: MA Experiment 20000574 PARAMETER Experiment Name: At_100uM_ABA_Mutants__P Parameter: Treatment Value: None
gcagatattcaaacaactcaatcctcattccctttgtttcgcctctctggatttcgaagagctgagagattagggtttctcgattttcgagattagagtctaatccccaccaccagcatagctgatatcctggaggagagaatgacggattcgggtctaatgatgccggcggagattgctggaattctaaccacggcgattacgagttggtgggatgatgttaatgagtcaactcagtggcaagatgggatctttttcgctctttgtggtgcttatgctcttgtttccgccgttgctcttgttcaactgataaggatccaaatgagagtgcctgagtatggttggactactcagaaggtgtttcatcttatgaactttgtcgtcaatggagttcgtgcggttctgtttggatttcacatgcaagtatttcttgttcatcccaaggctctttgctgggtactattggatcttcctggccttctctttttctcggcatacacgctgcttgtgctgttctgggcagagatatatcaccaggctagaagcttacctacagataagctgcggataacctatatttctgtcaacgtggctgtatatttggctcagattggtatctgggcatacatctgggtacatgataacagcactgtggagttagttggaaagatatttatcgcagttgtgtctttcatcgccgcattaggcttcttgctgtatggaggaagattgtttttcatgctaagaaggttccctatcgagtcaaaaggaagaaggaagaaactccacgaggttggatctgtgacagctatatgcttcacctgcttcctcataagatgcgttgtggtggctgtatcagcttttgacaaggatttaacacttgatgttcttgatcatccggttctgaacttaatctactatatggtggtagaagtacttccatcggcactagtcctcttcattctccgaaagctacctccaaagagagtatcagctcaataccatccgatccagtagaaacctttgtcactgaaccatctcacacggtgagtatgatgctgtttaagagaagagtaaagattaaaaaaaaaattggggcaaaaaatgaaaggtgaagaagaaatcggtgtggaatctgcgtgagtttttggaatgcacgttcatataaatgattttacagcttttagttgttgtagcccgccgtgacttttggtttggtagtttatgtctgttaaaattataaattgctcttctgctactttgaaaaatctggtcagtagtacaagaggtttaacatttgttgcgtcgatggttgattgttatgttatgtttggtaaaaaataaacgaatgctcttctccagtttcctttatgcttttgtcaactgttacatcttcttctcct

SEQ ID NO: 104813 - protein, 291 aa, Arabidopsis thaliana; identical to SEQ ID NO: 20955
  peptide (1)..(291): Ceres Seq. ID no. 13615797
  misc_feature (1)..(291): Homolog of NCBI NO: 18415765 NR Description: TOM1 protein [Arabidopsis thaliana] putative transmembrane protein [Arabidopsis thaliana] putative transmembrane protein [Arabidopsis thaliana]
  misc_feature (2)..(291): Homolog of NCBI NO: 34896982 NR Description: unknown protein [Oryza sativa]
  misc_feature (9)..(290): Homolog of NCBI NO: 34394174 NR Description: putative transmembrane protein(TOM3) [Oryza
  misc_feature (1)..(157): Homolog of NCBI NO: 7485647 NR Description: hypothetical protein F17L22.250 - Arabidopsis >gi|4455287|emb|CAB36823.1| putative protein [Arabidopsis >gi|7268976|emb|CAB81286.1| putative protein [Arabidopsis
  misc_feature (21)..(291): Homolog of NCBI NO: 18395323 NR Description: TOM3 protein [Arabidopsis thaliana] TOM3 [Arabidopsis thaliana] >gi|20197487|gb|AAC97216.2| expressed [Arabidopsis thaliana] >gi|26449544|dbj|BAC41898.1| unknown
  misc_feature (1)..(290): Homolog of NCBI NO: 37536460 NR Description: putative transmembrane protein [Oryza sativa
  misc_feature (21)..(291): Homolog of NCBI NO: 21537264 NR Description: unknown [Arabidopsis thaliana]
  misc_feature (54)..(277): Homolog of NCBI NO: 14091866 NR Description: Putative transmembrane protein [Oryza sativa]
  misc_feature (1)..(291): Homolog of NCBI NO: 7262697 NR Description: Contains similarity to an unknown protein from
  misc_feature (22)..(291): Homolog of NCBI NO: 18394129 NR Description: THH1 protein [Arabidopsis thaliana] THH1 protein [Arabidopsis thaliana] >gi|15706301|dbj|BAB68339.1|

SEQ ID NO: 104814 - protein, 285 aa, Arabidopsis thaliana; identical to SEQ ID NO: 20956
  peptide (1)..(285): Ceres Seq. ID no. 13615798
  misc_feature (1)..(285): Homolog of NCBI NO: 18415765 NR Description: TOM1 protein [Arabidopsis thaliana] putative transmembrane protein [Arabidopsis thaliana] putative transmembrane protein [Arabidopsis thaliana]
  misc_feature (1)..(285): Homolog of NCBI NO: 34896982 NR Description: unknown protein [Oryza sativa]
  misc_feature (3)..(284): Homolog of NCBI NO: 34394174 NR Description: putative transmembrane protein(TOM3) [Oryza
  misc_feature (1)..(151): Homolog of NCBI NO: 7485647 NR Description: hypothetical protein F17L22.250 - Arabidopsis >gi|4455287|emb|CAB36823.1| putative protein [Arabidopsis >gi|7268976|emb|CAB81286.1| putative protein [Arabidopsis
  misc_feature (15)..(285): Homolog of NCBI NO: 18395323 NR Description: TOM3 protein [Arabidopsis thaliana] TOM3 [Arabidopsis thaliana] >gi|20197487|gb|AAC97216.2| expressed [Arabidopsis thaliana] >gi|26449544|dbj|BAC41898.1| unknown
  misc_feature (1)..(284): Homolog of NCBI NO: 37536460 NR Description: putative transmembrane protein [Oryza sativa
  misc_feature (15)..(285): Homolog of NCBI NO: 21537264 NR Description: unknown [Arabidopsis thaliana]
  misc_feature (48)..(271): Homolog of NCBI NO: 14091866 NR Description: Putative transmembrane protein [Oryza sativa]
  misc_feature (1)..(285): Homolog of NCBI NO: 7262697 NR Description: Contains similarity to an unknown protein from
  misc_feature (16)..(285): Homolog of NCBI NO: 18394129 NR Description: THH1 protein [Arabidopsis thaliana] THH1 protein [Arabidopsis thaliana] >gi|15706301|dbj|BAB68339.1|

SEQ ID NO: 104815 - protein, 284 aa, Arabidopsis thaliana; identical to SEQ ID NO: 20957
  peptide (1)..(284): Ceres Seq. ID no. 13615799
  misc_feature (1)..(284): Homolog of NCBI NO: 18415765 NR Description: TOM1 protein [Arabidopsis thaliana] putative transmembrane protein [Arabidopsis thaliana] putative transmembrane protein [Arabidopsis thaliana]
  misc_feature (1)..(284): Homolog of NCBI NO: 34896982 NR Description: unknown protein [Oryza sativa]
  misc_feature (2)..(283): Homolog of NCBI NO: 34394174 NR Description: putative transmembrane protein(TOM3) [Oryza
  misc_feature (1)..(150): Homolog of NCBI NO: 7485647 NR Description: hypothetical protein F17L22.250 - Arabidopsis >gi|4455287|emb|CAB36823.1| putative protein [Arabidopsis >gi|7268976|emb|CAB81286.1| putative protein [Arabidopsis
  misc_feature (14)..(284): Homolog of NCBI NO: 18395323 NR Description: TOM3 protein [Arabidopsis thaliana] TOM3 [Arabidopsis thaliana] >gi|20197487|gb|AAC97216.2| expressed [Arabidopsis thaliana] >gi|26449544|dbj|BAC41898.1| unknown
  misc_feature (1)..(283): Homolog of NCBI NO: 37536460 NR Description: putative transmembrane protein [Oryza sativa
  misc_feature (14)..(284): Homolog of NCBI NO: 21537264 NR Description: unknown [Arabidopsis thaliana]
  misc_feature (47)..(270): Homolog of NCBI NO: 14091866 NR Description: Putative transmembrane protein [Oryza sativa]
  misc_feature (1)..(284): Homolog of NCBI NO: 7262697 NR Description: Contains similarity to an unknown protein from
  misc_feature (15)..(284): Homolog of NCBI NO: 18394129 NR Description: THH1 protein [Arabidopsis thaliana] THH1 protein [Arabidopsis thaliana] >gi|15706301|dbj|BAB68339.1|

SEQ ID NO: 104816 - DNA, 1937 bp, Arabidopsis thaliana
  misc_feature (1)..(1937): Ceres Seq. ID no. 13615807
  misc_feature: MA Experiment ID: 108434 Result: Down-regulated in Transcription
  misc_feature: MA Experiment 108434 PARAMETER Experiment Name: At_Root_Tips_cDNA_P Parameter: Tissue Value: Root Tips
  misc_feature: MA Experiment ID: 108572 Result: Up-regulated in Transcription
  misc_feature: MA Experiment 108572 PARAMETER Experiment Name: At_Drought_cDNA_P Parameter: Timepoint (hr) Value: 1
  misc_feature: MA Experiment 108572 PARAMETER Experiment Name: At_Drought_cDNA_P Parameter: Tissue Value: Aerial
  misc_feature: MA Experiment 108572 PARAMETER Experiment Name: At_Drought_cDNA_P Parameter: Treatment Value: Drought vs. No Drought
  misc_feature: MA Experiment ID: 108574 Result: Up-regulated in Transcription
  misc_feature: MA Experiment 108574 PARAMETER Experiment Name: At_Wounding__cDNA_P Parameter: Timepoint (hr) Value: 1
  misc_feature: MA Experiment 108574 PARAMETER Experiment Name: At_Wounding__cDNA_P Parameter: Tissue Value: Aerial
  misc_feature: MA Experiment 108574 PARAMETER Experiment Name: At_Wounding__cDNA_P Parameter: Treatment Value: Wounding vs. No Wounding
  misc_feature: MA Experiment ID: 108577 Result: Down-regulated in Transcription
  misc_feature: MA Experiment 108577 PARAMETER Experiment Name: At_42deg_Heat_cDNA_P Parameter: Temperature (deg C) Value: 42 vs. 22
  misc_feature: MA Experiment 108577 PARAMETER Experiment Name: At_42deg_Heat_cDNA_P Parameter: Timepoint (hr) Value: 6
  misc_feature: MA Experiment 108577 PARAMETER Experiment Name: At_42deg_Heat_cDNA_P Parameter: Tissue Value: Aerial
  misc_feature: MA Experiment ID: 108595 Result: Up-regulated in Transcription
  misc_feature: MA Experiment 108595 PARAMETER Experiment Name: At_Ler-pi_Ovule_cDNA_P Parameter: Plant Line Value: null
  misc_feature: MA Experiment ID: 108607 Result: Up-regulated in Transcription
  misc_feature: MA Experiment 108607 PARAMETER Experiment Name: At_100uM_ABA_cDNA_P Parameter: Timepoint (hr) Value: 4
  misc_feature: MA Experiment 108607 PARAMETER Experiment Name: At_100uM_ABA_cDNA_P Parameter: Tissue Value: Aerial
  misc_feature: MA Experiment 108607 PARAMETER Experiment Name: At_100uM_ABA_cDNA_P Parameter: Treatment Value: 100uM ABA vs. No Treatment
  misc_feature: MA Experiment ID: 20000068 Result: Up-regulated in Transcription
  misc_feature: MA Experiment ID: 20000069 Result: Up-regulated in Transcription
  misc_feature: MA Experiment 20000069 PARAMETER Experiment Name: At_100uM_ABA_Mutants_cDNA_P Parameter: Plant Line Value: CS23
  misc_feature: MA Experiment 20000069 PARAMETER Experiment Name: At_100uM_ABA_Mutants_cDNA_P Parameter: Timepoint (hr) Value: 6
  misc_feature: MA Experiment 20000069 PARAMETER Experiment Name: At_100uM_ABA_Mutants_cDNA_P Parameter: Tissue Value: Aerial
  misc_feature: MA Experiment 20000069 PARAMETER Experiment Name: At_100uM_ABA_Mutants_cDNA_P Parameter: Treatment Value: 100uM ABA vs. No Treatment
  misc_feature: MA Experiment ID: 20000070 Result: Up-regulated in Transcription
  misc_feature: MA Experiment 20000070 PARAMETER Experiment Name: At_100uM_ABA_Mutants_cDNA_P Parameter: Plant Line Value: CS24
  misc_feature: MA Experiment 20000070 PARAMETER Experiment Name: At_100uM_ABA_Mutants_cDNA_P Parameter: Timepoint (hr) Value: 6
  misc_feature: MA Experiment 20000070 PARAMETER Experiment Name: At_100uM_ABA_Mutants_cDNA_P Parameter: Tissue Value: Aerial
  misc_feature: MA Experiment 20000070 PARAMETER Experiment Name: At_100uM_ABA_Mutants_cDNA_P Parameter: Treatment Value: 100uM ABA vs. No Treatment
  misc_feature: MA Experiment ID: 20000071 Result: Up-regulated in Transcription
  misc_feature: MA Experiment 20000071 PARAMETER Experiment Name: At_100uM_ABA_Mutants_cDNA_P Parameter: Plant Line Value: CS8104
  misc_feature: MA Experiment 20000071 PARAMETER Experiment Name: At_100uM_ABA_Mutants_cDNA_P Parameter: Timepoint (hr) Value: 6
  misc_feature: MA Experiment 20000071 PARAMETER Experiment Name: At_100uM_ABA_Mutants_cDNA_P Parameter: Tissue Value: Aerial
  misc_feature: MA Experiment 20000071 PARAMETER Experiment Name: At_100uM_ABA_Mutants_cDNA_P Parameter: Treatment Value: 100uM ABA vs. No Treatment
  misc_feature: MA Experiment ID: 20000072 Result: Up-regulated in Transcription
  misc_feature: MA Experiment 20000072 PARAMETER Experiment Name: At_100uM_ABA_Mutants_cDNA_P Parameter: Plant Line Value: CS8105
  misc_feature: MA Experiment 20000072 PARAMETER Experiment Name: At_100uM_ABA_Mutants_cDNA_P Parameter: Timepoint (hr) Value: 6
  misc_feature: MA Experiment 20000072 PARAMETER Experiment Name: At_100uM_ABA_Mutants_cDNA_P Parameter: Tissue Value: Aerial
  misc_feature: MA Experiment 20000072 PARAMETER Experiment Name: At_100uM_ABA_Mutants_cDNA_P Parameter: Treatment Value: 100uM ABA vs. No Treatment
  misc_feature: MA Experiment ID: 20000087 Result: Up-regulated in Transcription
  misc_feature: MA Experiment 20000087 PARAMETER Experiment Name: At_100uM_ABA_Mutants_cDNA_P Parameter: Plant Line Value: WS
  misc_feature: MA Experiment 20000087 PARAMETER Experiment Name: At_100uM_ABA_Mutants_cDNA_P Parameter: Timepoint (hr) Value: 6
  misc_feature: MA Experiment 20000087 PARAMETER Experiment Name: At_100uM_ABA_Mutants_cDNA_P Parameter: Tissue Value: Aerial
  misc_feature: MA Experiment 20000087 PARAMETER Experiment Name: At_100uM_ABA_Mutants_cDNA_P Parameter: Treatment Value: 100uM ABA vs. No Treatment
  misc_feature: MA Experiment ID: 20000088 Result: Up-regulated in Transcription
  misc_feature: MA Experiment 20000088 PARAMETER Experiment Name: At_100uM_ABA_Mutants_cDNA_P Parameter: Plant Line Value: Landsberg
  misc_feature: MA Experiment 20000088 PARAMETER Experiment Name: At_100uM_ABA_Mutants_cDNA_P Parameter: Timepoint (hr) Value: 6
  misc_feature: MA Experiment 20000088 PARAMETER Experiment Name: At_100uM_ABA_Mutants_cDNA_P Parameter: Tissue Value: Aerial
  misc_feature: MA Experiment 20000088 PARAMETER Experiment Name: At_100uM_ABA_Mutants_cDNA_P Parameter: Treatment Value: 100uM ABA vs. No Treatment
  misc_feature: MA Experiment ID: 20000111 Result: Down-regulated in Transcription
  misc_feature: MA Experiment 20000111 PARAMETER Experiment Name: At_42deg_Heat_cDNA_P Parameter: Temperature (deg C) Value: 42 vs. 22
  misc_feature: MA Experiment 20000111 PARAMETER Experiment Name: At_42deg_Heat_cDNA_P Parameter: Timepoint (hr) Value: 6
  misc_feature: MA Experiment 20000111 PARAMETER Experiment Name: At_42deg_Heat_cDNA_P Parameter: Tissue Value: Aerial
  misc_feature: MA Experiment ID: 20000112 Result: Down-regulated in Transcription
  misc_feature: MA Experiment 20000112 PARAMETER Experiment Name: At_42deg_Heat_cDNA_P Parameter: Temperature (deg C) Value: 42 vs. 22
  misc_feature: MA Experiment 20000112 PARAMETER Experiment Name: At_42deg_Heat_cDNA_P Parameter: Timepoint (hr) Value: 2
  misc_feature: MA Experiment 20000112 PARAMETER Experiment Name: At_42deg_Heat_cDNA_P Parameter: Tissue Value: Aerial
  misc_feature: MA Experiment ID: 20000113 Result: Down-regulated in Transcription
  misc_feature: MA Experiment 20000113 PARAMETER Experiment Name: At_42deg_Heat_cDNA_P Parameter: Temperature (deg C) Value: 42 vs. 22
  misc_feature: MA Experiment 20000113 PARAMETER Experiment Name: At_42deg_Heat_cDNA_P Parameter: Timepoint (hr) Value: 8
  misc_feature: MA Experiment 20000113 PARAMETER Experiment Name: At_42deg_Heat_cDNA_P Parameter: Tissue Value: Aerial
  misc_feature: MA Experiment ID: 20000117 Result: Up-regulated in Transcription
  misc_feature: MA Experiment 20000117 PARAMETER Experiment Name: At_100uM_ABA_Mutants_cDNA_P Parameter: Plant Line Value: Columbia
  misc_feature: MA Experiment 20000117 PARAMETER Experiment Name: At_100uM_ABA_Mutants_cDNA_P Parameter: Timepoint (hr) Value: 6
  misc_feature: MA Experiment 20000117 PARAMETER Experiment Name: At_100uM_ABA_Mutants_cDNA_P Parameter: Tissue Value: Aerial
  misc_feature: MA Experiment 20000117 PARAMETER Experiment Name: At_100uM_ABA_Mutants_cDNA_P Parameter: Treatment Value: 100uM ABA vs. No Treatment
  misc_feature: MA Experiment ID: 20000144 Result: Down-regulated in Transcription
  misc_feature: MA Experiment 20000144 PARAMETER Experiment Name: At_42deg_Heat_cDNA_P Parameter: Temperature (deg C) Value: 42 vs. 22
  misc_feature: MA Experiment 20000144 PARAMETER Experiment Name: At_42deg_Heat_cDNA_P Parameter: Timepoint (hr) Value: 1
  misc_feature: MA Experiment 20000144 PARAMETER Experiment Name: At_42deg_Heat_cDNA_P Parameter: Tissue Value: Aerial
  misc_feature: MA Experiment ID: 20000180 Result: Up-regulated in Transcription
  misc_feature: MA Experiment 20000180 PARAMETER Experiment Name: At_Germinating_Seeds_P Parameter: Age (hr) Value: 24 vs. 0
  misc_feature: MA Experiment 20000180 PARAMETER Experiment Name: At_Germinating_Seeds_P Parameter: Tissue Value: Germinating Seeds
  misc_feature: MA Experiment ID: 20000211 Result: Up-regulated in Transcription
  misc_feature: MA Experiment 20000211 PARAMETER Experiment Name: At_0.001percent_MeJA__P Parameter: Age (day) Value: 14
  misc_feature: MA Experiment 20000211 PARAMETER Experiment Name: At_0.001percent_MeJA__P Parameter: Organism Value: A. thaliana
  misc_feature: MA Experiment 20000211 PARAMETER Experiment Name: At_0.001percent_MeJA__P Parameter: Plant Line Value: WS
  misc_feature: MA Experiment 20000211 PARAMETER Experiment Name: At_0.001percent_MeJA__P Parameter: Timepoint (hr) Value: 1
  misc_feature: MA Experiment 20000211 PARAMETER Experiment Name: At_0.001percent_MeJA__P Parameter: Tissue Value: Aerial
  misc_feature: MA Experiment 20000211 PARAMETER Experiment Name: At_0.001percent_MeJA__P Parameter: Treatment Value: 0.001percent MeJA vs. No Treatment
  misc_feature: MA Experiment ID: 20000234 Result: Up-regulated in Transcription
  misc_feature: MA Experiment 20000234 PARAMETER Experiment Name: At_Siliques_P Parameter: Age (day) Value: 21
  misc_feature: MA Experiment 20000234 PARAMETER Experiment Name: At_Siliques_P Parameter: Organism Value: A. thaliana
  misc_feature: MA Experiment 20000234 PARAMETER Experiment Name: At_Siliques_P Parameter: Plant Line Value: WS
  misc_feature: MA Experiment 20000234 PARAMETER Experiment Name: At_Siliques_P Parameter: Tissue Value: Less Than 5mm Siliques vs. Whole Plant
  misc_feature: MA Experiment ID: 20000264 Result: Up-regulated in Transcription
  misc_feature: MA Experiment 20000264 PARAMETER Experiment Name: At_Open_Flower_P Parameter: Age (day) Value: 21
  misc_feature: MA Experiment 20000264 PARAMETER Experiment Name: At_Open_Flower_P Parameter: Plant Line Value: WS
  misc_feature: MA Experiment 20000264 PARAMETER Experiment Name: At_Open_Flower_P Parameter: Tissue Value: Open Flower vs. Whole Plant
  misc_feature: MA Experiment ID: 20000265 Result: Up-regulated in Transcription
  misc_feature: MA Experiment 20000265 PARAMETER Experiment Name: At_Open_Flower_P Parameter: Age (day) Value: 21
  misc_feature: MA Experiment 20000265 PARAMETER Experiment Name: At_Open_Flower_P Parameter: Plant Line Value: WS
  misc_feature: MA Experiment 20000265 PARAMETER Experiment Name: At_Open_Flower_P Parameter: Tissue Value: Closed Flower vs. Whole Plant
  misc_feature: MA Experiment ID: 20000286 Result: Up-regulated in Transcription
  misc_feature: MA Experiment 20000286 PARAMETER Experiment Name: At_Open_Flower_P Parameter: Age (day) Value: 21
  misc_feature: MA Experiment 20000286 PARAMETER Experiment Name: At_Open_Flower_P Parameter: Plant Line Value: WS
  misc_feature: MA Experiment 20000286 PARAMETER Experiment Name: At_Open_Flower_P Parameter: Tissue Value: Half Open vs. Whole Plant
  misc_feature: MA Experiment ID: 20000495 Result: Up-regulated in Transcription
  misc_feature: MA Experiment 20000495 PARAMETER Experiment Name: At_Guard_Cells_P Parameter: Harvest Date Value: 8/2/2002
  misc_feature: MA Experiment 20000495 PARAMETER Experiment Name: At_Guard_Cells_P Parameter: Organism Value: A. thaliana
  misc_feature: MA Experiment 20000495 PARAMETER Experiment Name: At_Guard_Cells_P Parameter: Tissue Value: Guard Cells vs. Leaves
  misc_feature: MA Experiment ID: 20000496 Result: Up-regulated in Transcription
  misc_feature: MA Experiment 20000496 PARAMETER Experiment Name: At_Guard_Cells_P Parameter: Harvest Date Value: 7/19/2002
  misc_feature: MA Experiment 20000496 PARAMETER Experiment Name: At_Guard_Cells_P Parameter: Organism Value: Canola
  misc_feature: MA Experiment 20000496 PARAMETER Experiment Name: At_Guard_Cells_P Parameter: Tissue Value: Guard Cells vs. Leaves
  misc_feature: MA Experiment ID: 20001248 Result: Down-regulated in Transcription
  misc_feature: MA Experiment 20001248 PARAMETER Experiment Name: At_Far-red-induction_P Parameter: Age (day) Value: 7
  misc_feature: MA Experiment 20001248 PARAMETER Experiment Name: At_Far-red-induction_P Parameter: Light Value: Far-red vs. White
  misc_feature: MA Experiment 20001248 PARAMETER Experiment Name: At_Far-red-induction_P Parameter: Organism Value: A. thaliana
  misc_feature: MA Experiment 20001248 PARAMETER Experiment Name: At_Far-red-induction_P Parameter: Plant Line Value: Columbia
  misc_feature: MA Experiment 20001248 PARAMETER Experiment Name: At_Far-red-induction_P Parameter: Timepoint (hr) Value: 4
  misc_feature: MA Experiment 20001248 PARAMETER Experiment Name: At_Far-red-induction_P Parameter: Tissue Value: Whole Plant
  misc_feature: MA Experiment ID: 20001450 Result: Down-regulated in Transcription
  misc_feature: MA Experiment 20001450 PARAMETER Experiment Name: At_Far-red-induction_P Parameter: Age (day) Value: 7
  misc_feature: MA Experiment 20001450 PARAMETER Experiment Name: At_Far-red-induction_P Parameter: Light Value: Far-red vs. White
  misc_feature: MA Experiment 20001450 PARAMETER Experiment Name: At_Far-red-induction_P Parameter: Organism Value: A. thaliana
  misc_feature: MA Experiment 20001450 PARAMETER Experiment Name: At_Far-red-induction_P Parameter: Plant Line Value: Columbia
  misc_feature: MA Experiment 20001450 PARAMETER Experiment Name: At_Far-red-induction_P Parameter: Timepoint (hr) Value: 8
  misc_feature: MA Experiment 20001450 PARAMETER Experiment Name: At_Far-red-induction_P Parameter: Tissue Value: Whole Plant
  misc_feature: MA Experiment ID: 20001555 Result: Up-regulated in Transcription
  misc_feature: MA Experiment 20001555 PARAMETER Experiment Name: At_Drought_Soil_Dry_P Parameter: Age (day) Value: 24
  misc_feature: MA Experiment 20001555 PARAMETER Experiment Name: At_Drought_Soil_Dry_P Parameter: Organism Value: A. thaliana
  misc_feature: MA Experiment 20001555 PARAMETER Experiment Name: At_Drought_Soil_Dry_P Parameter: Plant Line Value: WS
  misc_feature: MA Experiment 20001555 PARAMETER Experiment Name: At_Drought_Soil_Dry_P Parameter: Post Timepoint (hr) Value: None
  misc_feature: MA Experiment 20001555 PARAMETER Experiment Name: At_Drought_Soil_Dry_P Parameter: Post-Treatment Value: None
  misc_feature: MA Experiment 20001555 PARAMETER Experiment Name: At_Drought_Soil_Dry_P Parameter: Timepoint (day) Value: 10
  misc_feature: MA Experiment 20001555 PARAMETER Experiment Name: At_Drought_Soil_Dry_P Parameter: Treatment Value: Drought vs. No Drought
  misc_feature: MA Experiment ID: 20001556 Result: Up-regulated in Transcription
  misc_feature: MA Experiment 20001556 PARAMETER Experiment Name: At_Drought_Soil_Dry_P Parameter: Age (day) Value: 26
  misc_feature: MA Experiment 20001556 PARAMETER Experiment Name: At_Drought_Soil_Dry_P Parameter: Organism Value: A. thaliana
  misc_feature: MA Experiment 20001556 PARAMETER Experiment Name: At_Drought_Soil_Dry_P Parameter: Plant Line Value: WS
  misc_feature: MA Experiment 20001556 PARAMETER Experiment Name: At_Drought_Soil_Dry_P Parameter: Post Timepoint (hr) Value: None
  misc_feature: MA Experiment 20001556 PARAMETER Experiment Name: At_Drought_Soil_Dry_P Parameter: Post-Treatment Value: None
  misc_feature: MA Experiment 20001556 PARAMETER Experiment Name: At_Drought_Soil_Dry_P Parameter: Timepoint (day) Value: 12
  misc_feature: MA Experiment 20001556 PARAMETER Experiment Name: At_Drought_Soil_Dry_P Parameter: Treatment Value: Drought vs. No Drought
  misc_feature: MA Experiment ID: 20001559 Result: Up-regulated in Transcription
  misc_feature: MA Experiment 20001559 PARAMETER Experiment Name: At_Drought_Soil_Dry_P Parameter: Age (day) Value: 28
  misc_feature: MA Experiment 20001559 PARAMETER Experiment Name: At_Drought_Soil_Dry_P Parameter: Organism Value: A. thaliana
  misc_feature: MA Experiment 20001559 PARAMETER Experiment Name: At_Drought_Soil_Dry_P Parameter: Plant Line Value: WS
  misc_feature: MA Experiment 20001559 PARAMETER Experiment Name: At_Drought_Soil_Dry_P Parameter: Post Timepoint (hr) Value: 29
  misc_feature: MA Experiment 20001559 PARAMETER Experiment Name: At_Drought_Soil_Dry_P Parameter: Post-Treatment Value: Re-Water vs. No Drought
  misc_feature: MA Experiment 20001559 PARAMETER Experiment Name: At_Drought_Soil_Dry_P Parameter: Timepoint (day) Value: 14
  misc_feature: MA Experiment 20001559 PARAMETER Experiment Name: At_Drought_Soil_Dry_P Parameter: Treatment Value: Drought vs. No Drought
atgtccacccataattcctcctcagtctttttataaacaaaccattttcttgcttttgctcgcaaaactttaaccttaaaaaccaaaccaaaaaaaacaaactaaattaaacttatggatgtgtcaaatgagacagtggaaagaaccgatctccggacacctttagtagatccggcagacacggaggtgaaacctctaccagaggtcgggctcgagagcgtattaacggagagtagcttgtcataccggaggcgtgtgtacttaggagcctgtatagagttgaaagtacttttccggttggcactaccggcgatacttatctatttagtcaactccggaatgggtatatccgctcgtgtcttcgccggtcatgttggtagtcaagaacttgcggccgcgtccatcggaaatagctgcttcaatctcgtctatggacttatgttaggtatgggcagtgcagtcgaaacactatgtggacaagcctatggagcccatcgttacgagatgcttgggatctatctccaaagagcaacaatagtcctcgctctagttggcttgcccatgacattactatacaccttctcgtaccctattctaatcctactaggggaacccaaaacggtgtcgtacatgggatccaaatacatcgccgggctcatccctcaaatcttcgcttacgccgtcaacttcacggcccaaaagttcctccaggcccaaagcgtggttgccccgagcgccttcatctcagccgccgccctcatcctccagatattgttgacgtggatcaccgtttatgtaatggacatgggctttatgggcatagcttatgttcttacaatttcttggtgggtcattgttggatcccagtgtttttacattgcggttagtcccaagtttagacacacgtggactggtcttagctggagatcgctccaaggtctttggagcttctttaaactctctgctggctcagctgttatgatttgtctggaaatgtggtattcgcagattcttgttcttcttgctggtttgctcgaaaatcctgctcgctctctagattctctttccatctgtatgtcaatttcagcattatcattcatggtctctgtcggctttaatgctgctgtaagtgtacggacaagtaatgagcttggagcaggaaatccgaaatcagcatggttctctacatggacggcgacttttgtatccttcgtgatctccgtgacggaagccctcgccgtgatttggtttcgtgattacgttagctacattttcacggaggatgctgacgtggctaaagccgtctctgacctctgtccttttcttgccatcaccatcattctcaacggaattcaacctgtcttgtccggagtggcagtgggatgtggatggcaaacatacgtggcatatgtgaatgttggttgttactacgttgttggtattccggttgggtgtattctcggcttcactttcgattttcaagccaagggaatatggaccgggatgattggaggtaccctcatgcaaacactcattttactttacgtcacgtaccgaacagattgggataaagaggtggaaaaagcgaggaaacgtttggatctgtgggacgacaagaaggagcctctccaaaactagttataacaagtttggtggagtgatagacaataaagaaaaggaaataagtgtcgtgtgtgcaggtgatttcaatgtacgtagcttttcatggttattatgcttgttctatggaaatagaacaattaaaatatatttttgtctgatggattattctttatttacgaaaagttgttcttaaattgatgtttctttcctttctcagaatgatttattatgtcttcactctatagacagttattaattatttattatggaattttgatgtaattgggtgtagtaagtaaagtagcacatcaatg

SEQ ID NO: 104817 - protein, 507 aa, Arabidopsis thaliana; identical to SEQ ID NO: 77565
  peptide (1)..(507): Ceres Seq. ID no. 13615808
  misc_feature (285)..(448): Pfam Name: MatE Pfam Description: MatE
  misc_feature (1)..(507): Homolog of NCBI NO: 18415793 NR Description: MATE efflux protein family [Arabidopsis thaliana] AT4g21910/T8O5_120 [Arabidopsis thaliana]
  misc_feature (1)..(507): Homolog of NCBI NO: 21553843 NR Description: unknown [Arabidopsis thaliana]
  misc_feature (1)..(467): Homolog of NCBI NO: 7487826 NR Description: hypothetical protein T8O5.120 - Arabidopsis >gi|2894569|emb|CAA17158.1| putative protein [Arabidopsis >gi|7269036|emb|CAB79146.1| putative protein [Arabidopsis
  misc_feature (76)..(496): Homolog of NCBI NO: 15234633 NR Description: MATE efflux protein family [Arabidopsis thaliana]
  misc_feature (3)..(505): Homolog of NCBI NO: 18407368 NR Description: MATE efflux protein family [Arabidopsis thaliana]
  misc_feature (3)..(505): Homolog of NCBI NO: 15081773 NR Description: At1g61890/F8K4_9 [Arabidopsis thaliana]
  misc_feature (4)..(505): Homolog of NCBI NO: 15221073 NR Description: MATE efflux protein family [Arabidopsis thaliana]
  misc_feature (4)..(505): Homolog of NCBI NO: 22655139 NR Description: unknown protein [Arabidopsis thaliana]
  misc_feature (16)..(503): Homolog of NCBI NO: 15233127 NR Description: MATE efflux protein family [Arabidopsis thaliana] gb|AAC28507.1~gene_id:MIL23.25~strong similarity to unknown
  misc_feature (16)..(503): Homolog of NCBI NO: 20466556 NR Description: integral membrane protein, putative [Arabidopsis

SEQ ID NO: 104818 - protein, 432 aa, Arabidopsis thaliana; identical to SEQ ID NO: 30285
  peptide (1)..(432): Ceres Seq. ID no. 13615809
  misc_feature (210)..(373): Pfam Name: MatE Pfam Description: MatE
  misc_feature (1)..(432): Homolog of NCBI NO: 18415793 NR Description: MATE efflux protein family [Arabidopsis thaliana] AT4g21910/T8O5_120 [Arabidopsis thaliana]
  misc_feature (1)..(432): Homolog of NCBI NO: 21553843 NR Description: unknown [Arabidopsis thaliana]
  misc_feature (1)..(392): Homolog of NCBI NO: 7487826 NR Description: hypothetical protein T8O5.120 - Arabidopsis >gi|2894569|emb|CAA17158.1| putative protein [Arabidopsis >gi|7269036|emb|CAB79146.1| putative protein [Arabidopsis
  misc_feature (1)..(421): Homolog of NCBI NO: 15234633 NR Description: MATE efflux protein family [Arabidopsis thaliana]
  misc_feature (1)..(430): Homolog of NCBI NO: 18407368 NR Description: MATE efflux protein family [Arabidopsis thaliana]
  misc_feature (1)..(430): Homolog of NCBI NO: 15081773 NR Description: At1g61890/F8K4_9 [Arabidopsis thaliana]
  misc_feature (1)..(430): Homolog of NCBI NO: 15221073 NR Description: MATE efflux protein family [Arabidopsis thaliana]
  misc_feature (1)..(430): Homolog of NCBI NO: 22655139 NR Description: unknown protein [Arabidopsis thaliana]
  misc_feature (1)..(428): Homolog of NCBI NO: 15233127 NR Description: MATE efflux protein family [Arabidopsis thaliana] gb|AAC28507.1~gene_id:MIL23.25~strong similarity to unknown
  misc_feature (1)..(428): Homolog of NCBI NO: 20466556 NR Description: integral membrane protein, putative [Arabidopsis

SEQ ID NO: 104819 - protein, 399 aa, Arabidopsis thaliana; identical to SEQ ID NO: 30286
  peptide (1)..(399): Ceres Seq. ID no. 13615810
  misc_feature (177)..(340): Pfam Name: MatE Pfam Description: MatE
  misc_feature (1)..(399): Homolog of NCBI NO: 18415793 NR Description: MATE efflux protein family [Arabidopsis thaliana] AT4g21910/T8O5_120 [Arabidopsis thaliana]
  misc_feature (1)..(399): Homolog of NCBI NO: 21553843 NR Description: unknown [Arabidopsis thaliana]
  misc_feature (1)..(359): Homolog of NCBI NO: 7487826 NR Description: hypothetical protein T8O5.120 - Arabidopsis >gi|2894569|emb|CAA17158.1| putative protein [Arabidopsis >gi|7269036|emb|CAB79146.1| putative protein [Arabidopsis
  misc_feature (1)..(388): Homolog of NCBI NO: 15234633 NR Description: MATE efflux protein family [Arabidopsis thaliana]
  misc_feature (1)..(397): Homolog of NCBI NO: 18407368 NR Description: MATE efflux protein family [Arabidopsis thaliana]
  misc_feature (1)..(397): Homolog of NCBI NO: 15081773 NR Description: At1g61890/F8K4_9 [Arabidopsis thaliana]
  misc_feature (1)..(397): Homolog of NCBI NO: 15221073 NR Description: MATE efflux protein family [Arabidopsis thaliana]
  misc_feature (1)..(397): Homolog of NCBI NO: 22655139 NR Description: unknown protein [Arabidopsis thaliana]
  misc_feature (1)..(395): Homolog of NCBI NO: 15233127 NR Description: MATE efflux protein family [Arabidopsis thaliana] gb|AAC28507.1~gene_id:MIL23.25~strong similarity to unknown
  misc_feature (1)..(395): Homolog of NCBI NO: 20466556 NR Description: integral membrane protein, putative [Arabidopsis

SEQ ID NO: 104820 - DNA, 690 bp, Arabidopsis thaliana
  misc_feature (1)..(690): Ceres Seq. ID no. 13615818
  misc_feature: MA Experiment ID: 108434 Result: Up-regulated in Transcription
  misc_feature: MA Experiment 108434 PARAMETER Experiment Name: At_Root_Tips_cDNA_P Parameter: Tissue Value: Root Tips
  misc_feature: MA Experiment ID: 108462 Result: Down-regulated in Transcription
  misc_feature: MA Experiment 108462 PARAMETER Experiment Name: At_Germinating_Seeds_cDNA_P Parameter: Age (day) Value: 2 vs. 0
  misc_feature: MA Experiment 108462 PARAMETER Experiment Name: At_Germinating_Seeds_cDNA_P Parameter: Tissue Value: Germinating Seeds
  misc_feature: MA Experiment ID: 108463 Result: Down-regulated in Transcription
  misc_feature: MA Experiment 108463 PARAMETER Experiment Name: At_Germinating_Seeds_cDNA_P Parameter: Age (day) Value: 3 vs. 0
  misc_feature: MA Experiment 108463 PARAMETER Experiment Name: At_Germinating_Seeds_cDNA_P Parameter: Tissue Value: Germinating Seeds
  misc_feature: MA Experiment ID: 108464 Result: Down-regulated in Transcription
  misc_feature: MA Experiment 108464 PARAMETER Experiment Name: At_Germinating_Seeds_cDNA_P Parameter: Age (day) Value: 4 vs. 0
  misc_feature: MA Experiment 108464 PARAMETER Experiment Name: At_Germinating_Seeds_cDNA_P Parameter: Tissue Value: Germinating Seeds
  misc_feature: MA Experiment ID: 108569 Result: Down-regulated in Transcription
  misc_feature: MA Experiment 108569 PARAMETER Experiment Name: At_0.001%_MeJA__cDNA_P Parameter: Timepoint (hr) Value: 6
  misc_feature: MA Experiment 108569 PARAMETER Experiment Name: At_0.001%_MeJA__cDNA_P Parameter: Tissue Value: Aerial
  misc_feature: MA Experiment 108569 PARAMETER Experiment Name: At_0.001%_MeJA__cDNA_P Parameter: Treatment Value: 0.001% MeJA vs. No Treatment
  misc_feature: MA Experiment ID: 108573 Result: Down-regulated in Transcription
  misc_feature: MA Experiment 108573 PARAMETER Experiment Name: At_Drought_cDNA_P Parameter: Timepoint (hr) Value: 6
  misc_feature: MA Experiment 108573 PARAMETER Experiment Name: At_Drought_cDNA_P Parameter: Tissue Value: Aerial
  misc_feature: MA Experiment 108573 PARAMETER Experiment Name: At_Drought_cDNA_P Parameter: Treatment Value: Drought vs. No Drought
  misc_feature: MA Experiment ID: 20000184 Result: Down-regulated in Transcription
  misc_feature: MA Experiment 20000184 PARAMETER Experiment Name: At_Shoots__P Parameter: Age (day) Value: 7
  misc_feature: MA Experiment 20000184 PARAMETER Experiment Name: At_Shoots__P Parameter: Tissue Value: Shoots vs. Whole Plant
  misc_feature: MA Experiment ID: 20000224 Result: Up-regulated in Transcription
  misc_feature: MA Experiment ID: 20000227 Result: Up-regulated in Transcription
  misc_feature: MA Experiment 20000227 PARAMETER Experiment Name: At_Root-Tips-vs-Tops_P Parameter: Tissue Value: Root Tips vs. Root Tops
  misc_feature: MA Experiment ID: 20001905 Result: Down-regulated in Transcription
  misc_feature: MA Experiment 20001905 PARAMETER Experiment Name: At_Drought_Reproduction_P Parameter: Age (day) Value: 40
  misc_feature: MA Experiment 20001905 PARAMETER Experiment Name: At_Drought_Reproduction_P Parameter: Organism Value: A. thaliana
  misc_feature: MA Experiment 20001905 PARAMETER Experiment Name: At_Drought_Reproduction_P Parameter: Plant Line Value: WS
  misc_feature: MA Experiment 20001905 PARAMETER Experiment Name: At_Drought_Reproduction_P Parameter: Timepoint (day) Value: 10
  misc_feature: MA Experiment 20001905 PARAMETER Experiment Name: At_Drought_Reproduction_P Parameter: Tissue Value: Rosettes
  misc_feature: MA Experiment 20001905 PARAMETER Experiment Name: At_Drought_Reproduction_P Parameter: Treatment Value: Drought vs. No Drought
aaaacaaaaaagaaataggaaaagggtttactaacgccaaaaaacccaacccttgtctgcgttcttcatcagcgccgcgttctcaaagttgctctcacagtctccgatctccaattttataagttatggctggaaaagctgcagaagctgtggcaaagacagtgacagggtttcaacatccatggagggcgaaactcgataagtacagaaccgagttgacgaaaggtgtgtggggttattgggagatgggagcatggaaaccgttagggataagtgcacgaaggagggctatgctgaggaaagaagtgttgactaatggagaagattggccttatgatccagagaggaaagctatgaggacaaagaggaaagggcataaatgtgatagaatttcagctgagaaaagagagaacactgcgaagcttatgttgaagatgcctcagatgttgcttgattataagaagagaaggtgggaaaagaagatgaaggaagaagagaaagctaaagaagacaagtaattgatttgttgagatcatgattactatagacttggttgatgaataagaataatttagtttgttgatcttatgaaatcttggaaggtttaagatcacaagtttgcttctgatatacttttgtatgatgtttttttatgtttgtttttaacagaacccaaaagtgtttgtggtt

SEQ ID NO: 104821 - protein, 130 aa, Arabidopsis thaliana; identical to SEQ ID NO: 34957
  peptide (1)..(130): Ceres Seq. ID no. 13615819
  misc_feature (1)..(130): Homolog of NCBI NO: 18415817 NR Description: expressed protein [Arabidopsis thaliana]

SEQ ID NO: 104822 - protein, 90 aa, Arabidopsis thaliana; identical to SEQ ID NO: 34958
  peptide (1)..(90): Ceres Seq. ID no. 13615820
  misc_feature (1)..(90): Homolog of NCBI NO: 18415817 NR Description: expressed protein [Arabidopsis thaliana]

SEQ ID NO: 104823 - protein, 75 aa, Arabidopsis thaliana; identical to SEQ ID NO: 34959
  peptide (1)..(75): Ceres Seq. ID no. 13615821
  misc_feature (1)..(75): Homolog of NCBI NO: 18415817 NR Description: expressed protein [Arabidopsis thaliana]

SEQ ID NO: 104824 - DNA, 1391 bp, Arabidopsis thaliana
  misc_feature (1)..(1391): Ceres Seq. ID no. 13615822
  misc_feature: MA Experiment ID: 108461 Result: Up-regulated in Transcription
  misc_feature: MA Experiment 108461 PARAMETER Experiment Name: At_Germinating_Seeds_cDNA_P Parameter: Age (day) Value: 1 vs. 0
  misc_feature: MA Experiment 108461 PARAMETER Experiment Name: At_Germinating_Seeds_cDNA_P Parameter: Tissue Value: Germinating Seeds
  misc_feature: MA Experiment ID: 108462 Result: Up-regulated in Transcription
  misc_feature: MA Experiment 108462 PARAMETER Experiment Name: At_Germinating_Seeds_cDNA_P Parameter: Age (day) Value: 2 vs. 0
  misc_feature: MA Experiment 108462 PARAMETER Experiment Name: At_Germinating_Seeds_cDNA_P Parameter: Tissue Value: Germinating Seeds
  misc_feature: MA Experiment ID: 108577 Result: Down-regulated in Transcription
  misc_feature: MA Experiment 108577 PARAMETER Experiment Name: At_42deg_Heat_cDNA_P Parameter: Temperature (deg C) Value: 42 vs. 22
  misc_feature: MA Experiment 108577 PARAMETER Experiment Name: At_42deg_Heat_cDNA_P Parameter: Timepoint (hr) Value: 6
  misc_feature: MA Experiment 108577 PARAMETER Experiment Name: At_42deg_Heat_cDNA_P Parameter: Tissue Value: Aerial
  misc_feature: MA Experiment ID: 108585 Result: Down-regulated in Transcription
  misc_feature: MA Experiment 108585 PARAMETER Experiment Name: At_5mM_NaNP_cDNA_P Parameter: Timepoint (hr) Value: 6
  misc_feature: MA Experiment 108585 PARAMETER Experiment Name: At_5mM_NaNP_cDNA_P Parameter: Tissue Value: Aerial
  misc_feature: MA Experiment 108585 PARAMETER Experiment Name: At_5mM_NaNP_cDNA_P Parameter: Treatment Value: null
  misc_feature: MA Experiment ID: 20000111 Result: Down-regulated in Transcription
  misc_feature: MA Experiment 20000111 PARAMETER Experiment Name: At_42deg_Heat_cDNA_P Parameter: Temperature (deg C) Value: 42 vs. 22
  misc_feature: MA Experiment 20000111 PARAMETER Experiment Name: At_42deg_Heat_cDNA_P Parameter: Timepoint (hr) Value: 6
  misc_feature: MA Experiment 20000111 PARAMETER Experiment Name: At_42deg_Heat_cDNA_P Parameter: Tissue Value: Aerial
  misc_feature: MA Experiment ID: 20000113 Result: Down-regulated in Transcription
  misc_feature: MA Experiment 20000113 PARAMETER Experiment Name: At_42deg_Heat_cDNA_P Parameter: Temperature (deg C) Value: 42 vs. 22
  misc_feature: MA Experiment 20000113 PARAMETER Experiment Name: At_42deg_Heat_cDNA_P Parameter: Timepoint (hr) Value: 8
  misc_feature: MA Experiment 20000113 PARAMETER Experiment Name: At_42deg_Heat_cDNA_P Parameter: Tissue Value: Aerial
  misc_feature: MA Experiment ID: 20000307 Result: Up-regulated in Transcription
  misc_feature: MA Experiment 20000307 PARAMETER Experiment Name: At_Germinating_Seeds_Sub_P Parameter: Age (hr) Value: 24 vs. 0
  misc_feature: MA Experiment 20000307 PARAMETER Experiment Name: At_Germinating_Seeds_Sub_P Parameter: Organism Value: A. thaliana
  misc_feature: MA Experiment 20000307 PARAMETER Experiment Name: At_Germinating_Seeds_Sub_P Parameter: Plant Line Value: WS
  misc_feature: MA Experiment 20000307 PARAMETER Experiment Name: At_Germinating_Seeds_Sub_P Parameter: Tissue Value: Germinating Seeds
  misc_feature: MA Experiment ID: 20000327 Result: Down-regulated in Transcription
  misc_feature: MA Experiment 20000327 PARAMETER Experiment Name: At_42deg_Heat_Sub_P Parameter: Age (day) Value: 14
  misc_feature: MA Experiment 20000327 PARAMETER Experiment Name: At_42deg_Heat_Sub_P Parameter: Organism Value: A. thaliana
  misc_feature: MA Experiment 20000327 PARAMETER Experiment Name: At_42deg_Heat_Sub_P Parameter: Plant Line Value: WS
  misc_feature: MA Experiment 20000327 PARAMETER Experiment Name: At_42deg_Heat_Sub_P Parameter: Temperature (deg C) Value: 42 vs. 22
  misc_feature: MA Experiment 20000327 PARAMETER Experiment Name: At_42deg_Heat_Sub_P Parameter: Timepoint (hr) Value: 1
  misc_feature: MA Experiment 20000327 PARAMETER Experiment Name: At_42deg_Heat_Sub_P Parameter: Tissue Value: Aerial
  misc_feature: MA Experiment ID: 20000328 Result: Down-regulated in Transcription
  misc_feature: MA Experiment 20000328 PARAMETER Experiment Name: At_42deg_Heat_Sub_P Parameter: Age (day) Value: 14
  misc_feature: MA Experiment 20000328 PARAMETER Experiment Name: At_42deg_Heat_Sub_P Parameter: Organism Value: A. thaliana
  misc_feature: MA Experiment 20000328 PARAMETER Experiment Name: At_42deg_Heat_Sub_P Parameter: Plant Line Value: WS
  misc_feature: MA Experiment 20000328 PARAMETER Experiment Name: At_42deg_Heat_Sub_P Parameter: Temperature (deg C) Value: 42 vs. 22
  misc_feature: MA Experiment 20000328 PARAMETER Experiment Name: At_42deg_Heat_Sub_P Parameter: Timepoint (hr) Value: 6
  misc_feature: MA Experiment 20000328 PARAMETER Experiment Name: At_42deg_Heat_Sub_P Parameter: Tissue Value: Aerial
  misc_feature: MA Experiment ID: 20000347 Result: Down-regulated in Transcription
  misc_feature: MA Experiment 20000347 PARAMETER Experiment Name: At_2mM_SA_Sub_P Parameter: Age (day) Value: 14
  misc_feature: MA Experiment 20000347 PARAMETER Experiment Name: At_2mM_SA_Sub_P Parameter: Organism Value: A. thaliana
  misc_feature: MA Experiment 20000347 PARAMETER Experiment Name: At_2mM_SA_Sub_P Parameter: Plant Line Value: WS
  misc_feature: MA Experiment 20000347 PARAMETER Experiment Name: At_2mM_SA_Sub_P Parameter: Timepoint (hr) Value: 6
  misc_feature: MA Experiment 20000347 PARAMETER Experiment Name: At_2mM_SA_Sub_P Parameter: Tissue Value: Aerial
  misc_feature: MA Experiment 20000347 PARAMETER Experiment Name: At_2mM_SA_Sub_P Parameter: Treatment Value: 2mM SA vs. No Treatment
  misc_feature: MA Experiment ID: 20000355 Result: Up-regulated in Transcription
  misc_feature: MA Experiment 20000355 PARAMETER Experiment Name: At_Siliques_Sub_P Parameter: Age (day) Value: 21
  misc_feature: MA Experiment 20000355 PARAMETER Experiment Name: At_Siliques_Sub_P Parameter: Organism Value: A. thaliana
  misc_feature: MA Experiment 20000355 PARAMETER Experiment Name: At_Siliques_Sub_P Parameter: Plant Line Value: WS
  misc_feature: MA Experiment 20000355 PARAMETER Experiment Name: At_Siliques_Sub_P Parameter: Tissue Value: Less Than 5mm Siliques vs. Whole Plant
  misc_feature: MA Experiment ID: 20000440 Result: Up-regulated in Transcription
  misc_feature: MA Experiment 20000440 PARAMETER Experiment Name: At_Closed-Flower__Sub_P Parameter: Tissue Value: Closed Flower vs. Whole Plant
aagattcagtagaaaaaattgaccacaagacaaaatatagatacaactatacagaaagagaagataggatgaacaagtgagtctcttctctctctcaaatccactccgtaataagttcataatctatcatccaccatggagaaaacatcaatgttctccattcacgaaggaaagccgattcgatgcaaagcagcagtatctagaaaaccaggagaagcattggtgatagaagagatccatgtggatccacctcaagcttatgaagttaggataaagatcatatgtacatctttatgtcataccgatgtttctttctcgaaaatagacagtggaccgcttgcaaggtttcctaggattctaggacacgaagcagtcggtgtgatcgagagcattggtgaacatgtgaatggatttcaacaaggtgacgtcgttttgccagtgtttcaccctcactgtgaagaatgtagagattgcaaatcctcaaagagcaactggtgcgcaagatttgccgacgatttcttatcaaacacgagacgatatggaatgacttcacgattcaaagactcctttggagaagatatttaccattttctctttgtctcgagtttttctgaatatacggtcgtcgacatcgcacatcttgtcaaaatctctcctgatattccggttgataaagcagcattgcttagctgcggtgtttccacaggaattggagcagcttggaaagtggctaacgtggaaaaaggctccaccgttgcagtttttggccttggtgctgttggacttgcggttggagaaggagccaggctgcgtggagccggcaagatcattggtgttgatctcaatccagaaaaattcgagctaggcaagaaatttggtttcacggatttcatcaattctaccttgtgtggagaaaataagattagcgaggtgattaaagaaatgactggaggaggagttgactatagtttcgaatgcgttggtttaccttctttattgaccgaagctttctccagcactcgcacgggttcaggaaaaacggtagtgttggggatagataagcatctaacgccagtaagtttgggtagctttgatcttctcagaggcagacatgtttgtggaagcttgtttggtggtcttaaacccaaactagatattccgattctggttgatcattacttaaaaaaggagcttaatttggatagttttattacacatgaattgaaatttgaggaaatcaacaaagctttcgatttattagtgcaaggaaagtctctccgctgcattctttggatgaacaagtgaagtgattaattatgttgaaactatatatgttgaaaaattgattaaatttctttatcaaaaagaaaagaattaattattactctttc

SEQ ID NO: 104825 - protein, 389 aa, Arabidopsis thaliana
  peptide (1)..(389): Ceres Seq. ID no. 13615823
  misc_feature (1)..(389): Homolog of NCBI NO: 18415840 NR Description: alcohol dehydrogenase (ADH), putative
  misc_feature (6)..(389): Homolog of NCBI NO: 21618210 NR Description: alcohol dehydrogenase like protein [Arabidopsis
  misc_feature (1)..(389): Homolog of NCBI NO: 11250327 NR Description: probable alcohol dehydrogenase (EC 1.1.1.1)
  misc_feature (1)..(389): Homolog of NCBI NO: 15219882 NR Description: alcohol dehydrogenase (ADH), putative
  misc_feature (8)..(389): Homolog of NCBI NO: 15219884 NR Description: alcohol dehydrogenase (ADH), putative
  misc_feature (1)..(389): Homolog of NCBI NO: 7705214 NR Description: alcohol dehydrogenase ADH [Lycopersicon
  misc_feature (1)..(389): Homolog of NCBI NO: 1076579 NR Description: probable alcohol dehydrogenase (EC 1.1.1.1) ADH3a
  misc_feature (13)..(387): Homolog of NCBI NO: 15238330 NR Description: alcohol dehydrogenase (ADH), putative thaliana] >gi|10177010|dbj|BAB10198.1| alcohol dehydrogenase thaliana] >gi|19698971|gb|AAL91221.1| alcohol dehydrogenase
  misc_feature (1)..(389): Homolog of NCBI NO: 7705215 NR Description: alcohol dehydrogenase ADH [Lycopersicon
  misc_feature (1)..(389): Homolog of NCBI NO: 1076580 NR Description: probable alcohol dehydrogenase (EC 1.1.1.1) ADH3b
MEKTSMFSIHEGKPIRCKAAVSRKPGEALVIEEIHVDPPQAYEVRIKIICTSLCHTDVSFSKIDSGPLARFPRILGHEAVGVIESIGEHVNGFQQGDVVLPVFHPHCEECRDCKSSKSNWCARFADDFLSNTRRYGMTSRFKDSFGEDIYHFLFVSSFSEYTVVDIAHLVKISPDIPVDKAALLSCGVSTGIGAAWKVANVEKGSTVAVFGLGAVGLAVGEGARLRGAGKIIGVDLNPEKFELGKKFGFTDFINSTLCGENKISEVIKEMTGGGVDYSFECVGLPSLLTEAFSSTRTGSGKTVVLGIDKHLTPVSLGSFDLLRGRHVCGSLFGGLKPKLDIPILVDHYLKKELNLDSFITHELKFEEINKAFDLLVQGKSLRCILWMNK

SEQ ID NO: 104826 - protein, 384 aa, Arabidopsis thaliana
  peptide (1)..(384): Ceres Seq. ID no. 13615824
  misc_feature (1)..(384): Homolog of NCBI NO: 18415840 NR Description: alcohol dehydrogenase (ADH), putative
  misc_feature (1)..(384): Homolog of NCBI NO: 21618210 NR Description: alcohol dehydrogenase like protein [Arabidopsis
  misc_feature (1)..(384): Homolog of NCBI NO: 11250327 NR Description: probable alcohol dehydrogenase (EC 1.1.1.1)
  misc_feature (1)..(384): Homolog of NCBI NO: 15219882 NR Description: alcohol dehydrogenase (ADH), putative
  misc_feature (3)..(384): Homolog of NCBI NO: 15219884 NR Description: alcohol dehydrogenase (ADH), putative
  misc_feature (1)..(384): Homolog of NCBI NO: 7705214 NR Description: alcohol dehydrogenase ADH [Lycopersicon
  misc_feature (1)..(384): Homolog of NCBI NO: 1076579 NR Description: probable alcohol dehydrogenase (EC 1.1.1.1) ADH3a
  misc_feature (8)..(382): Homolog of NCBI NO: 15238330 NR Description: alcohol dehydrogenase (ADH), putative thaliana] >gi|10177010|dbj|BAB10198.1| alcohol dehydrogenase thaliana] >gi|19698971|gb|AAL91221.1| alcohol dehydrogenase
  misc_feature (1)..(384): Homolog of NCBI NO: 7705215 NR Description: alcohol dehydrogenase ADH [Lycopersicon
  misc_feature (1)..(384): Homolog of NCBI NO: 1076580 NR Description: probable alcohol dehydrogenase (EC 1.1.1.1) ADH3b
MFSIHEGKPIRCKAAVSRKPGEALVIEEIHVDPPQAYEVRIKIICTSLCHTDVSFSKIDSGPLARFPRILGHEAVGVIESIGEHVNGFQQGDVVLPVFHPHCEECRDCKSSKSNWCARFADDFLSNTRRYGMTSRFKDSFGEDIYHFLFVSSFSEYTVVDIAHLVKISPDIPVDKAALLSCGVSTGIGAAWKVANVEKGSTVAVFGLGAVGLAVGEGARLRGAGKIIGVDLNPEKFELGKKFGFTDFINSTLCGENKISEVIKEMTGGGVDYSFECVGLPSLLTEAFSSTRTGSGKTVVLGIDKHLTPVSLGSFDLLRGRHVCGSLFGGLKPKLDIPILVDHYLKKELNLDSFITHELKFEEINKAFDLLVQGKSLRCILWMNK

SEQ ID NO: 104827 - protein, 253 aa, Arabidopsis thaliana
  peptide (1)..(253): Ceres Seq. ID no. 13615825
  misc_feature (1)..(253): Homolog of NCBI NO: 18415840 NR Description: alcohol dehydrogenase (ADH), putative
  misc_feature (1)..(253): Homolog of NCBI NO: 21618210 NR Description: alcohol dehydrogenase like protein [Arabidopsis
  misc_feature (1)..(253): Homolog of NCBI NO: 11250327 NR Description: probable alcohol dehydrogenase (EC 1.1.1.1)
  misc_feature (1)..(253): Homolog of NCBI NO: 15219882 NR Description: alcohol dehydrogenase (ADH), putative
  misc_feature (1)..(253): Homolog of NCBI NO: 15219884 NR Description: alcohol dehydrogenase (ADH), putative
  misc_feature (1)..(253): Homolog of NCBI NO: 7705214 NR Description: alcohol dehydrogenase ADH [Lycopersicon
  misc_feature (1)..(253): Homolog of NCBI NO: 1076579 NR Description: probable alcohol dehydrogenase (EC 1.1.1.1) ADH3a
  misc_feature (1)..(251): Homolog of NCBI NO: 15238330 NR Description: alcohol dehydrogenase (ADH), putative thaliana] >gi|10177010|dbj|BAB10198.1| alcohol dehydrogenase thaliana] >gi|19698971|gb|AAL91221.1| alcohol dehydrogenase
  misc_feature (1)..(253): Homolog of NCBI NO: 7705215 NR Description: alcohol dehydrogenase ADH [Lycopersicon
  misc_feature (1)..(253): Homolog of NCBI NO: 1076580 NR Description: probable alcohol dehydrogenase (EC 1.1.1.1) ADH3b
MTSRFKDSFGEDIYHFLFVSSFSEYTVVDIAHLVKISPDIPVDKAALLSCGVSTGIGAAWKVANVEKGSTVAVFGLGAVGLAVGEGARLRGAGKIIGVDLNPEKFELGKKFGFTDFINSTLCGENKISEVIKEMTGGGVDYSFECVGLPSLLTEAFSSTRTGSGKTVVLGIDKHLTPVSLGSFDLLRGRHVCGSLFGGLKPKLDIPILVDHYLKKELNLDSFITHELKFEEINKAFDLLVQGKSLRCILWMNK

SEQ ID NO: 104828 - DNA, 1269 bp, Arabidopsis thaliana
  misc_feature (1)..(1269): Ceres Seq. ID no. 13615826
  misc_feature: MA Experiment ID: 108434 Result: Up-regulated in Transcription
  misc_feature: MA Experiment 108434 PARAMETER Experiment Name: At_Root_Tips_cDNA_P Parameter: Tissue Value: Root Tips
  misc_feature: MA Experiment ID: 108463 Result: Down-regulated in Transcription
  misc_feature: MA Experiment 108463 PARAMETER Experiment Name: At_Germinating_Seeds_cDNA_P Parameter: Age (day) Value: 3 vs. 0
  misc_feature: MA Experiment 108463 PARAMETER Experiment Name: At_Germinating_Seeds_cDNA_P Parameter: Tissue Value: Germinating Seeds
  misc_feature: MA Experiment ID: 20000227 Result: Up-regulated in Transcription
  misc_feature: MA Experiment 20000227 PARAMETER Experiment Name: At_Root-Tips-vs-Tops_P Parameter: Tissue Value: Root Tips vs. Root Tops
gtgaacagtaaaactcccaaatttgcaaatgactcatcttcttcacctggagagaatctagggttccagatttactcttcgtcttcctctcttcgcttcttccccactgggattttccttttcttctccttttttctctacccatcgatctacacatcctgatcttcttagaagccccaatccttatacattccgggaacaaaaaacctagctttttttttattccggcttaaccagttttcgaaaaaccctagcttccatggcgaaaactcgacctggtgtcgcctccaaaattaagacgggaaggaaggagctggactcttataccatcaagggcaccaacaaagttgtgagagcgggagattgtgtgttgatgcgcccatcagatgctggtaaaccaccatatgtggcccgtgttgagaagattgaagctgatgcgaggaacaatgtgaaggtgcactgtcgatggtattaccgccctgaggagtcacttggtggtaggagacaatttcatggagccaaagagcttttcttgtctgaccattttgatgttcaaagtgcacacaccattgagggaaaatgcattgttcacaccttcaaaaactacacgaggcttgaaaacgttggggcagaggattattattgtagattcgagtacaaggctgctactggcgcatttacccctgatcgagttgctgtgtactgcaaatgtgaaatgccttacaatccagacgatctcatggtgcagtgtgaaggctgcaaagactggtatcatcctgcgtgtgttggcatgacgattgaagaagcaaagaagcttgatcactttgtatgtgctgaatgcagttctgatgacgatgtcaaaaaatcgcagaatgggtttacttcatctccagctgatgatgttaaggtggaaacgaagcgcagaaaaaggtaatcgcgagttcttggggataaaagccacaagagatgataagttatataacttgggaagctctttggtgcagattttagtaagttagggtttatctttgtcggtctttgtcgtctatggttgtgatgtctgtatggtgcgttccaaaacttagagaaatgtgaaaaagaggagagatcagagagatgatgaagaaaactatgttggcagaatcagttgtatagacttccgtggggtttaagttaactttaggtttgtttattgttatggtctgttgttattttgtggctgatgagaacagatgaacatgaacaacgcttttgacttgggtcatctca

SEQ ID NO: 104829 - protein, 224 aa, Arabidopsis thaliana; identical to SEQ ID NO: 37749
  peptide (1)..(224): Ceres Seq. ID no. 13615827
  misc_feature (34)..(144): Pfam Name: BAH domain Pfam Description: BAH domain
  misc_feature (34)..(217): Homolog of NCBI NO: 11292613 NR Description: receptor like protein - Arabidopsis thaliana
  misc_feature (39)..(217): Homolog of NCBI NO: 15234729 NR Description: receptor like protein (fragment) [Arabidopsis >gi|23296390|gb|AAN13058.1| putative receptor protein
  misc_feature (10)..(224): Homolog of NCBI NO: 37573088 NR Description: receptor like protein [Oryza sativa (japonica
  misc_feature (10)..(210): Homolog of NCBI NO: 34904940 NR Description: OSJNBa0077M12.13 [Oryza sativa (japonica
  misc_feature (10)..(224): Homolog of NCBI NO: 33146914 NR Description: putative ES43 protein [Oryza sativa (japonica
  misc_feature (39)..(221): Homolog of NCBI NO: 22328317 NR Description: ES43 protein -related [Arabidopsis thaliana]
  misc_feature (11)..(221): Homolog of NCBI NO: 18420377 NR Description: ES43 like protein [Arabidopsis thaliana] putative PHD finger transcription factor [Arabidopsis thaliana]
  misc_feature (11)..(221): Homolog of NCBI NO: 21595796 NR Description: ES43 like protein [Arabidopsis thaliana]
  misc_feature (11)..(217): Homolog of NCBI NO: 7484948 NR Description: ES43 protein homolog F19H22.200 - Arabidopsis
  misc_feature (1)..(224): Homolog of NCBI NO: 34897170 NR Description: putative DNA-binding protein [Oryza sativa

SEQ ID NO: 104830 - protein, 186 aa, Arabidopsis thaliana; identical to SEQ ID NO: 23851
  peptide (1)..(186): Ceres Seq. ID no. 13615828
  misc_feature (1)..(106): Pfam Name: BAH domain Pfam Description: BAH domain
  misc_feature (1)..(179): Homolog of NCBI NO: 11292613 NR Description: receptor like protein - Arabidopsis thaliana
  misc_feature (1)..(179): Homolog of NCBI NO: 15234729 NR Description: receptor like protein (fragment) [Arabidopsis >gi|23296390|gb|AAN13058.1| putative receptor protein
  misc_feature (1)..(186): Homolog of NCBI NO: 37573088 NR Description: receptor like protein [Oryza sativa (japonica
  misc_feature (1)..(172): Homolog of NCBI NO: 34904940 NR Description: OSJNBa0077M12.13 [Oryza sativa (japonica
  misc_feature (1)..(186): Homolog of NCBI NO: 33146914 NR Description: putative ES43 protein [Oryza sativa (japonica
  misc_feature (1)..(183): Homolog of NCBI NO: 22328317 NR Description: ES43 protein -related [Arabidopsis thaliana]
  misc_feature (1)..(183): Homolog of NCBI NO: 18420377 NR Description: ES43 like protein [Arabidopsis thaliana] putative PHD finger transcription factor [Arabidopsis thaliana]
  misc_feature (1)..(183): Homolog of NCBI NO: 21595796 NR Description: ES43 like protein [Arabidopsis thaliana]
  misc_feature (1)..(179): Homolog of NCBI NO: 7484948 NR Description: ES43 protein homolog F19H22.200 - Arabidopsis
  misc_feature (1)..(186): Homolog of NCBI NO: 34897170 NR Description: putative DNA-binding protein [Oryza sativa

SEQ ID NO: 104831 - DNA, 1632 bp, Arabidopsis thaliana
  misc_feature (1)..(1632): Ceres Seq. ID no. 13615841
  misc_feature: MA Experiment ID: 108573 Result: Up-regulated in Transcription
  misc_feature: MA Experiment 108573 PARAMETER Experiment Name: At_Drought_cDNA_P Parameter: Timepoint (hr) Value: 6
  misc_feature: MA Experiment 108573 PARAMETER Experiment Name: At_Drought_cDNA_P Parameter: Tissue Value: Aerial
  misc_feature: MA Experiment 108573 PARAMETER Experiment Name: At_Drought_cDNA_P Parameter: Treatment Value: Drought vs. No Drought
  misc_feature: MA Experiment ID: 20000093 Result: Up-regulated in Transcription
  misc_feature: MA Experiment 20000093 PARAMETER Experiment Name: At_42deg_Heat_cDNA_P Parameter: Temperature (deg C) Value: 42 vs. 22
  misc_feature: MA Experiment 20000093 PARAMETER Experiment Name: At_42deg_Heat_cDNA_P Parameter: Timepoint (hr) Value: 0.5
  misc_feature: MA Experiment 20000093 PARAMETER Experiment Name: At_42deg_Heat_cDNA_P Parameter: Tissue Value: Aerial
  misc_feature: MA Experiment ID: 20000184 Result: Up-regulated in Transcription
  misc_feature: MA Experiment 20000184 PARAMETER Experiment Name: At_Shoots__P Parameter: Age (day) Value: 7
  misc_feature: MA Experiment 20000184 PARAMETER Experiment Name: At_Shoots__P Parameter: Tissue Value: Shoots vs. Whole Plant
  misc_feature: MA Experiment ID: 20000224 Result: Down-regulated in Transcription
atctctccttctttagattcctttctatcttcttctcttctcaaagatctgattctctcaagtctcaccaatggcgataattctccgttcatcagatccactcctctcacgaatccatccggaaccacaagaaatcgaccacttcgataacctcccagactcaatcctcctcctcatcttcaacaacatcggcgacgtcaaagccttaggtcgttgctccgtcgtctccaaaagattccattccttaatccctcaagtcgaaaatgtcttcgttcgtgtcgattgcgttatctccgacgacgattcttcctctctcctctccgataaacctcgatccgcctccgccgcttctcctttctccgccattttccgtctcgtcttcaagccgttacaagctttgggacagttccttaaacgctcaggttcttcttctcttccttcaggatcatctccttcttcgttgttgattagtggtggtgatgatggagagattgaacaaggaggtgtaacgcatcattcaccgactcaggttttgaaaaacttcgatgagattaagtttcttaaaatcgagcttcctagtggtgaattagggattgatgatggtgttttattgaaatggagagctgaatttggttctactctcgagaattgtgtgatcctcggtgcttcctctgtgattccgccgacgaattcggataagacggaagcgagttcggctcccgtcgcggcggtggaagataatggaagtataccggaatcgttttatacaaacggagggcttaagctacgtgttgtatggactataagctctttgattgctgcttccgctagacattacttgttgcaaccgattatagcagagcataagacgcttgatagtttagtgcttactgatgttgatggtcaaggagttttgtgtatgaatcgagatcagttagaggaattgagagtgaaaccattgtcagcttcttcagcttctaagaggactcttgtacctgctttgaatatgagactttggtatgctccttctttggaattgcctgatgggactgtgttgaagggagctacgcttgtggcgattaggccgagtgagtcgaagaaggaggtgtgtgatgtgtcttgggtttcttctgcgtttgatgagccttatggggtagctgctaagatgttggttaagagaaggacttattgtcttgaaatgaattcgttctaaagcttgacgatttcgctaagtcggatctgaggtgaatgaatcacaaaggctaaccaggttttgaaagagagagactacaatgcataagatcagttttgtatgcagtgtgactaatcttagattcaccaatggagctcaattctatgtgttattggtctattggaaggttcgaattccgtctgcttggtcatcggaaaccgcattcgctggctgttttttgttttagctggcaaagcaatcatgtaagagcaagttttaatcttataaaatcttccatgtagcaagttttctttcattatttatgtgaatattgtttgtaggtaagagatacagttgctttgcttctccttgtcttttgtatacttgtcccaagttgtttaaaaaataatattgagcaatgtaaagtactttattacttt

SEQ ID NO: 104832 - protein, 380 aa, Arabidopsis thaliana
  peptide (1)..(380): Ceres Seq. ID no. 13615842
  misc_feature (1)..(380): Homolog of NCBI NO: 15236865 NR Description: F-box protein family [Arabidopsis thaliana]
  misc_feature (1)..(380): Homolog of NCBI NO: 15237391 NR Description: F-box protein family [Arabidopsis thaliana] gene_id:MCL19.23~pir||T04534~strong similarity to unknown protein thaliana] >gi|17979207|gb|AAL49842.1| unknown protein
  misc_feature (1)..(380): Homolog of NCBI NO: 18397400 NR Description: expressed protein [Arabidopsis thaliana]
  misc_feature (23)..(380): Homolog of NCBI NO: 34909910 NR Description: P0665A11.15 [Oryza sativa (japonica
  misc_feature (146)..(378): Homolog of NCBI NO: 34909194 NR Description: P0425G02.20 [Oryza sativa (japonica
  misc_feature (11)..(137): Homolog of NCBI NO: 34909194 NR Description: P0425G02.20 [Oryza sativa (japonica
  misc_feature (151)..(380): Homolog of NCBI NO: 15219845 NR Description: F-box protein family [Arabidopsis thaliana]
  misc_feature (22)..(76): Homolog of NCBI NO: 15219845 NR Description: F-box protein family [Arabidopsis thaliana]
  misc_feature (150)..(380): Homolog of NCBI NO: 18411823 NR Description: F-box protein family [Arabidopsis thaliana]
  misc_feature (22)..(135): Homolog of NCBI NO: 18411823 NR Description: F-box protein family [Arabidopsis thaliana]
MAIILRSSDPLLSRIHPEPQEIDHFDNLPDSILLLIFNNIGDVKALGRCSVVSKRFHSLIPQVENVFVRVDCVISDDDSSSLLSDKPRSASAASPFSAIFRLVFKPLQALGQFLKRSGSSSLPSGSSPSSLLISGGDDGEIEQGGVTHHSPTQVLKNFDEIKFLKIELPSGELGIDDGVLLKWRAEFGSTLENCVILGASSVIPPTNSDKTEASSAPVAAVEDNGSIPESFYTNGGLKLRVVWTISSLIAASARHYLLQPIIAEHKTLDSLVLTDVDGQGVLCMNRDQLEELRVKPLSASSASKRTLVPALNMRLWYAPSLELPDGTVLKGATLVAIRPSESKKEVCDVSWVSSAFDEPYGVAAKMLVKRRTYCLEMNSF

SEQ ID NO: 104833 - DNA, 1775 bp, Arabidopsis thaliana
  misc_feature (1)..(1775): Ceres Seq. ID no. 13615859
  misc_feature: MA Experiment ID: 108585 Result: Down-regulated in Transcription
  misc_feature: MA Experiment 108585 PARAMETER Experiment Name: At_5mM_NaNP_cDNA_P Parameter: Timepoint (hr) Value: 6
  misc_feature: MA Experiment 108585 PARAMETER Experiment Name: At_5mM_NaNP_cDNA_P Parameter: Tissue Value: Aerial
  misc_feature: MA Experiment 108585 PARAMETER Experiment Name: At_5mM_NaNP_cDNA_P Parameter: Treatment Value: null
  misc_feature: MA Experiment ID: 108595 Result: Up-regulated in Transcription
  misc_feature: MA Experiment 108595 PARAMETER Experiment Name: At_Ler-pi_Ovule_cDNA_P Parameter: Plant Line Value: null
  misc_feature: MA Experiment ID: 20000069 Result: Up-regulated in Transcription
  misc_feature: MA Experiment 20000069 PARAMETER Experiment Name: At_100uM_ABA_Mutants_cDNA_P Parameter: Plant Line Value: CS23
  misc_feature: MA Experiment 20000069 PARAMETER Experiment Name: At_100uM_ABA_Mutants_cDNA_P Parameter: Timepoint (hr) Value: 6
  misc_feature: MA Experiment 20000069 PARAMETER Experiment Name: At_100uM_ABA_Mutants_cDNA_P Parameter: Tissue Value: Aerial
  misc_feature: MA Experiment 20000069 PARAMETER Experiment Name: At_100uM_ABA_Mutants_cDNA_P Parameter: Treatment Value: 100uM ABA vs. No Treatment
  misc_feature: MA Experiment ID: 20000070 Result: Up-regulated in Transcription
  misc_feature: MA Experiment 20000070 PARAMETER Experiment Name: At_100uM_ABA_Mutants_cDNA_P Parameter: Plant Line Value: CS24
  misc_feature: MA Experiment 20000070 PARAMETER Experiment Name: At_100uM_ABA_Mutants_cDNA_P Parameter: Timepoint (hr) Value: 6
  misc_feature: MA Experiment 20000070 PARAMETER Experiment Name: At_100uM_ABA_Mutants_cDNA_P Parameter: Tissue Value: Aerial
  misc_feature: MA Experiment 20000070 PARAMETER Experiment Name: At_100uM_ABA_Mutants_cDNA_P Parameter: Treatment Value: 100uM ABA vs. No Treatment
  misc_feature: MA Experiment ID: 20000071 Result: Up-regulated in Transcription
  misc_feature: MA Experiment 20000071 PARAMETER Experiment Name: At_100uM_ABA_Mutants_cDNA_P Parameter: Plant Line Value: CS8104
  misc_feature: MA Experiment 20000071 PARAMETER Experiment Name: At_100uM_ABA_Mutants_cDNA_P Parameter: Timepoint (hr) Value: 6
  misc_feature: MA Experiment 20000071 PARAMETER Experiment Name: At_100uM_ABA_Mutants_cDNA_P Parameter: Tissue Value: Aerial
  misc_feature: MA Experiment 20000071 PARAMETER Experiment Name: At_100uM_ABA_Mutants_cDNA_P Parameter: Treatment Value: 100uM ABA vs. No Treatment
  misc_feature: MA Experiment ID: 20000072 Result: Up-regulated in Transcription
  misc_feature: MA Experiment 20000072 PARAMETER Experiment Name: At_100uM_ABA_Mutants_cDNA_P Parameter: Plant Line Value: CS8105
  misc_feature: MA Experiment 20000072 PARAMETER Experiment Name: At_100uM_ABA_Mutants_cDNA_P Parameter: Timepoint (hr) Value: 6
  misc_feature: MA Experiment 20000072 PARAMETER Experiment Name: At_100uM_ABA_Mutants_cDNA_P Parameter: Tissue Value: Aerial
  misc_feature: MA Experiment 20000072 PARAMETER Experiment Name: At_100uM_ABA_Mutants_cDNA_P Parameter: Treatment Value: 100uM ABA vs. No Treatment
  misc_feature: MA Experiment ID: 20000437 Result: Up-regulated in Transcription
  misc_feature: MA Experiment 20000437 PARAMETER Experiment Name: At_Drought_P Parameter: Age (day) Value: 8
  misc_feature: MA Experiment 20000437 PARAMETER Experiment Name: At_Drought_P Parameter: Organism Value: A. thaliana
  misc_feature: MA Experiment 20000437 PARAMETER Experiment Name: At_Drought_P Parameter: Plant Line Value: WS
  misc_feature: MA Experiment 20000437 PARAMETER Experiment Name: At_Drought_P Parameter: Timepoint (hr) Value: 24
  misc_feature: MA Experiment 20000437 PARAMETER Experiment Name: At_Drought_P Parameter: Tissue Value: Whole Plant
  misc_feature: MA Experiment 20000437 PARAMETER Experiment Name: At_Drought_P Parameter: Treatment Value: Drought vs. No Drought
  misc_feature: MA Experiment ID: 20001557 Result: Down-regulated in Transcription
  misc_feature: MA Experiment 20001557 PARAMETER Experiment Name: At_Drought_Soil_Dry_P Parameter: Age (day) Value: 27
  misc_feature: MA Experiment 20001557 PARAMETER Experiment Name: At_Drought_Soil_Dry_P Parameter: Organism Value: A. thaliana
  misc_feature: MA Experiment 20001557 PARAMETER Experiment Name: At_Drought_Soil_Dry_P Parameter: Plant Line Value: WS
  misc_feature: MA Experiment 20001557 PARAMETER Experiment Name: At_Drought_Soil_Dry_P Parameter: Post Timepoint (hr) Value: 3
  misc_feature: MA Experiment 20001557 PARAMETER Experiment Name: At_Drought_Soil_Dry_P Parameter: Post-Treatment Value: Re-Water vs. No Drought
  misc_feature: MA Experiment 20001557 PARAMETER Experiment Name: At_Drought_Soil_Dry_P Parameter: Timepoint (day) Value: 13
  misc_feature: MA Experiment 20001557 PARAMETER Experiment Name: At_Drought_Soil_Dry_P Parameter: Treatment Value: Drought vs. No Drought
  misc_feature: MA Experiment ID: 20001558 Result: Down-regulated in Transcription
  misc_feature: MA Experiment 20001558 PARAMETER Experiment Name: At_Drought_Soil_Dry_P Parameter: Age (day) Value: 27
  misc_feature: MA Experiment 20001558 PARAMETER Experiment Name: At_Drought_Soil_Dry_P Parameter: Organism Value: A. thaliana
  misc_feature: MA Experiment 20001558 PARAMETER Experiment Name: At_Drought_Soil_Dry_P Parameter: Plant Line Value: WS
  misc_feature: MA Experiment 20001558 PARAMETER Experiment Name: At_Drought_Soil_Dry_P Parameter: Post Timepoint (hr) Value: 6
  misc_feature: MA Experiment 20001558 PARAMETER Experiment Name: At_Drought_Soil_Dry_P Parameter: Post-Treatment Value: Re-Water vs. No Drought
  misc_feature: MA Experiment 20001558 PARAMETER Experiment Name: At_Drought_Soil_Dry_P Parameter: Timepoint (day) Value: 13
  misc_feature: MA Experiment 20001558 PARAMETER Experiment Name: At_Drought_Soil_Dry_P Parameter: Treatment Value: Drought vs. No Drought
gtctcatcacttcccactttcctctctgcatttgttgtctctctctcctgaaaacccttgaattttgctacacgatctctgaaacgtgtctctttgactgacttcaatcttctttatcacttaccgtttctgggttttatgaagcaactgagctaataaaaagcttcttcttagactcggaagaagataaaaaacagaatctttattgtttaaagcttccaaattcgagaagagaatttgaaacgaccaagttcaggatattcgtttcttcgtctactttggtctcttcctcttctctttcgaaaagggtttattctgtcttaaaagaaacctttttgagagggtaaaaaaagcttcaattttcagagaaacacaaaaggcagaaacagagaaaaacaaatcatctaattcatgaaacagggttcaatgaatagatcgtgtctctgtagtgtcttaatcaccactgctctgatttgtggtgcttacttcatttgcaatgcttatcttgctaaagactttaaagagaagttgctgaagtgggaaatcactgataagatgcataacagtactgataagatgcagaatgcaacaacaaccagtacatgcaagaatttcaataagccagtgggtactgaagcactaccgcaaggaattatcgagaaaacatcgaacctggaaacacaacatctatggaactacgatgacacaaaaaagagaaggcctaaccattcgatgagtttgttagccatggcggtcggtatcaagcaaaaggagctagttaacaaagttatccaaaagtttcctcctcgagatttcgcggtcatgctttttcattatgatggtgttgtcgatgactggaagcagtatccatggaataatcatgcgattcatgtttccgtgatgaatcaaacaaaatggtggttcgccaagcgattcttgcatcccgatatagttgcagagtacgagtatatatttctttgggacgaagatcttggtgttggtcatttcaatcctcaacgatatctatctattgtcaaagaagaggggcttgagatatcgcaacctgctcttgacacttcaaaatcagaagtgcatcatcctataaccgctcgtcgaaaaaaatcaaaagttcatagaagaatgtataaatacaaaggtagcgggcgatgtgatgaccatagcaccaatcctccttgcatcgggtgggtggaaatgatggcacctgttttctctagagctgcatggagatgttcttggtatatgattcagaatgatttgatccatgcttggggtctggatacgcagcttggttattgtgctcaaggtgaccgaaagaaaaatgtcggtgttgttgatgcggagtacataattcattatggtcttccaacgctcggtgtggttgaaaccgcttcaagcgctttgcggaatgagacagactcgaaatcaacggaatcattagagtctcgtgaagtggataatagaccagaagtgaggatgaaatcatttgtggagatgaagagattcaaggaacgttggaagaaagctgtgagggatgatacatgttgggttgatccgtattgaaatccgagcggtttaagtaaaccgaatcaaaccggattcttttccttgttgagtgtgctttgtggtccattgtataccattattttggtacatagattttgttttacttcgagaaaaattagtgtatttatgtgttttatggaccacagtgtagatttaacattttggagcattatacaaaagtgtttttgtgc

SEQ ID NO: 104834 - protein, 389 aa, Arabidopsis thaliana
  peptide (1)..(389): Ceres Seq. ID no. 13615860
  misc_feature (14)..(84): Pfam Name: Protein of unknown function (DUF707) Pfam Description: Protein of unknown function (DUF707)
  misc_feature (198)..(389): Homolog of NCBI NO: 15233917 NR Description: expressed protein [Arabidopsis thaliana]
  misc_feature (1)..(84): Homolog of NCBI NO: 15233917 NR Description: expressed protein [Arabidopsis thaliana]
  misc_feature (81)..(129): Homolog of NCBI NO: 15233917 NR Description: expressed protein [Arabidopsis thaliana]
  misc_feature (62)..(389): Homolog of NCBI NO: 19386727 NR Description: P0678F11.16 [Oryza sativa (japonica
  misc_feature (27)..(389): Homolog of NCBI NO: 22329488 NR Description: expressed protein [Arabidopsis thaliana] At1g11170/T28P6_16 [Arabidopsis thaliana]
  misc_feature (40)..(387): Homolog of NCBI NO: 15219892 NR Description: expressed protein [Arabidopsis thaliana]
  misc_feature (31)..(389): Homolog of NCBI NO: 33146749 NR Description: putative lysine ketoglutarate reductase
  misc_feature (69)..(387): Homolog of NCBI NO: 24636978 NR Description: lysine ketoglutarate reductase trans-splicing
  misc_feature (98)..(328): Homolog of NCBI NO: 34903420 NR Description: hypothetical protein~similar to Oryza sativa
  misc_feature (357)..(389): Homolog of NCBI NO: 34903420 NR Description: hypothetical protein~similar to Oryza sativa
MKQGSMNRSCLCSVLITTALICGAYFICNAYLAKDFKEKLLKWEITDKMHNSTDKMQNATTTSTCKNFNKPVGTEALPQGIIEKTSNLETQHLWNYDDTKKRRPNHSMSLLAMAVGIKQKELVNKVIQKFPPRDFAVMLFHYDGVVDDWKQYPWNNHAIHVSVMNQTKWWFAKRFLHPDIVAEYEYIFLWDEDLGVGHFNPQRYLSIVKEEGLEISQPALDTSKSEVHHPITARRKKSKVHRRMYKYKGSGRCDDHSTNPPCIGWVEMMAPVFSRAAWRCSWYMIQNDLIHAWGLDTQLGYCAQGDRKKNVGVVDAEYIIHYGLPTLGVVETASSALRNETDSKSTESLESREVDNRPEVRMKSFVEMKRFKERWKKAVRDDTCWVDPY

SEQ ID NO: 104835 - protein, 384 aa, Arabidopsis thaliana
  peptide (1)..(384): Ceres Seq. ID no. 13615861
  misc_feature (9)..(79): Pfam Name: Protein of unknown function (DUF707) Pfam Description: Protein of unknown function (DUF707)
  misc_feature (193)..(384): Homolog of NCBI NO: 15233917 NR Description: expressed protein [Arabidopsis thaliana]
  misc_feature (1)..(79): Homolog of NCBI NO: 15233917 NR Description: expressed protein [Arabidopsis thaliana]
  misc_feature (76)..(124): Homolog of NCBI NO: 15233917 NR Description: expressed protein [Arabidopsis thaliana]
  misc_feature (57)..(384): Homolog of NCBI NO: 19386727 NR Description: P0678F11.16 [Oryza sativa (japonica
  misc_feature (22)..(384): Homolog of NCBI NO: 22329488 NR Description: expressed protein [Arabidopsis thaliana] At1g11170/T28P6_16 [Arabidopsis thaliana]
  misc_feature (35)..(382): Homolog of NCBI NO: 15219892 NR Description: expressed protein [Arabidopsis thaliana]
  misc_feature (26)..(384): Homolog of NCBI NO: 33146749 NR Description: putative lysine ketoglutarate reductase
  misc_feature (64)..(382): Homolog of NCBI NO: 24636978 NR Description: lysine ketoglutarate reductase trans-splicing
  misc_feature (93)..(323): Homolog of NCBI NO: 34903420 NR Description: hypothetical protein~similar to Oryza sativa
  misc_feature (352)..(384): Homolog of NCBI NO: 34903420 NR Description: hypothetical protein~similar to Oryza sativa
MNRSCLCSVLITTALICGAYFICNAYLAKDFKEKLLKWEITDKMHNSTDKMQNATTTSTCKNFNKPVGTEALPQGIIEKTSNLETQHLWNYDDTKKRRPNHSMSLLAMAVGIKQKELVNKVIQKFPPRDFAVMLFHYDGVVDDWKQYPWNNHAIHVSVMNQTKWWFAKRFLHPDIVAEYEYIFLWDEDLGVGHFNPQRYLSIVKEEGLEISQPALDTSKSEVHHPITARRKKSKVHRRMYKYKGSGRCDDHSTNPPCIGWVEMMAPVFSRAAWRCSWYMIQNDLIHAWGLDTQLGYCAQGDRKKNVGVVDAEYIIHYGLPTLGVVETASSALRNETDSKSTESLESREVDNRPEVRMKSFVEMKRFKERWKKAVRDDTCWVDPY

SEQ ID NO: 104836 - protein, 341 aa, Arabidopsis thaliana
  peptide (1)..(341): Ceres Seq. ID no. 13615862
  misc_feature (150)..(341): Pfam Name: Protein of unknown function (DUF707) Pfam Description: Protein of unknown function (DUF707)
  misc_feature (150)..(341): Homolog of NCBI NO: 15233917 NR Description: expressed protein [Arabidopsis thaliana]
  misc_feature (1)..(36): Homolog of NCBI NO: 15233917 NR Description: expressed protein [Arabidopsis thaliana]
  misc_feature (33)..(81): Homolog of NCBI NO: 15233917 NR Description: expressed protein [Arabidopsis thaliana]
  misc_feature (14)..(341): Homolog of NCBI NO: 19386727 NR Description: P0678F11.16 [Oryza sativa (japonica
  misc_feature (1)..(341): Homolog of NCBI NO: 22329488 NR Description: expressed protein [Arabidopsis thaliana] At1g11170/T28P6_16 [Arabidopsis thaliana]
  misc_feature (1)..(339): Homolog of NCBI NO: 15219892 NR Description: expressed protein [Arabidopsis thaliana]
  misc_feature (1)..(341): Homolog of NCBI NO: 33146749 NR Description: putative lysine ketoglutarate reductase
  misc_feature (21)..(339): Homolog of NCBI NO: 24636978 NR Description: lysine ketoglutarate reductase trans-splicing
  misc_feature (50)..(280): Homolog of NCBI NO: 34903420 NR Description: hypothetical protein~similar to Oryza sativa
  misc_feature (309)..(341): Homolog of NCBI NO: 34903420 NR Description: hypothetical protein~similar to Oryza sativa
MHNSTDKMQNATTTSTCKNFNKPVGTEALPQGIIEKTSNLETQHLWNYDDTKKRRPNHSMSLLAMAVGIKQKELVNKVIQKFPPRDFAVMLFHYDGVVDDWKQYPWNNHAIHVSVMNQTKWWFAKRFLHPDIVAEYEYIFLWDEDLGVGHFNPQRYLSIVKEEGLEISQPALDTSKSEVHHPITARRKKSKVHRRMYKYKGSGRCDDHSTNPPCIGWVEMMAPVFSRAAWRCSWYMIQNDLIHAWGLDTQLGYCAQGDRKKNVGVVDAEYIIHYGLPTLGVVETASSALRNETDSKSTESLESREVDNRPEVRMKSFVEMKRFKERWKKAVRDDTCWVDPY

SEQ ID NO: 104837 - DNA, 1396 bp, Arabidopsis thaliana
  misc_feature (1)..(1396): Ceres Seq. ID no. 13615863
  misc_feature: MA Experiment ID: 20000184 Result: Down-regulated in Transcription
  misc_feature: MA Experiment 20000184 PARAMETER Experiment Name: At_Shoots__P Parameter: Age (day) Value: 7
  misc_feature: MA Experiment 20000184 PARAMETER Experiment Name: At_Shoots__P Parameter: Tissue Value: Shoots vs. Whole Plant
  misc_feature: MA Experiment ID: 20000185 Result: Up-regulated in Transcription
  misc_feature: MA Experiment 20000185 PARAMETER Experiment Name: At_Roots__P Parameter: Age (day) Value: 7 vs. 21
  misc_feature: MA Experiment 20000185 PARAMETER Experiment Name: At_Roots__P Parameter: Organism Value: A. thaliana
  misc_feature: MA Experiment 20000185 PARAMETER Experiment Name: At_Roots__P Parameter: Tissue Value: Roots vs. Whole Plant
  misc_feature: MA Experiment ID: 20000234 Result: Down-regulated in Transcription
  misc_feature: MA Experiment 20000234 PARAMETER Experiment Name: At_Siliques_P Parameter: Age (day) Value: 21
  misc_feature: MA Experiment 20000234 PARAMETER Experiment Name: At_Siliques_P Parameter: Organism Value: A. thaliana
  misc_feature: MA Experiment 20000234 PARAMETER Experiment Name: At_Siliques_P Parameter: Plant Line Value: WS
  misc_feature: MA Experiment 20000234 PARAMETER Experiment Name: At_Siliques_P Parameter: Tissue Value: Less Than 5mm Siliques vs. Whole Plant
  misc_feature: MA Experiment ID: 20000264 Result: Up-regulated in Transcription
  misc_feature: MA Experiment 20000264 PARAMETER Experiment Name: At_Open_Flower_P Parameter: Age (day) Value: 21
  misc_feature: MA Experiment 20000264 PARAMETER Experiment Name: At_Open_Flower_P Parameter: Plant Line Value: WS
  misc_feature: MA Experiment 20000264 PARAMETER Experiment Name: At_Open_Flower_P Parameter: Tissue Value: Open Flower vs. Whole Plant
  misc_feature: MA Experiment ID: 20000265 Result: Up-regulated in Transcription
  misc_feature: MA Experiment 20000265 PARAMETER Experiment Name: At_Open_Flower_P Parameter: Age (day) Value: 21
  misc_feature: MA Experiment 20000265 PARAMETER Experiment Name: At_Open_Flower_P Parameter: Plant Line Value: WS
  misc_feature: MA Experiment 20000265 PARAMETER Experiment Name: At_Open_Flower_P Parameter: Tissue Value: Closed Flower vs. Whole Plant
  misc_feature: MA Experiment ID: 20000438 Result: Down-regulated in Transcription
  misc_feature: MA Experiment 20000438 PARAMETER Experiment Name: At_Shoots__P Parameter: Age (day) Value: 14
  misc_feature: MA Experiment 20000438 PARAMETER Experiment Name: At_Shoots__P Parameter: Tissue Value: Shoots vs. Whole Plant
  misc_feature: MA Experiment ID: 20000439 Result: Up-regulated in Transcription
  misc_feature: MA Experiment 20000439 PARAMETER Experiment Name: At_Roots__P Parameter: Age (day) Value: 14 vs. 21
  misc_feature: MA Experiment 20000439 PARAMETER Experiment Name: At_Roots__P Parameter: Organism Value: A. thaliana
  misc_feature: MA Experiment 20000439 PARAMETER Experiment Name: At_Roots__P Parameter: Tissue Value: Roots vs. Whole Plant
  misc_feature: MA Experiment ID: 20000794 Result: Up-regulated in Transcription
  misc_feature: MA Experiment 20000794 PARAMETER Experiment Name: At_Petals_P Parameter: Age (day) Value: 23-25 days
  misc_feature: MA Experiment 20000794 PARAMETER Experiment Name: At_Petals_P Parameter: Plant Line Value: WS
  misc_feature: MA Experiment 20000794 PARAMETER Experiment Name: At_Petals_P Parameter: Tissue Value: Petals vs. Whole plant
  misc_feature: MA Experiment ID: 20001904 Result: Up-regulated in Transcription
  misc_feature: MA Experiment 20001904 PARAMETER Experiment Name: At_Drought_Reproduction_P Parameter: Age (day) Value: 37
  misc_feature: MA Experiment 20001904 PARAMETER Experiment Name: At_Drought_Reproduction_P Parameter: Organism Value: A. thaliana
  misc_feature: MA Experiment 20001904 PARAMETER Experiment Name: At_Drought_Reproduction_P Parameter: Plant Line Value: WS
  misc_feature: MA Experiment 20001904 PARAMETER Experiment Name: At_Drought_Reproduction_P Parameter: Timepoint (day) Value: 7
  misc_feature: MA Experiment 20001904 PARAMETER Experiment Name: At_Drought_Reproduction_P Parameter: Tissue Value: Rosettes
  misc_feature: MA Experiment 20001904 PARAMETER Experiment Name: At_Drought_Reproduction_P Parameter: Treatment Value: Drought vs. No Drought
  misc_feature: MA Experiment ID: 20001911 Result: Down-regulated in Transcription
  misc_feature: MA Experiment 20001911 PARAMETER Experiment Name: At_Drought_Reproduction_P Parameter: Age (day) Value: 40
  misc_feature: MA Experiment 20001911 PARAMETER Experiment Name: At_Drought_Reproduction_P Parameter: Organism Value: A. thaliana
  misc_feature: MA Experiment 20001911 PARAMETER Experiment Name: At_Drought_Reproduction_P Parameter: Plant Line Value: WS
  misc_feature: MA Experiment 20001911 PARAMETER Experiment Name: At_Drought_Reproduction_P Parameter: Timepoint (day) Value: 10
  misc_feature: MA Experiment 20001911 PARAMETER Experiment Name: At_Drought_Reproduction_P Parameter: Tissue Value: Flowers
  misc_feature: MA Experiment 20001911 PARAMETER Experiment Name: At_Drought_Reproduction_P Parameter: Treatment Value: Drought vs. No Drought
atggaggaagaagacaagaaagtgatgaagtgttttagcttcaagagaatcatgaagaggaagaagaaagaggaggaggaggagaagttgatagtgactagagaattcgcgaagagatggcgagatctgagcggtcaaaaccattggaaagggatgttacagccgttggatcaagatctccgggaatatatcatacattatggtgagatggctcaggctggttacgatactttcaatatcaacaccgaatctcagttcgccggtgctagcatctactctagaaaagacttcttcgccaaggttggtttagagatagcacacccgtacacaaagtacaaagtgacgaagtttatatacgcgacatccgatatccacgtgcctgagtcattcttattgttcccaatttcacgtgagggatggtcaaaggaatcaaattggatgggttacgtggcggtaacagacgaccaaggcacggcacttcttggtcggagagatatcgtggtttcttggagaggctcagtgcaaccacttgaatgggtcgaagacttcgagtttggtttagtcaacgccataaaaatcttcggtgaaagaaacgatcaagtacaaattcatcaaggttggtattcaatctacatgtctcaagatgaacgatcaccttttactaagaccaatgctcgtgaccaggtattgcgagaggttggaagattgttggagaagtataaggacgaagaagttagtataactatatgtggtcatagtcttggagctgcactcgcgacgcttagtgccactgatattgtggctaatggttataaccgaccaaagagccgtcctgacaagtcttgtcctgttactgcctttgtctttgctagtcctcgtgttggggattcagactttaggaaactcttttccggattggaagatatccgagtgttacggacaaggaatctaccggacgtaattccgatctatccaccgataggttactccgaggtaggagatgagtttccaatagacacaagaaagtcaccatacatgaaatctcctggaaacctcgcaacctttcactgcttagagggttacttgcatggcgttgccgggactcaaggaacgaacaaagctgacttattcagactcgatgtggaaagagccatcggattggtcaataaatcagtggatgggttaaaagacgagtgtatggtcccagggaaatggagggttcttaaaaacaaaggtatggcccaacaagacgatggatcttgggagttagtggaccatgagattgatgataatgaagatttggatttctgatttcttggtcattttttctttgtcaagtgttgatgtttggaaacatactattttatctatttaacgttgtattttatgataattt

SEQ ID NO: 104838 - protein, 436 aa, Arabidopsis thaliana
  peptide (1)..(436): Ceres Seq. ID no. 13615864
  misc_feature (18)..(436): Homolog of NCBI NO: 15233922 NR Description: lipase (class 3) family [Arabidopsis thaliana]
  misc_feature (37)..(430): Homolog of NCBI NO: 34911830 NR Description: lipase-like protein [Oryza sativa (japonica
  misc_feature (38)..(435): Homolog of NCBI NO: 21537306 NR Description: lipase-like protein [Arabidopsis thaliana]
  misc_feature (38)..(435): Homolog of NCBI NO: 15221426 NR Description: lipase (class 3) family [Arabidopsis thaliana]
  misc_feature (34)..(240): Homolog of NCBI NO: 34911870 NR Description: lipase-like protein [Oryza sativa (japonica
  misc_feature (232)..(431): Homolog of NCBI NO: 34911870 NR Description: lipase-like protein [Oryza sativa (japonica
  misc_feature (37)..(435): Homolog of NCBI NO: 34911832 NR Description: lipase-like protein [Oryza sativa (japonica
  misc_feature (37)..(427): Homolog of NCBI NO: 34911842 NR Description: lipase-like protein [Oryza sativa (japonica
  misc_feature (37)..(429): Homolog of NCBI NO: 1527001 NR Description: Ipomoea nil Pn47p
  misc_feature (155)..(423): Homolog of NCBI NO: 15224613 NR Description: lipase, putative [Arabidopsis thaliana]
MEEEDKKVMKCFSFKRIMKRKKKEEEEEKLIVTREFAKRWRDLSGQNHWKGMLQPLDQDLREYIIHYGEMAQAGYDTFNINTESQFAGASIYSRKDFFAKVGLEIAHPYTKYKVTKFIYATSDIHVPESFLLFPISREGWSKESNWMGYVAVTDDQGTALLGRRDIVVSWRGSVQPLEWVEDFEFGLVNAIKIFGERNDQVQIHQGWYSIYMSQDERSPFTKTNARDQVLREVGRLLEKYKDEEVSITICGHSLGAALATLSATDIVANGYNRPKSRPDKSCPVTAFVFASPRVGDSDFRKLFSGLEDIRVLRTRNLPDVIPIYPPIGYSEVGDEFPIDTRKSPYMKSPGNLATFHCLEGYLHGVAGTQGTNKADLFRLDVERAIGLVNKSVDGLKDECMVPGKWRVLKNKGMAQQDDGSWELVDHEIDDNEDLDF

SEQ ID NO: 104839 - protein, 428 aa, Arabidopsis thaliana
  peptide (1)..(428): Ceres Seq. ID no. 13615865
  misc_feature (10)..(428): Homolog of NCBI NO: 15233922 NR Description: lipase (class 3) family [Arabidopsis thaliana]
  misc_feature (29)..(422): Homolog of NCBI NO: 34911830 NR Description: lipase-like protein [Oryza sativa (japonica
  misc_feature (30)..(427): Homolog of NCBI NO: 21537306 NR Description: lipase-like protein [Arabidopsis thaliana]
  misc_feature (30)..(427): Homolog of NCBI NO: 15221426 NR Description: lipase (class 3) family [Arabidopsis thaliana]
  misc_feature (26)..(232): Homolog of NCBI NO: 34911870 NR Description: lipase-like protein [Oryza sativa (japonica
  misc_feature (224)..(423): Homolog of NCBI NO: 34911870 NR Description: lipase-like protein [Oryza sativa (japonica
  misc_feature (29)..(427): Homolog of NCBI NO: 34911832 NR Description: lipase-like protein [Oryza sativa (japonica
  misc_feature (29)..(419): Homolog of NCBI NO: 34911842 NR Description: lipase-like protein [Oryza sativa (japonica
  misc_feature (29)..(421): Homolog of NCBI NO: 1527001 NR Description: Ipomoea nil Pn47p
  misc_feature (147)..(415): Homolog of NCBI NO: 15224613 NR Description: lipase, putative [Arabidopsis thaliana]
MKCFSFKRIMKRKKKEEEEEKLIVTREFAKRWRDLSGQNHWKGMLQPLDQDLREYIIHYGEMAQAGYDTFNINTESQFAGASIYSRKDFFAKVGLEIAHPYTKYKVTKFIYATSDIHVPESFLLFPISREGWSKESNWMGYVAVTDDQGTALLGRRDIVVSWRGSVQPLEWVEDFEFGLVNAIKIFGERNDQVQIHQGWYSIYMSQDERSPFTKTNARDQVLREVGRLLEKYKDEEVSITICGHSLGAALATLSATDIVANGYNRPKSRPDKSCPVTAFVFASPRVGDSDFRKLFSGLEDIRVLRTRNLPDVIPIYPPIGYSEVGDEFPIDTRKSPYMKSPGNLATFHCLEGYLHGVAGTQGTNKADLFRLDVERAIGLVNKSVDGLKDECMVPGKWRVLKNKGMAQQDDGSWELVDHEIDDNEDLDF

SEQ ID NO: 104840 - protein, 419 aa, Arabidopsis thaliana; identical to SEQ ID NO: 69667
  peptide (1)..(419): Ceres Seq. ID no. 13615866
  misc_feature (1)..(419): Homolog of NCBI NO: 15233922 NR Description: lipase (class 3) family [Arabidopsis thaliana]
  misc_feature (20)..(413): Homolog of NCBI NO: 34911830 NR Description: lipase-like protein [Oryza sativa (japonica
  misc_feature (21)..(418): Homolog of NCBI NO: 21537306 NR Description: lipase-like protein [Arabidopsis thaliana]
  misc_feature (21)..(418): Homolog of NCBI NO: 15221426 NR Description: lipase (class 3) family [Arabidopsis thaliana]
  misc_feature (17)..(223): Homolog of NCBI NO: 34911870 NR Description: lipase-like protein [Oryza sativa (japonica
  misc_feature (215)..(414): Homolog of NCBI NO: 34911870 NR Description: lipase-like protein [Oryza sativa (japonica
  misc_feature (20)..(418): Homolog of NCBI NO: 34911832 NR Description: lipase-like protein [Oryza sativa (japonica
  misc_feature (20)..(410): Homolog of NCBI NO: 34911842 NR Description: lipase-like protein [Oryza sativa (japonica
  misc_feature (20)..(412): Homolog of NCBI NO: 1527001 NR Description: Ipomoea nil Pn47p
  misc_feature (138)..(406): Homolog of NCBI NO: 15224613 NR Description: lipase, putative [Arabidopsis thaliana]

SEQ ID NO: 104841 - DNA, 518 bp, Arabidopsis thaliana
  misc_feature (1)..(518): Ceres Seq. ID no. 13615867
  misc_feature: MA Experiment ID: 108573 Result: Down-regulated in Transcription
  misc_feature: MA Experiment 108573 PARAMETER Experiment Name: At_Drought_cDNA_P Parameter: Timepoint (hr) Value: 6
  misc_feature: MA Experiment 108573 PARAMETER Experiment Name: At_Drought_cDNA_P Parameter: Tissue Value: Aerial
  misc_feature: MA Experiment 108573 PARAMETER Experiment Name: At_Drought_cDNA_P Parameter: Treatment Value: Drought vs. No Drought
  misc_feature: MA Experiment ID: 20000068 Result: Up-regulated in Transcription
  misc_feature: MA Experiment ID: 20000180 Result: Down-regulated in Transcription
  misc_feature: MA Experiment 20000180 PARAMETER Experiment Name: At_Germinating_Seeds_P Parameter: Age (hr) Value: 24 vs. 0
  misc_feature: MA Experiment 20000180 PARAMETER Experiment Name: At_Germinating_Seeds_P Parameter: Tissue Value: Germinating Seeds
  misc_feature: MA Experiment ID: 20000184 Result: Down-regulated in Transcription
  misc_feature: MA Experiment 20000184 PARAMETER Experiment Name: At_Shoots__P Parameter: Age (day) Value: 7
  misc_feature: MA Experiment 20000184 PARAMETER Experiment Name: At_Shoots__P Parameter: Tissue Value: Shoots vs. Whole Plant
acttaaaccgaacagatttgtcacgaagaagaaatcagtgtagcagacaccatccatccctgagcaaagatagaagaaaagctatgactgatttgcaaatggaggtagaggtagataccaattcttctttgcaggagtctctcccgaagccgcaagtcatgtacagatgtaagaaatgtagaaggatagttgctattgaggaaaacatagtcccgcatgaaccaggaaagggtgaagaatgctttgcttggaaaaagagaagtggaaactctgaacaagtgcaatgctcttccatctttgtcgagcctatgaaatggatgcagacaatacatgatggaatggtggaagagaagcttctatgttttggatgtaacgggagattaggttatttcaactgggctgggatgcaatgtagctgtggtgcatgggttaatccggcttttcagcttaataaaagccgaatagacgagtgtaaatccgagccaaacccgaacctgaatatggaaacttgatgaaaa

SEQ ID NO: 104842 - protein, 169 aa, Arabidopsis thaliana
  peptide (1)..(169): Ceres Seq. ID no. 13615868
  misc_feature (28)..(169): Homolog of NCBI NO: 18415129 NR Description: expressed protein [Arabidopsis thaliana]
  misc_feature (28)..(169): Homolog of NCBI NO: 21555746 NR Description: unknown [Arabidopsis thaliana]
  misc_feature (20)..(143): Homolog of NCBI NO: 7486300 NR Description: hypothetical protein F28J12.250 - Arabidopsis
  misc_feature (28)..(161): Homolog of NCBI NO: 6005956 NR Description: dual specificity phosphatase 12; YVH1 phosphatase (S. cerevisiae) ortholog; serine/threonine specific phosphatase [Homo sapiens] >gi|9973073|sp|Q9UNI6|DUSC_HUMAN
  misc_feature (28)..(161): Homolog of NCBI NO: 11560052 NR Description: glucokinase-associated dual specificity
  misc_feature (30)..(161): Homolog of NCBI NO: 12963553 NR Description: dual specificity phosphatase 12; EST AA027408 musculus] >gi|12006110|gb|AAG44739.1|AF268196_1 VH1 [Mus
  misc_feature (30)..(161): Homolog of NCBI NO: 30580455 NR Description: Dual specificity protein phosphatase 12 (Dual
  misc_feature (55)..(169): Homolog of NCBI NO: 6322217 NR Description: nitrogen starvation-induced protein phosphatase;
  misc_feature (55)..(163): Homolog of NCBI NO: 32416772 NR Description: hypothetical protein [Neurospora crassa]
  misc_feature (51)..(155): Homolog of NCBI NO: 19112380 NR Description: protein tyrosine phosphatase; possibly involved meiosis and sporulation; similar to S. cerevisiae YVH1
LNRTDLSRRRNQCSRHHPSLSKDRRKAMTDLQMEVEVDTNSSLQESLPKPQVMYRCKKCRRIVAIEENIVPHEPGKGEECFAWKKRSGNSEQVQCSSIFVEPMKWMQTIHDGMVEEKLLCFGCNGRLGYFNWAGMQCSCGAWVNPAFQLNKSRIDECKSEPNPNLNMET

SEQ ID NO: 104843 - protein, 142 aa, Arabidopsis thaliana
  peptide (1)..(142): Ceres Seq. ID no. 13615869
  misc_feature (1)..(142): Homolog of NCBI NO: 18415129 NR Description: expressed protein [Arabidopsis thaliana]
  misc_feature (1)..(142): Homolog of NCBI NO: 21555746 NR Description: unknown [Arabidopsis thaliana]
  misc_feature (1)..(116): Homolog of NCBI NO: 7486300 NR Description: hypothetical protein F28J12.250 - Arabidopsis
  misc_feature (1)..(134): Homolog of NCBI NO: 6005956 NR Description: dual specificity phosphatase 12; YVH1 phosphatase (S. cerevisiae) ortholog; serine/threonine specific phosphatase [Homo sapiens] >gi|9973073|sp|Q9UNI6|DUSC_HUMAN
  misc_feature (1)..(134): Homolog of NCBI NO: 11560052 NR Description: glucokinase-associated dual specificity
  misc_feature (3)..(134): Homolog of NCBI NO: 12963553 NR Description: dual specificity phosphatase 12; EST AA027408 musculus] >gi|12006110|gb|AAG44739.1|AF268196_1 VH1 [Mus
  misc_feature (3)..(134): Homolog of NCBI NO: 30580455 NR Description: Dual specificity protein phosphatase 12 (Dual
  misc_feature (28)..(142): Homolog of NCBI NO: 6322217 NR Description: nitrogen starvation-induced protein phosphatase;
  misc_feature (28)..(136): Homolog of NCBI NO: 32416772 NR Description: hypothetical protein [Neurospora crassa]
  misc_feature (24)..(128): Homolog of NCBI NO: 19112380 NR Description: protein tyrosine phosphatase; possibly involved meiosis and sporulation; similar to S. cerevisiae YVH1
MTDLQMEVEVDTNSSLQESLPKPQVMYRCKKCRRIVAIEENIVPHEPGKGEECFAWKKRSGNSEQVQCSSIFVEPMKWMQTIHDGMVEEKLLCFGCNGRLGYFNWAGMQCSCGAWVNPAFQLNKSRIDECKSEPNPNLNMET

SEQ ID NO: 104844 - protein, 137 aa, Arabidopsis thaliana
  peptide (1)..(137): Ceres Seq. ID no. 13615870
  misc_feature (1)..(137): Homolog of NCBI NO: 18415129 NR Description: expressed protein [Arabidopsis thaliana]
  misc_feature (1)..(137): Homolog of NCBI NO: 21555746 NR Description: unknown [Arabidopsis thaliana]
  misc_feature (1)..(111): Homolog of NCBI NO: 7486300 NR Description: hypothetical protein F28J12.250 - Arabidopsis
  misc_feature (1)..(129): Homolog of NCBI NO: 6005956 NR Description: dual specificity phosphatase 12; YVH1 phosphatase (S. cerevisiae) ortholog; serine/threonine specific phosphatase [Homo sapiens] >gi|9973073|sp|Q9UNI6|DUSC_HUMAN
  misc_feature (1)..(129): Homolog of NCBI NO: 11560052 NR Description: glucokinase-associated dual specificity
  misc_feature (1)..(129): Homolog of NCBI NO: 12963553 NR Description: dual specificity phosphatase 12; EST AA027408 musculus] >gi|12006110|gb|AAG44739.1|AF268196_1 VH1 [Mus
  misc_feature (1)..(129): Homolog of NCBI NO: 30580455 NR Description: Dual specificity protein phosphatase 12 (Dual
  misc_feature (23)..(137): Homolog of NCBI NO: 6322217 NR Description: nitrogen starvation-induced protein phosphatase;
  misc_feature (23)..(131): Homolog of NCBI NO: 32416772 NR Description: hypothetical protein [Neurospora crassa]
  misc_feature (19)..(123): Homolog of NCBI NO: 19112380 NR Description: protein tyrosine phosphatase; possibly involved meiosis and sporulation; similar to S. cerevisiae YVH1
MEVEVDTNSSLQESLPKPQVMYRCKKCRRIVAIEENIVPHEPGKGEECFAWKKRSGNSEQVQCSSIFVEPMKWMQTIHDGMVEEKLLCFGCNGRLGYFNWAGMQCSCGAWVNPAFQLNKSRIDECKSEPNPNLNMET

SEQ ID NO: 104845 - DNA, 3109 bp, Arabidopsis thaliana
  misc_feature (1)..(3109): Ceres Seq. ID no. 13615875
  misc_feature: MA Experiment ID: 108434 Result: Down-regulated in Transcription
  misc_feature: MA Experiment 108434 PARAMETER Experiment Name: At_Root_Tips_cDNA_P Parameter: Tissue Value: Root Tips
  misc_feature: MA Experiment ID: 108462 Result: Up-regulated in Transcription
  misc_feature: MA Experiment 108462 PARAMETER Experiment Name: At_Germinating_Seeds_cDNA_P Parameter: Age (day) Value: 2 vs. 0
  misc_feature: MA Experiment 108462 PARAMETER Experiment Name: At_Germinating_Seeds_cDNA_P Parameter: Tissue Value: Germinating Seeds
  misc_feature: MA Experiment ID: 108463 Result: Up-regulated in Transcription
  misc_feature: MA Experiment 108463 PARAMETER Experiment Name: At_Germinating_Seeds_cDNA_P Parameter: Age (day) Value: 3 vs. 0
  misc_feature: MA Experiment 108463 PARAMETER Experiment Name: At_Germinating_Seeds_cDNA_P Parameter: Tissue Value: Germinating Seeds
  misc_feature: MA Experiment ID: 108464 Result: Up-regulated in Transcription
  misc_feature: MA Experiment 108464 PARAMETER Experiment Name: At_Germinating_Seeds_cDNA_P Parameter: Age (day) Value: 4 vs. 0
  misc_feature: MA Experiment 108464 PARAMETER Experiment Name: At_Germinating_Seeds_cDNA_P Parameter: Tissue Value: Germinating Seeds
  misc_feature: MA Experiment ID: 108594 Result: Down-regulated in Transcription
  misc_feature: MA Experiment 108594 PARAMETER Experiment Name: At_Ler-rhl_Root_cDNA_P Parameter: Plant Line Value: null
  misc_feature: MA Experiment ID: 108595 Result: Up-regulated in Transcription
  misc_feature: MA Experiment 108595 PARAMETER Experiment Name: At_Ler-pi_Ovule_cDNA_P Parameter: Plant Line Value: null
  misc_feature: MA Experiment ID: 20000086 Result: Up-regulated in Transcription
  misc_feature: MA Experiment 20000086 PARAMETER Experiment Name: At_100uM_ABA_Mutants_cDNA_P Parameter: Plant Line Value: CS22
  misc_feature: MA Experiment 20000086 PARAMETER Experiment Name: At_100uM_ABA_Mutants_cDNA_P Parameter: Timepoint (hr) Value: 6
  misc_feature: MA Experiment 20000086 PARAMETER Experiment Name: At_100uM_ABA_Mutants_cDNA_P Parameter: Tissue Value: Aerial
  misc_feature: MA Experiment 20000086 PARAMETER Experiment Name: At_100uM_ABA_Mutants_cDNA_P Parameter: Treatment Value: 100uM ABA vs. No Treatment
  misc_feature: MA Experiment ID: 20000184 Result: Down-regulated in Transcription
  misc_feature: MA Experiment 20000184 PARAMETER Experiment Name: At_Shoots__P Parameter: Age (day) Value: 7
  misc_feature: MA Experiment 20000184 PARAMETER Experiment Name: At_Shoots__P Parameter: Tissue Value: Shoots vs. Whole Plant
  misc_feature: MA Experiment ID: 20000185 Result: Down-regulated in Transcription
  misc_feature: MA Experiment 20000185 PARAMETER Experiment Name: At_Roots__P Parameter: Age (day) Value: 7 vs. 21
  misc_feature: MA Experiment 20000185 PARAMETER Experiment Name: At_Roots__P Parameter: Organism Value: A. thaliana
  misc_feature: MA Experiment 20000185 PARAMETER Experiment Name: At_Roots__P Parameter: Tissue Value: Roots vs. Whole Plant
  misc_feature: MA Experiment ID: 20000234 Result: Down-regulated in Transcription
  misc_feature: MA Experiment 20000234 PARAMETER Experiment Name: At_Siliques_P Parameter: Age (day) Value: 21
  misc_feature: MA Experiment 20000234 PARAMETER Experiment Name: At_Siliques_P Parameter: Organism Value: A. thaliana
  misc_feature: MA Experiment 20000234 PARAMETER Experiment Name: At_Siliques_P Parameter: Plant Line Value: WS
  misc_feature: MA Experiment 20000234 PARAMETER Experiment Name: At_Siliques_P Parameter: Tissue Value: Less Than 5mm Siliques vs. Whole Plant
  misc_feature: MA Experiment ID: 20000264 Result: Down-regulated in Transcription
  misc_feature: MA Experiment 20000264 PARAMETER Experiment Name: At_Open_Flower_P Parameter: Age (day) Value: 21
  misc_feature: MA Experiment 20000264 PARAMETER Experiment Name: At_Open_Flower_P Parameter: Plant Line Value: WS
  misc_feature: MA Experiment 20000264 PARAMETER Experiment Name: At_Open_Flower_P Parameter: Tissue Value: Open Flower vs. Whole Plant
  misc_feature: MA Experiment ID: 20000265 Result: Down-regulated in Transcription
  misc_feature: MA Experiment 20000265 PARAMETER Experiment Name: At_Open_Flower_P Parameter: Age (day) Value: 21
  misc_feature: MA Experiment 20000265 PARAMETER Experiment Name: At_Open_Flower_P Parameter: Plant Line Value: WS
  misc_feature: MA Experiment 20000265 PARAMETER Experiment Name: At_Open_Flower_P Parameter: Tissue Value: Closed Flower vs. Whole Plant
  misc_feature: MA Experiment ID: 20000286 Result: Down-regulated in Transcription
  misc_feature: MA Experiment 20000286 PARAMETER Experiment Name: At_Open_Flower_P Parameter: Age (day) Value: 21
  misc_feature: MA Experiment 20000286 PARAMETER Experiment Name: At_Open_Flower_P Parameter: Plant Line Value: WS
  misc_feature: MA Experiment 20000286 PARAMETER Experiment Name: At_Open_Flower_P Parameter: Tissue Value: Half Open vs. Whole Plant
  misc_feature: MA Experiment ID: 20000438 Result: Down-regulated in Transcription
  misc_feature: MA Experiment 20000438 PARAMETER Experiment Name: At_Shoots__P Parameter: Age (day) Value: 14
  misc_feature: MA Experiment 20000438 PARAMETER Experiment Name: At_Shoots__P Parameter: Tissue Value: Shoots vs. Whole Plant
  misc_feature: MA Experiment ID: 20000439 Result: Down-regulated in Transcription
  misc_feature: MA Experiment 20000439 PARAMETER Experiment Name: At_Roots__P Parameter: Age (day) Value: 14 vs. 21
  misc_feature: MA Experiment 20000439 PARAMETER Experiment Name: At_Roots__P Parameter: Organism Value: A. thaliana
  misc_feature: MA Experiment 20000439 PARAMETER Experiment Name: At_Roots__P Parameter: Tissue Value: Roots vs. Whole Plant
  misc_feature: MA Experiment ID: 20000794 Result: Down-regulated in Transcription
  misc_feature: MA Experiment 20000794 PARAMETER Experiment Name: At_Petals_P Parameter: Age (day) Value: 23-25 days
  misc_feature: MA Experiment 20000794 PARAMETER Experiment Name: At_Petals_P Parameter: Plant Line Value: WS
  misc_feature: MA Experiment 20000794 PARAMETER Experiment Name: At_Petals_P Parameter: Tissue Value: Petals vs. Whole plant
  misc_feature: MA Experiment ID: 20001556 Result: Down-regulated in Transcription
  misc_feature: MA Experiment 20001556 PARAMETER Experiment Name: At_Drought_Soil_Dry_P Parameter: Age (day) Value: 26
  misc_feature: MA Experiment 20001556 PARAMETER Experiment Name: At_Drought_Soil_Dry_P Parameter: Organism Value: A. thaliana
  misc_feature: MA Experiment 20001556 PARAMETER Experiment Name: At_Drought_Soil_Dry_P Parameter: Plant Line Value: WS
  misc_feature: MA Experiment 20001556 PARAMETER Experiment Name: At_Drought_Soil_Dry_P Parameter: Post Timepoint (hr) Value: None
  misc_feature: MA Experiment 20001556 PARAMETER Experiment Name: At_Drought_Soil_Dry_P Parameter: Post-Treatment Value: None
  misc_feature: MA Experiment 20001556 PARAMETER Experiment Name: At_Drought_Soil_Dry_P Parameter: Timepoint (day) Value: 12
  misc_feature: MA Experiment 20001556 PARAMETER Experiment Name: At_Drought_Soil_Dry_P Parameter: Treatment Value: Drought vs. No Drought
  misc_feature: MA Experiment ID: 20001557 Result: Down-regulated in Transcription
  misc_feature: MA Experiment 20001557 PARAMETER Experiment Name: At_Drought_Soil_Dry_P Parameter: Age (day) Value: 27
  misc_feature: MA Experiment 20001557 PARAMETER Experiment Name: At_Drought_Soil_Dry_P Parameter: Organism Value: A. thaliana
  misc_feature: MA Experiment 20001557 PARAMETER Experiment Name: At_Drought_Soil_Dry_P Parameter: Plant Line Value: WS
  misc_feature: MA Experiment 20001557 PARAMETER Experiment Name: At_Drought_Soil_Dry_P Parameter: Post Timepoint (hr) Value: 3
  misc_feature: MA Experiment 20001557 PARAMETER Experiment Name: At_Drought_Soil_Dry_P Parameter: Post-Treatment Value: Re-Water vs. No Drought
  misc_feature: MA Experiment 20001557 PARAMETER Experiment Name: At_Drought_Soil_Dry_P Parameter: Timepoint (day) Value: 13
  misc_feature: MA Experiment 20001557 PARAMETER Experiment Name: At_Drought_Soil_Dry_P Parameter: Treatment Value: Drought vs. No Drought
  misc_feature: MA Experiment ID: 20001558 Result: Down-regulated in Transcription
  misc_feature: MA Experiment 20001558 PARAMETER Experiment Name: At_Drought_Soil_Dry_P Parameter: Age (day) Value: 27
  misc_feature: MA Experiment 20001558 PARAMETER Experiment Name: At_Drought_Soil_Dry_P Parameter: Organism Value: A. thaliana
  misc_feature: MA Experiment 20001558 PARAMETER Experiment Name: At_Drought_Soil_Dry_P Parameter: Plant Line Value: WS
  misc_feature: MA Experiment 20001558 PARAMETER Experiment Name: At_Drought_Soil_Dry_P Parameter: Post Timepoint (hr) Value: 6
  misc_feature: MA Experiment 20001558 PARAMETER Experiment Name: At_Drought_Soil_Dry_P Parameter: Post-Treatment Value: Re-Water vs. No Drought
  misc_feature: MA Experiment 20001558 PARAMETER Experiment Name: At_Drought_Soil_Dry_P Parameter: Timepoint (day) Value: 13
  misc_feature: MA Experiment 20001558 PARAMETER Experiment Name: At_Drought_Soil_Dry_P Parameter: Treatment Value: Drought vs. No Drought
  misc_feature: MA Experiment ID: 20001560 Result: Down-regulated in Transcription
  misc_feature: MA Experiment 20001560 PARAMETER Experiment Name: At_Drought_Soil_Dry_P Parameter: Age (day) Value: 28
  misc_feature: MA Experiment 20001560 PARAMETER Experiment Name: At_Drought_Soil_Dry_P Parameter: Organism Value: A. thaliana
  misc_feature: MA Experiment 20001560 PARAMETER Experiment Name: At_Drought_Soil_Dry_P Parameter: Plant Line Value: WS
  misc_feature: MA Experiment 20001560 PARAMETER Experiment Name: At_Drought_Soil_Dry_P Parameter: Post Timepoint (hr) Value: None
  misc_feature: MA Experiment 20001560 PARAMETER Experiment Name: At_Drought_Soil_Dry_P Parameter: Post-Treatment Value: None
  misc_feature: MA Experiment 20001560 PARAMETER Experiment Name: At_Drought_Soil_Dry_P Parameter: Timepoint (day) Value: 14
  misc_feature: MA Experiment 20001560 PARAMETER Experiment Name: At_Drought_Soil_Dry_P Parameter: Treatment Value: Drought vs. No Drought
  misc_feature: MA Experiment ID: 20001773 Result: Up-regulated in Transcription
  misc_feature: MA Experiment 20001773 PARAMETER Experiment Name: At_Far-red-enriched-adult_P Parameter: Age (day) Value: 30
  misc_feature: MA Experiment 20001773 PARAMETER Experiment Name: At_Far-red-enriched-adult_P Parameter: Light Value: Far-red enriched vs. White
  misc_feature: MA Experiment 20001773 PARAMETER Experiment Name: At_Far-red-enriched-adult_P Parameter: Organism Value: A. thaliana
  misc_feature: MA Experiment 20001773 PARAMETER Experiment Name: At_Far-red-enriched-adult_P Parameter: Plant Line Value: Columbia
  misc_feature: MA Experiment 20001773 PARAMETER Experiment Name: At_Far-red-enriched-adult_P Parameter: Timepoint (hr) Value: 48
  misc_feature: MA Experiment 20001773 PARAMETER Experiment Name: At_Far-red-enriched-adult_P Parameter: Tissue Value: Aerial
  misc_feature: MA Experiment ID: 20001906 Result: Down-regulated in Transcription
  misc_feature: MA Experiment 20001906 PARAMETER Experiment Name: At_Drought_Reproduction_P Parameter: Age (day) Value: 35
  misc_feature: MA Experiment 20001906 PARAMETER Experiment Name: At_Drought_Reproduction_P Parameter: Organism Value: A. thaliana
  misc_feature: MA Experiment 20001906 PARAMETER Experiment Name: At_Drought_Reproduction_P Parameter: Plant Line Value: WS
  misc_feature: MA Experiment 20001906 PARAMETER Experiment Name: At_Drought_Reproduction_P Parameter: Timepoint (day) Value: 5
  misc_feature: MA Experiment 20001906 PARAMETER Experiment Name: At_Drought_Reproduction_P Parameter: Tissue Value: Siliques
  misc_feature: MA Experiment 20001906 PARAMETER Experiment Name: At_Drought_Reproduction_P Parameter: Treatment Value: Drought vs. No Drought
  misc_feature: MA Experiment ID: 20001908 Result: Down-regulated in Transcription
  misc_feature: MA Experiment 20001908 PARAMETER Experiment Name: At_Drought_Reproduction_P Parameter: Age (day) Value: 40
  misc_feature: MA Experiment 20001908 PARAMETER Experiment Name: At_Drought_Reproduction_P Parameter: Organism Value: A. thaliana
  misc_feature: MA Experiment 20001908 PARAMETER Experiment Name: At_Drought_Reproduction_P Parameter: Plant Line Value: WS
  misc_feature: MA Experiment 20001908 PARAMETER Experiment Name: At_Drought_Reproduction_P Parameter: Timepoint (day) Value: 10
  misc_feature: MA Experiment 20001908 PARAMETER Experiment Name: At_Drought_Reproduction_P Parameter: Tissue Value: Siliques
  misc_feature: MA Experiment 20001908 PARAMETER Experiment Name: At_Drought_Reproduction_P Parameter: Treatment Value: Drought vs. No Drought
  misc_feature: MA Experiment ID: 20001911 Result: Down-regulated in Transcription
  misc_feature: MA Experiment 20001911 PARAMETER Experiment Name: At_Drought_Reproduction_P Parameter: Age (day) Value: 40
  misc_feature: MA Experiment 20001911 PARAMETER Experiment Name: At_Drought_Reproduction_P Parameter: Organism Value: A. thaliana
  misc_feature: MA Experiment 20001911 PARAMETER Experiment Name: At_Drought_Reproduction_P Parameter: Plant Line Value: WS
  misc_feature: MA Experiment 20001911 PARAMETER Experiment Name: At_Drought_Reproduction_P Parameter: Timepoint (day) Value: 10
  misc_feature: MA Experiment 20001911 PARAMETER Experiment Name: At_Drought_Reproduction_P Parameter: Tissue Value: Flowers
  misc_feature: MA Experiment 20001911 PARAMETER Experiment Name: At_Drought_Reproduction_P Parameter: Treatment Value: Drought vs. No Drought
atccatccaaatctcaatccctaattagggttcatttctctgtttctccaaacaggggaattcgaagatgatggagtctaggtctcccatctgcaacacttgtggtgaagagattggtgtaaaatcaaacggagagttctttgtggcttgtcatgagtgtagtttcccgatctgcaaagcttgtcttgagtatgaattcaaagaaggtcgaagaatttgcttgcgttgcggcaatccttacgatgagaatgtgtttgatgatgttgagacaaagacatctaaaactcaatccattgttccaacacagaccaataacacttctcaggattcagggattcatgctagacatataagtacagtctcaacaatagacagtgaactgaatgatgaatatggcaatccaatttggaagaacagagtggagagctggaaagacaagaaagacaagaagagcaagaagaagaagaaagatccaaaagcaacaaaagctgaacaacatgaggctcagattcctacccaacagcacatggaagatacgccaccgaacacagaatctggtgctacagatgtgctttcggttgtgattcctatcccaaggacaaaaatcacttcatataggattgtcatcatcatgcggttgatcatcttggctctgttttttaactaccgtatcacgcatcctgtcgatagcgcttacggtttatggctaacatctgtgatatgtgagatttggtttgctgtttcttgggtgttggatcagttccctaaatggtctcctattaaccgagaaacttacatcgaccggttatccgcaagattcgaaagagaaggcgagcaatcacagcttgcagctgtagatttctttgttagtacggtagatccattaaaggagccacctttgataactgcaaacacggttctttcgatcctcgcgcttgattatccggtggataaagtctcttgctatgtatctgatgatggtgctgcaatgctttcgtttgagtctttggttgagacagcagattttgctaggaaatgggtacctttctgcaaaaagtactccatcgagccacgagctcccgagttttacttctcgcttaaaatcgattacttgagggataaagttcaaccttcttttgtgaaagaacgtagagccatgaaaagagattatgaagagtttaaaataagaatgaatgctttagtcgccaaggctcaaaagacaccagaagaaggatggacaatgcaagatggaacatcttggcccgggaacaacactcgtgaccatcccgggatgattcaggtttttcttggatatagcggtgctcgcgacattgaaggaaatgaacttccaagattagtttacgtctctagagagaagagacctggttatcagcatcacaaaaaggccggggcagagaacgcattggtgagggtgtctgcggttttaacgaatgctccattcattcttaaccttgattgtgatcactacgtcaacaatagcaaagccgtgcgtgaagcaatgtgctttttaatggatcctgttgttggtcaagacgtttgctttgttcagttcccacagagatttgatggaatcgacaagagtgatcgatatgctaaccgcaacattgttttcttcgatgttaatatgagagggcttgatgggattcaaggtccagtttatgttggtacaggtactgtctttagaagacaagcactttacggatacagtccaccttcaaaaccgaggattttaccgcaatcttcatcatcgtcgtgttgctgtctaaccaagaagaaacaacctcaagatccttccgagatttacaaagatgcaaagcgagaagaacttgatgctgcaatctttaatcttggggacctagacaactacgatgagtacgacagatcgatgctgatttcacaaacaagctttgagaaaacgtttggtctctctacggttttcatcgagtctactcttatggagaatggcggtgttcccgactctgtaaacccgtcaacgctcatcaaagaagctattcatgtcattagctgtggatacgaagagaaaactgaatggggaaaagaaataggatggatttacgggtcgatcaccgaagacattttgacgggtttcaagatgcattgtcgtggatggaggtcgatttactgtatgccattaagaccagcatttaaaggatctgctccaatcaatctatcagataggcttcaccaggttctacgttgggctcttggctcggttgagatcttccttagccgacattgtcctttgtggtacggttgcagcggaggccgcctcaagttgctccagagattagcttatataaacactattgtctacccattcacttctttgcctcttgttgcttactgtactcttccagctatttgccttcttaccggcaaatttatcatcccaacgctatcaaacctagcaagcatgctgtttctaggtctctttatatcaatcatcttaacgagtgtcctcgagcttcgatggagcggagtcagtatcgaagacttatggagaaacgaacagttttgggttattggaggtgtctcagctcatctctttgccgttttccaaggattcctcaaaatgctcgctggtctcgacacaaatttcacagtcacatcgaaaaccgcagatgatttagaattcggtgagctttacattgtcaaatggacaactctcttgatccctccgacgtcacttcttataatcaacttggtcggagttgttgctggattctctgacgctcttaacaaaggttatgaagcttggggacctttgtttgggaaggtatttttcgccttttgggtgattcttcatctttatccattcctcaaaggtcttatgggaagacaaaacagaacacctactattgttattctctggtctatcttgcttgcttctgtgttttcacttgtttgggttcgtatcaatcctttcgtctccaaaaccgatacgacttccctttctctgaactgtcttttgatcgattgctaagagaagatacgttatgtttgtattttgaaagattgatcatatgtgttttggttgttttataaattttcatatggttgcttgagc

SEQ ID NO: 104846 - protein, 985 aa, Arabidopsis thaliana; identical to SEQ ID NO: 24485
  peptide (1)..(985): Ceres Seq. ID no. 13615876
  misc_feature (405)..(972): Homolog of NCBI NO: 15237873 NR Description: cellulose synthase family [Arabidopsis thaliana]
  misc_feature (173)..(378): Homolog of NCBI NO: 15237873 NR Description: cellulose synthase family [Arabidopsis thaliana]
  misc_feature (1)..(78): Homolog of NCBI NO: 15237873 NR Description: cellulose synthase family [Arabidopsis thaliana]
  misc_feature (399)..(966): Homolog of NCBI NO: 27372782 NR Description: cellulose synthase-like protein D4 [Populus
  misc_feature (173)..(378): Homolog of NCBI NO: 27372782 NR Description: cellulose synthase-like protein D4 [Populus
  misc_feature (1)..(81): Homolog of NCBI NO: 27372782 NR Description: cellulose synthase-like protein D4 [Populus
  misc_feature (397)..(971): Homolog of NCBI NO: 15228448 NR Description: cellulose synthase family [Arabidopsis thaliana] putative cellulose synthase catalytic subunit [Arabidopsis
  misc_feature (173)..(378): Homolog of NCBI NO: 15228448 NR Description: cellulose synthase family [Arabidopsis thaliana] putative cellulose synthase catalytic subunit [Arabidopsis
  misc_feature (384)..(966): Homolog of NCBI NO: 15233733 NR Description: cellulose synthase family [Arabidopsis thaliana]
  misc_feature (384)..(966): Homolog of NCBI NO: 28973666 NR Description: unknown protein [Arabidopsis thaliana]

SEQ ID NO: 104847 - protein, 984 aa, Arabidopsis thaliana; identical to SEQ ID NO: 24486
  peptide (1)..(984): Ceres Seq. ID no. 13615877
  misc_feature (404)..(971): Homolog of NCBI NO: 15237873 NR Description: cellulose synthase family [Arabidopsis thaliana]
  misc_feature (172)..(377): Homolog of NCBI NO: 15237873 NR Description: cellulose synthase family [Arabidopsis thaliana]
  misc_feature (1)..(77): Homolog of NCBI NO: 15237873 NR Description: cellulose synthase family [Arabidopsis thaliana]
  misc_feature (398)..(965): Homolog of NCBI NO: 27372782 NR Description: cellulose synthase-like protein D4 [Populus
  misc_feature (172)..(377): Homolog of NCBI NO: 27372782 NR Description: cellulose synthase-like protein D4 [Populus
  misc_feature (1)..(80): Homolog of NCBI NO: 27372782 NR Description: cellulose synthase-like protein D4 [Populus
  misc_feature (396)..(970): Homolog of NCBI NO: 15228448 NR Description: cellulose synthase family [Arabidopsis thaliana] putative cellulose synthase catalytic subunit [Arabidopsis
  misc_feature (172)..(377): Homolog of NCBI NO: 15228448 NR Description: cellulose synthase family [Arabidopsis thaliana] putative cellulose synthase catalytic subunit [Arabidopsis
  misc_feature (383)..(965): Homolog of NCBI NO: 15233733 NR Description: cellulose synthase family [Arabidopsis thaliana]
  misc_feature (383)..(965): Homolog of NCBI NO: 28973666 NR Description: unknown protein [Arabidopsis thaliana]

SEQ ID NO: 104848 - protein, 832 aa, Arabidopsis thaliana; identical to SEQ ID NO: 24487
  peptide (1)..(832): Ceres Seq. ID no. 13615878
  misc_feature (252)..(819): Homolog of NCBI NO: 15237873 NR Description: cellulose synthase family [Arabidopsis thaliana]
  misc_feature (20)..(225): Homolog of NCBI NO: 15237873 NR Description: cellulose synthase family [Arabidopsis thaliana]
  misc_feature (246)..(813): Homolog of NCBI NO: 27372782 NR Description: cellulose synthase-like protein D4 [Populus
  misc_feature (20)..(225): Homolog of NCBI NO: 27372782 NR Description: cellulose synthase-like protein D4 [Populus
  misc_feature (244)..(818): Homolog of NCBI NO: 15228448 NR Description: cellulose synthase family [Arabidopsis thaliana] putative cellulose synthase catalytic subunit [Arabidopsis
  misc_feature (20)..(225): Homolog of NCBI NO: 15228448 NR Description: cellulose synthase family [Arabidopsis thaliana] putative cellulose synthase catalytic subunit [Arabidopsis
  misc_feature (231)..(813): Homolog of NCBI NO: 15233733 NR Description: cellulose synthase family [Arabidopsis thaliana]
  misc_feature (231)..(813): Homolog of NCBI NO: 28973666 NR Description: unknown protein [Arabidopsis thaliana]
  misc_feature (16)..(225): Homolog of NCBI NO: 15233733 NR Description: cellulose synthase family [Arabidopsis thaliana]
  misc_feature (16)..(225): Homolog of NCBI NO: 28973666 NR Description: unknown protein [Arabidopsis thaliana]

SEQ ID NO: 104849 - DNA, 897 bp, Arabidopsis thaliana
  misc_feature (1)..(897): Ceres Seq. ID no. 13615883
  misc_feature: MA Experiment ID: 20000072 Result: Up-regulated in Transcription
  misc_feature: MA Experiment 20000072 PARAMETER Experiment Name: At_100uM_ABA_Mutants_cDNA_P Parameter: Plant Line Value: CS8105
  misc_feature: MA Experiment 20000072 PARAMETER Experiment Name: At_100uM_ABA_Mutants_cDNA_P Parameter: Timepoint (hr) Value: 6
  misc_feature: MA Experiment 20000072 PARAMETER Experiment Name: At_100uM_ABA_Mutants_cDNA_P Parameter: Tissue Value: Aerial
  misc_feature: MA Experiment 20000072 PARAMETER Experiment Name: At_100uM_ABA_Mutants_cDNA_P Parameter: Treatment Value: 100uM ABA vs. No Treatment
  misc_feature: MA Experiment ID: 20000180 Result: Down-regulated in Transcription
  misc_feature: MA Experiment 20000180 PARAMETER Experiment Name: At_Germinating_Seeds_P Parameter: Age (hr) Value: 24 vs. 0
  misc_feature: MA Experiment 20000180 PARAMETER Experiment Name: At_Germinating_Seeds_P Parameter: Tissue Value: Germinating Seeds
aaagaacaagaaaaaagggtgttgttacgatggcatcgagtgataaggttccggtggcgtgtccggcaagcagtggagatggaaaggagccaatgggaaatccgacgaaaaccactacggcgatgctagagaaaggaacggctatgatgcaatcgatgaaaccgatcaggcaaatgagcctccacgtgtgttcattcgcttgctatagccatgatcccggtcgtcagatcgaagttcatatttacggccaccgtgtaaaccaggatttcctccaatgtgctgtctacgattccaattcctctaaggctcatctcatagggatcgaatatatagtgtcggaaaagttattcgaaagtctctcaccggaggaacaaaagctttggcactcgcatgattacgagatccaaatggctcttctagtaactccaagggtccctgagctcgttgcgaaaccggagcttaaaaatcttgccaaatcttacgggaaattttggtgtacatggcagattgaccgaggggataaattaccactaggtgtaccatcactaatggtatcgccacaagacgtgaatctcgggagaatcaaaccggagttggtgaaaaagagagatgaagaacatggaatctcgactgaatcgttgaagccgtcaagagatgggatctgtggaccagagaagaagaacctggttgctgattattgggttaggtttaggaaaggctttgcgcttgatgttgttgaaacagatatgaagagaacagctcccttcccctaacttttgtgtgtgctttttttctcagacattaattatataagttttcgtaagcttacactagatgggttgtgtacttattatgttatggagtatgataatgtcataaacatgagaattttttcgc

SEQ ID NO: 104850 - protein, 256 aa, Arabidopsis thaliana
  peptide (1)..(256): Ceres Seq. ID no. 13615884
  misc_feature (10)..(256): Homolog of NCBI NO: 18415199 NR Description: expressed protein [Arabidopsis thaliana]
  misc_feature (10)..(256): Homolog of NCBI NO: 21617913 NR Description: unknown [Arabidopsis thaliana]
  misc_feature (10)..(256): Homolog of NCBI NO: 7452426 NR Description: hypothetical protein F13C5.90 - Arabidopsis >gi|2832620|emb|CAA16749.1| hypothetical protein [Arabidopsis >gi|7268686|emb|CAB78894.1| hypothetical protein [Arabidopsis
  misc_feature (10)..(256): Homolog of NCBI NO: 15242474 NR Description: expressed protein [Arabidopsis thaliana] AT5g45690/MRA19_8 [Arabidopsis thaliana]
  misc_feature (10)..(256): Homolog of NCBI NO: 9758672 NR Description: gene_id:MRA19.8~pir||T05029~strong similarity to
  misc_feature (10)..(256): Homolog of NCBI NO: 34909516 NR Description: P0481E12.28 [Oryza sativa (japonica
  misc_feature (23)..(256): Homolog of NCBI NO: 15220516 NR Description: expressed protein [Arabidopsis thaliana]
  misc_feature (10)..(256): Homolog of NCBI NO: 34910820 NR Description: P0456A01.15 [Oryza sativa (japonica
  misc_feature (23)..(256): Homolog of NCBI NO: 15220526 NR Description: expressed protein [Arabidopsis thaliana] T25N20.16 [Arabidopsis thaliana] >gi|17979351|gb|AAL49901.1| protein [Arabidopsis thaliana] >gi|20466017|gb|AAM20230.1|
  misc_feature (19)..(250): Homolog of NCBI NO: 30685146 NR Description: expressed protein [Arabidopsis thaliana] unknown protein [Arabidopsis thaliana]
RTRKKGVVTMASSDKVPVACPASSGDGKEPMGNPTKTTTAMLEKGTAMMQSMKPIRQMSLHVCSFACYSHDPGRQIEVHIYGHRVNQDFLQCAVYDSNSSKAHLIGIEYIVSEKLFESLSPEEQKLWHSHDYEIQMALLVTPRVPELVAKPELKNLAKSYGKFWCTWQIDRGDKLPLGVPSLMVSPQDVNLGRIKPELVKKRDEEHGISTESLKPSRDGICGPEKKNLVADYWVRFRKGFALDVVETDMKRTAPFP

SEQ ID NO: 104851 - protein, 247 aa, Arabidopsis thaliana
  peptide (1)..(247): Ceres Seq. ID no. 13615885
  misc_feature (1)..(247): Homolog of NCBI NO: 18415199 NR Description: expressed protein [Arabidopsis thaliana]
  misc_feature (1)..(247): Homolog of NCBI NO: 21617913 NR Description: unknown [Arabidopsis thaliana]
  misc_feature (1)..(247): Homolog of NCBI NO: 7452426 NR Description: hypothetical protein F13C5.90 - Arabidopsis >gi|2832620|emb|CAA16749.1| hypothetical protein [Arabidopsis >gi|7268686|emb|CAB78894.1| hypothetical protein [Arabidopsis
  misc_feature (1)..(247): Homolog of NCBI NO: 15242474 NR Description: expressed protein [Arabidopsis thaliana] AT5g45690/MRA19_8 [Arabidopsis thaliana]
  misc_feature (1)..(247): Homolog of NCBI NO: 9758672 NR Description: gene_id:MRA19.8~pir||T05029~strong similarity to
  misc_feature (1)..(247): Homolog of NCBI NO: 34909516 NR Description: P0481E12.28 [Oryza sativa (japonica
  misc_feature (14)..(247): Homolog of NCBI NO: 15220516 NR Description: expressed protein [Arabidopsis thaliana]
  misc_feature (1)..(247): Homolog of NCBI NO: 34910820 NR Description: P0456A01.15 [Oryza sativa (japonica
  misc_feature (14)..(247): Homolog of NCBI NO: 15220526 NR Description: expressed protein [Arabidopsis thaliana] T25N20.16 [Arabidopsis thaliana] >gi|17979351|gb|AAL49901.1| protein [Arabidopsis thaliana] >gi|20466017|gb|AAM20230.1|
  misc_feature (10)..(241): Homolog of NCBI NO: 30685146 NR Description: expressed protein [Arabidopsis thaliana] unknown protein [Arabidopsis thaliana]
MASSDKVPVACPASSGDGKEPMGNPTKTTTAMLEKGTAMMQSMKPIRQMSLHVCSFACYSHDPGRQIEVHIYGHRVNQDFLQCAVYDSNSSKAHLIGIEYIVSEKLFESLSPEEQKLWHSHDYEIQMALLVTPRVPELVAKPELKNLAKSYGKFWCTWQIDRGDKLPLGVPSLMVSPQDVNLGRIKPELVKKRDEEHGISTESLKPSRDGICGPEKKNLVADYWVRFRKGFALDVVETDMKRTAPFP

SEQ ID NO: 104852 - protein, 226 aa, Arabidopsis thaliana
  peptide (1)..(226): Ceres Seq. ID no. 13615886
  misc_feature (1)..(226): Homolog of NCBI NO: 18415199 NR Description: expressed protein [Arabidopsis thaliana]
  misc_feature (1)..(226): Homolog of NCBI NO: 21617913 NR Description: unknown [Arabidopsis thaliana]
  misc_feature (1)..(226): Homolog of NCBI NO: 7452426 NR Description: hypothetical protein F13C5.90 - Arabidopsis >gi|2832620|emb|CAA16749.1| hypothetical protein [Arabidopsis >gi|7268686|emb|CAB78894.1| hypothetical protein [Arabidopsis
  misc_feature (1)..(226): Homolog of NCBI NO: 15242474 NR Description: expressed protein [Arabidopsis thaliana] AT5g45690/MRA19_8 [Arabidopsis thaliana]
  misc_feature (1)..(226): Homolog of NCBI NO: 9758672 NR Description: gene_id:MRA19.8~pir||T05029~strong similarity to
  misc_feature (1)..(226): Homolog of NCBI NO: 34909516 NR Description: P0481E12.28 [Oryza sativa (japonica
  misc_feature (1)..(226): Homolog of NCBI NO: 15220516 NR Description: expressed protein [Arabidopsis thaliana]
  misc_feature (1)..(226): Homolog of NCBI NO: 34910820 NR Description: P0456A01.15 [Oryza sativa (japonica
  misc_feature (1)..(226): Homolog of NCBI NO: 15220526 NR Description: expressed protein [Arabidopsis thaliana] T25N20.16 [Arabidopsis thaliana] >gi|17979351|gb|AAL49901.1| protein [Arabidopsis thaliana] >gi|20466017|gb|AAM20230.1|
  misc_feature (1)..(220): Homolog of NCBI NO: 30685146 NR Description: expressed protein [Arabidopsis thaliana] unknown protein [Arabidopsis thaliana]
MGNPTKTTTAMLEKGTAMMQSMKPIRQMSLHVCSFACYSHDPGRQIEVHIYGHRVNQDFLQCAVYDSNSSKAHLIGIEYIVSEKLFESLSPEEQKLWHSHDYEIQMALLVTPRVPELVAKPELKNLAKSYGKFWCTWQIDRGDKLPLGVPSLMVSPQDVNLGRIKPELVKKRDEEHGISTESLKPSRDGICGPEKKNLVADYWVRFRKGFALDVVETDMKRTAPFP

SEQ ID NO: 104853 - DNA, 1938 bp, Arabidopsis thaliana
  misc_feature (1)..(1938): Ceres Seq. ID no. 13615887
  misc_feature: MA Experiment ID: 108433 Result: Down-regulated in Transcription
  misc_feature: MA Experiment 108433 PARAMETER Experiment Name: At_rhl_Mutant2_cDNA_P Parameter: Age (day) Value: 7
  misc_feature: MA Experiment 108433 PARAMETER Experiment Name: At_rhl_Mutant2_cDNA_P Parameter: Organism Value: A. thaliana
  misc_feature: MA Experiment 108433 PARAMETER Experiment Name: At_rhl_Mutant2_cDNA_P Parameter: Plant Line Value: rhl Mutant vs. wt landsburg
  misc_feature: MA Experiment 108433 PARAMETER Experiment Name: At_rhl_Mutant2_cDNA_P Parameter: Tissue Value: Roots
  misc_feature: MA Experiment ID: 108464 Result: Up-regulated in Transcription
  misc_feature: MA Experiment 108464 PARAMETER Experiment Name: At_Germinating_Seeds_cDNA_P Parameter: Age (day) Value: 4 vs. 0
  misc_feature: MA Experiment 108464 PARAMETER Experiment Name: At_Germinating_Seeds_cDNA_P Parameter: Tissue Value: Germinating Seeds
  misc_feature: MA Experiment ID: 108488 Result: Down-regulated in Transcription
  misc_feature: MA Experiment ID: 108489 Result: Up-regulated in Transcription
  misc_feature: MA Experiment ID: 108573 Result: Up-regulated in Transcription
  misc_feature: MA Experiment 108573 PARAMETER Experiment Name: At_Drought_cDNA_P Parameter: Timepoint (hr) Value: 6
  misc_feature: MA Experiment 108573 PARAMETER Experiment Name: At_Drought_cDNA_P Parameter: Tissue Value: Aerial
  misc_feature: MA Experiment 108573 PARAMETER Experiment Name: At_Drought_cDNA_P Parameter: Treatment Value: Drought vs. No Drought
  misc_feature: MA Experiment ID: 108574 Result: Up-regulated in Transcription
  misc_feature: MA Experiment 108574 PARAMETER Experiment Name: At_Wounding__cDNA_P Parameter: Timepoint (hr) Value: 1
  misc_feature: MA Experiment 108574 PARAMETER Experiment Name: At_Wounding__cDNA_P Parameter: Tissue Value: Aerial
  misc_feature: MA Experiment 108574 PARAMETER Experiment Name: At_Wounding__cDNA_P Parameter: Treatment Value: Wounding vs. No Wounding
  misc_feature: MA Experiment ID: 108579 Result: Up-regulated in Transcription
  misc_feature: MA Experiment 108579 PARAMETER Experiment Name: At_4deg_Cold_cDNA_P Parameter: Temperature (deg C) Value: 4 vs. 22
  misc_feature: MA Experiment 108579 PARAMETER Experiment Name: At_4deg_Cold_cDNA_P Parameter: Timepoint (hr) Value: 6
  misc_feature: MA Experiment 108579 PARAMETER Experiment Name: At_4deg_Cold_cDNA_P Parameter: Tissue Value: Aerial
  misc_feature: MA Experiment ID: 108595 Result: Up-regulated in Transcription
  misc_feature: MA Experiment 108595 PARAMETER Experiment Name: At_Ler-pi_Ovule_cDNA_P Parameter: Plant Line Value: null
  misc_feature: MA Experiment ID: 108667 Result: Up-regulated in Transcription
  misc_feature: MA Experiment 108667 PARAMETER Experiment Name: At_2mM_SA_cDNA_P Parameter: Plant Line Value: WS
  misc_feature: MA Experiment 108667 PARAMETER Experiment Name: At_2mM_SA_cDNA_P Parameter: Timepoint (hr) Value: 1
  misc_feature: MA Experiment 108667 PARAMETER Experiment Name: At_2mM_SA_cDNA_P Parameter: Treatment Value: 2mM SA vs. No Treatment
  misc_feature: MA Experiment ID: 108668 Result: Up-regulated in Transcription
  misc_feature: MA Experiment 108668 PARAMETER Experiment Name: At_2mM_SA_cDNA_P Parameter: Plant Line Value: WS
  misc_feature: MA Experiment 108668 PARAMETER Experiment Name: At_2mM_SA_cDNA_P Parameter: Timepoint (hr) Value: 6
  misc_feature: MA Experiment 108668 PARAMETER Experiment Name: At_2mM_SA_cDNA_P Parameter: Treatment Value: 2mM SA vs. No Treatment
  misc_feature: MA Experiment ID: 20000182 Result: Up-regulated in Transcription
  misc_feature: MA Experiment 20000182 PARAMETER Experiment Name: At_2mM_SA_P Parameter: Age (day) Value: 14
  misc_feature: MA Experiment 20000182 PARAMETER Experiment Name: At_2mM_SA_P Parameter: Organism Value: A. thaliana
  misc_feature: MA Experiment 20000182 PARAMETER Experiment Name: At_2mM_SA_P Parameter: Plant Line Value: WS
  misc_feature: MA Experiment 20000182 PARAMETER Experiment Name: At_2mM_SA_P Parameter: Timepoint (hr) Value: 6
  misc_feature: MA Experiment 20000182 PARAMETER Experiment Name: At_2mM_SA_P Parameter: Tissue Value: Aerial
  misc_feature: MA Experiment 20000182 PARAMETER Experiment Name: At_2mM_SA_P Parameter: Treatment Value: 2mM SA vs. No Treatment
  misc_feature: MA Experiment ID: 20000184 Result: Down-regulated in Transcription
  misc_feature: MA Experiment 20000184 PARAMETER Experiment Name: At_Shoots__P Parameter: Age (day) Value: 7
  misc_feature: MA Experiment 20000184 PARAMETER Experiment Name: At_Shoots__P Parameter: Tissue Value: Shoots vs. Whole Plant
  misc_feature: MA Experiment ID: 20000234 Result: Down-regulated in Transcription
  misc_feature: MA Experiment 20000234 PARAMETER Experiment Name: At_Siliques_P Parameter: Age (day) Value: 21
  misc_feature: MA Experiment 20000234 PARAMETER Experiment Name: At_Siliques_P Parameter: Organism Value: A. thaliana
  misc_feature: MA Experiment 20000234 PARAMETER Experiment Name: At_Siliques_P Parameter: Plant Line Value: WS
  misc_feature: MA Experiment 20000234 PARAMETER Experiment Name: At_Siliques_P Parameter: Tissue Value: Less Than 5mm Siliques vs. Whole Plant
  misc_feature: MA Experiment ID: 20000286 Result: Down-regulated in Transcription
  misc_feature: MA Experiment 20000286 PARAMETER Experiment Name: At_Open_Flower_P Parameter: Age (day) Value: 21
  misc_feature: MA Experiment 20000286 PARAMETER Experiment Name: At_Open_Flower_P Parameter: Plant Line Value: WS
  misc_feature: MA Experiment 20000286 PARAMETER Experiment Name: At_Open_Flower_P Parameter: Tissue Value: Half Open vs. Whole Plant
  misc_feature: MA Experiment ID: 20000437 Result: Up-regulated in Transcription
  misc_feature: MA Experiment 20000437 PARAMETER Experiment Name: At_Drought_P Parameter: Age (day) Value: 8
  misc_feature: MA Experiment 20000437 PARAMETER Experiment Name: At_Drought_P Parameter: Organism Value: A. thaliana
  misc_feature: MA Experiment 20000437 PARAMETER Experiment Name: At_Drought_P Parameter: Plant Line Value: WS
  misc_feature: MA Experiment 20000437 PARAMETER Experiment Name: At_Drought_P Parameter: Timepoint (hr) Value: 24
  misc_feature: MA Experiment 20000437 PARAMETER Experiment Name: At_Drought_P Parameter: Tissue Value: Whole Plant
  misc_feature: MA Experiment 20000437 PARAMETER Experiment Name: At_Drought_P Parameter: Treatment Value: Drought vs. No Drought
  misc_feature: MA Experiment ID: 20000460 Result: Up-regulated in Transcription
  misc_feature: MA Experiment 20000460 PARAMETER Experiment Name: At_10percent_PEG_P Parameter: Age (day) Value: 12
  misc_feature: MA Experiment 20000460 PARAMETER Experiment Name: At_10percent_PEG_P Parameter: Organism Value: A. thaliana
  misc_feature: MA Experiment 20000460 PARAMETER Experiment Name: At_10percent_PEG_P Parameter: Plant Line Value: WS
  misc_feature: MA Experiment 20000460 PARAMETER Experiment Name: At_10percent_PEG_P Parameter: Timepoint (day) Value: 12
  misc_feature: MA Experiment 20000460 PARAMETER Experiment Name: At_10percent_PEG_P Parameter: Tissue Value: Whole Plant
  misc_feature: MA Experiment 20000460 PARAMETER Experiment Name: At_10percent_PEG_P Parameter: Treatment Value: 10percent PEG vs. No Treatment
  misc_feature: MA Experiment ID: 20000495 Result: Down-regulated in Transcription
  misc_feature: MA Experiment 20000495 PARAMETER Experiment Name: At_Guard_Cells_P Parameter: Harvest Date Value: 8/2/2002
  misc_feature: MA Experiment 20000495 PARAMETER Experiment Name: At_Guard_Cells_P Parameter: Organism Value: A. thaliana
  misc_feature: MA Experiment 20000495 PARAMETER Experiment Name: At_Guard_Cells_P Parameter: Tissue Value: Guard Cells vs. Leaves
  misc_feature: MA Experiment ID: 20000709 Result: Up-regulated in Transcription
  misc_feature: MA Experiment 20000709 PARAMETER Experiment Name: At_15mM_NH4NO3_L-to-H_P Parameter: Age (hr) Value: 14
  misc_feature: MA Experiment 20000709 PARAMETER Experiment Name: At_15mM_NH4NO3_L-to-H_P Parameter: Organism Value: A. thaliana
  misc_feature: MA Experiment 20000709 PARAMETER Experiment Name: At_15mM_NH4NO3_L-to-H_P Parameter: Plant Line Value: WS
  misc_feature: MA Experiment 20000709 PARAMETER Experiment Name: At_15mM_NH4NO3_L-to-H_P Parameter: Timepoint (hr) Value: 4
  misc_feature: MA Experiment 20000709 PARAMETER Experiment Name: At_15mM_NH4NO3_L-to-H_P Parameter: Tissue Value: Aerial
  misc_feature: MA Experiment 20000709 PARAMETER Experiment Name: At_15mM_NH4NO3_L-to-H_P Parameter: Treatment Value: 15mM NH4NO3 vs. 30mM Mannitol
  misc_feature: MA Experiment ID: 20001451 Result: Down-regulated in Transcription
  misc_feature: MA Experiment 20001451 PARAMETER Experiment Name: At_Far-red-induction_P Parameter: Age (day) Value: 7
  misc_feature: MA Experiment 20001451 PARAMETER Experiment Name: At_Far-red-induction_P Parameter: Light Value: Far-red vs. White
  misc_feature: MA Experiment 20001451 PARAMETER Experiment Name: At_Far-red-induction_P Parameter: Organism Value: A. thaliana
  misc_feature: MA Experiment 20001451 PARAMETER Experiment Name: At_Far-red-induction_P Parameter: Plant Line Value: Columbia
  misc_feature: MA Experiment 20001451 PARAMETER Experiment Name: At_Far-red-induction_P Parameter: Timepoint (hr) Value: 24
  misc_feature: MA Experiment 20001451 PARAMETER Experiment Name: At_Far-red-induction_P Parameter: Tissue Value: Whole Plant
  misc_feature: MA Experiment ID: 20001905 Result: Up-regulated in Transcription
  misc_feature: MA Experiment 20001905 PARAMETER Experiment Name: At_Drought_Reproduction_P Parameter: Age (day) Value: 40
  misc_feature: MA Experiment 20001905 PARAMETER Experiment Name: At_Drought_Reproduction_P Parameter: Organism Value: A. thaliana
  misc_feature: MA Experiment 20001905 PARAMETER Experiment Name: At_Drought_Reproduction_P Parameter: Plant Line Value: WS
  misc_feature: MA Experiment 20001905 PARAMETER Experiment Name: At_Drought_Reproduction_P Parameter: Timepoint (day) Value: 10
  misc_feature: MA Experiment 20001905 PARAMETER Experiment Name: At_Drought_Reproduction_P Parameter: Tissue Value: Rosettes
  misc_feature: MA Experiment 20001905 PARAMETER Experiment Name: At_Drought_Reproduction_P Parameter: Treatment Value: Drought vs. No Drought
gactttcttaccgaccagcttagtcttctccattacggcatcattcacctataaatttcgccgctgggtttaattctctattcattcagaaccaaaaaagaagaaacctttttgattctctttgcgatttctttgttcaatctcttctcagattgtgtgaatcgggtttaaatcggggttttagggtctctgttttcaaaagggtaccaaaaagtttggagctttactgtagaaagatttgatttttcgttgacccactccgagattttcggatacaaatcagggttttagggtttttgttggaatggaagaggattatcaacagccgaggtttacgattggtaggcaatcatcaatggcgccggagaagattccggagccgtcggttcactcagaagaagaggtgtttgaggatggagaagagatcgatggtggtgtgagactaatgtatttggctaatgaaggtgacattgaagggattaaggagcttattgattcagggattgatgctaattacagagacattgatgatcggactgctttacacgtggcggcttgtcaaggattgaaagatgttgttgagcttcttcttgatcggaaagctgaggttgatcctaaagatcgttggggaagcactccatttgcagatgcgatattttacaagaacattgatgttatcaagattcttgagatacatggagctaaacatccgatggctccaatgcacgttaagactgctcgtgaagtccctgagtatgaaataaatcctagtgagcttgatttcactcaaagcaaagagataacaaagggaacttactgtatggcaatgtggcgtggtattcaagttgcggtgaaaaagctggatgatgaagttttgagcgatgacgatcaagtgaggaagttccatgatgagcttgcattgctccaaaggcttaggcatccaaacattgtgcagtttcttggtgctgtaacccaaagtaacccaatgatgattgtgactgaatatttgcccaggggggatttgcgtgaattgctcaaacgaaaaggacaattgaaaccagctactgctgttagatatgcccttgatattgctaggggaatgagctatcttcatgagatcaaaggagaccctataatccaccgcgatcttgaaccttcaaacattctgcgggatgattcagggcatctgaaagttgcagactttggagtaagcaagcttgttactgttaaagaagacaagccttttacatgtcaagacatttcttgtcgatatatagctcccgaggttttcactagtgaagaatacgatacaaaagctgatgttttctcatttgcattgatcgttcaggagatgatcgaaggccgaatgccgtttgctgaaaaggaagacagtgaagcttctgaagcttatgctggcaaacatcggccattattcaaagctccatcaaagaattacccacatggtcttaaaacgttgatagaagaatgctggcatgagaaacctgcaaagcgaccaactttcagagagatcattaaacgacttgagtccattcttcaccacatgggtcacaagcgacaatggaggatgaggccattgacatgctttcagaatttcgagcacaagaagaaacataattgggatttgagcagccatgacggctcatcatccggttcacatttgtgattctttaaacggttaaagaaaccattcttttgtatccattccttccggtttagtttgggtttccccaaagcaaccgaatttgactttgtatatttgttgtacactgaagaactcaagaaagtcttcgtgtatacaaaaactgcattttttttattctagtatacaaaattgttgtaagatctatgattttaaccgcaatatatatttgctgttgtaatctaaaaaattggtttaagaatatttatgatttttcc

SEQ ID NO: 104854 - protein, 459 aa, Arabidopsis thaliana; identical to SEQ ID NO: 24622
  peptide (1)..(459): Ceres Seq. ID no. 13615888
  misc_feature (160)..(413): Pfam Name: Protein kinase domain Pfam Description: Protein kinase domain
  misc_feature (1)..(459): Homolog of NCBI NO: 18415205 NR Description: protein kinase - like protein [Arabidopsis >gi|16648824|gb|AAL25602.1| AT4g18950/F13C5_120 [Arabidopsis
  misc_feature (18)..(266): Homolog of NCBI NO: 7488240 NR Description: protein kinase homolog F13C5.120 - Arabidopsis
  misc_feature (286)..(459): Homolog of NCBI NO: 7488240 NR Description: protein kinase homolog F13C5.120 - Arabidopsis
  misc_feature (9)..(457): Homolog of NCBI NO: 18411024 NR Description: expressed protein [Arabidopsis thaliana]
  misc_feature (9)..(457): Homolog of NCBI NO: 11358145 NR Description: hypothetical protein T20N10.110 - Arabidopsis >gi|7630071|emb|CAB88293.1| putative protein [Arabidopsis
  misc_feature (8)..(197): Homolog of NCBI NO: 34909506 NR Description: putative protein kinase homolog [Oryza sativa
  misc_feature (286)..(458): Homolog of NCBI NO: 34909506 NR Description: putative protein kinase homolog [Oryza sativa
  misc_feature (9)..(427): Homolog of NCBI NO: 18700701 NR Description: ankyrin-kinase [Medicago truncatula]
  misc_feature (9)..(427): Homolog of NCBI NO: 18700703 NR Description: putative ankyrin-kinase [Medicago sativa]
  misc_feature (9)..(427): Homolog of NCBI NO: 15232181 NR Description: hypothetical protein [Arabidopsis thaliana]

SEQ ID NO: 104855 - protein, 442 aa, Arabidopsis thaliana; identical to SEQ ID NO: 24623
  peptide (1)..(442): Ceres Seq. ID no. 13615889
  misc_feature (143)..(396): Pfam Name: Protein kinase domain Pfam Description: Protein kinase domain
  misc_feature (1)..(442): Homolog of NCBI NO: 18415205 NR Description: protein kinase - like protein [Arabidopsis >gi|16648824|gb|AAL25602.1| AT4g18950/F13C5_120 [Arabidopsis
  misc_feature (1)..(249): Homolog of NCBI NO: 7488240 NR Description: protein kinase homolog F13C5.120 - Arabidopsis
  misc_feature (269)..(442): Homolog of NCBI NO: 7488240 NR Description: protein kinase homolog F13C5.120 - Arabidopsis
  misc_feature (1)..(440): Homolog of NCBI NO: 18411024 NR Description: expressed protein [Arabidopsis thaliana]
  misc_feature (1)..(440): Homolog of NCBI NO: 11358145 NR Description: hypothetical protein T20N10.110 - Arabidopsis >gi|7630071|emb|CAB88293.1| putative protein [Arabidopsis
  misc_feature (1)..(180): Homolog of NCBI NO: 34909506 NR Description: putative protein kinase homolog [Oryza sativa
  misc_feature (269)..(441): Homolog of NCBI NO: 34909506 NR Description: putative protein kinase homolog [Oryza sativa
  misc_feature (1)..(410): Homolog of NCBI NO: 18700701 NR Description: ankyrin-kinase [Medicago truncatula]
  misc_feature (1)..(410): Homolog of NCBI NO: 18700703 NR Description: putative ankyrin-kinase [Medicago sativa]
  misc_feature (1)..(410): Homolog of NCBI NO: 15232181 NR Description: hypothetical protein [Arabidopsis thaliana]

SEQ ID NO: 104856 - protein, 412 aa, Arabidopsis thaliana; identical to SEQ ID NO: 24624
  peptide (1)..(412): Ceres Seq. ID no. 13615890
  misc_feature (113)..(366): Pfam Name: Protein kinase domain Pfam Description: Protein kinase domain
  misc_feature (1)..(412): Homolog of NCBI NO: 18415205 NR Description: protein kinase - like protein [Arabidopsis >gi|16648824|gb|AAL25602.1| AT4g18950/F13C5_120 [Arabidopsis
  misc_feature (1)..(219): Homolog of NCBI NO: 7488240 NR Description: protein kinase homolog F13C5.120 - Arabidopsis
  misc_feature (239)..(412): Homolog of NCBI NO: 7488240 NR Description: protein kinase homolog F13C5.120 - Arabidopsis
  misc_feature (1)..(410): Homolog of NCBI NO: 18411024 NR Description: expressed protein [Arabidopsis thaliana]
  misc_feature (1)..(410): Homolog of NCBI NO: 11358145 NR Description: hypothetical protein T20N10.110 - Arabidopsis >gi|7630071|emb|CAB88293.1| putative protein [Arabidopsis
  misc_feature (1)..(150): Homolog of NCBI NO: 34909506 NR Description: putative protein kinase homolog [Oryza sativa
  misc_feature (239)..(411): Homolog of NCBI NO: 34909506 NR Description: putative protein kinase homolog [Oryza sativa
  misc_feature (1)..(380): Homolog of NCBI NO: 18700701 NR Description: ankyrin-kinase [Medicago truncatula]
  misc_feature (1)..(380): Homolog of NCBI NO: 18700703 NR Description: putative ankyrin-kinase [Medicago sativa]
  misc_feature (1)..(380): Homolog of NCBI NO: 15232181 NR Description: hypothetical protein [Arabidopsis thaliana]

SEQ ID NO: 104857 - DNA, 945 bp, Arabidopsis thaliana
  misc_feature (1)..(945): Ceres Seq. ID no. 13615893
  misc_feature: MA Experiment ID: 20000315 Result: Down-regulated in Transcription
  misc_feature: MA Experiment 20000315 PARAMETER Experiment Name: At_14day_Shoots-Roots_Sub_P Parameter: Age (day) Value: 14
  misc_feature: MA Experiment 20000315 PARAMETER Experiment Name: At_14day_Shoots-Roots_Sub_P Parameter: Organism Value: A. thaliana
  misc_feature: MA Experiment 20000315 PARAMETER Experiment Name: At_14day_Shoots-Roots_Sub_P Parameter: Plant Line Value: WS
  misc_feature: MA Experiment 20000315 PARAMETER Experiment Name: At_14day_Shoots-Roots_Sub_P Parameter: Tissue Value: Shoots vs. Whole Plant
agttttggtctgcgatcgtgaaatttacgcagagagagatcagaatcgaagaaaacattgcaatataaaagagtcaccttcgagttcgtgtctcactccgataaagcaatgagtctattcgggcttggaagaaatcaaaagactttccgtcctaagaagagcgcaccatcaggaaccaagggagcagagcttcgaaagcatatagatgcaactttaggtagtggtaatcttagagaagccgtcaaacttcctccgggagaggatttaaacgaatggcttgcagttaacactgtggatttcttcaatcaggtgaatctgttatttggtacacttaccgagttttgcaccccggagaactgttctacaatgactgctggtcccaagtacgaatacagatgggccgatggtgtacaaatcaagaagcctattgaggtttcagctccaaagtatgttgaatacttgatggattggatcgagacacaactcgatgatgagaccatatttcctcaaaaacttggtgcagcttttcctccaaacttcaaggaagtggtgaagacaatctttaaacgactattccgagtttacgcacacatataccactctcatttccagaaaatagttagtctcaaagaggaagctcatctcaacacttgcttcaaacacttcatcctcttcactcatgagtttgttctcattgacaagaaagaactcgctcctcttcaagaactcatagaatctatcattgcaccttactaaaccaaacaaaacccaaatcctctgtccaattacaagacttttttttttcaatcacattcatggtaataagttttaaccccaactgtaaaaaattgctgtttctgtttgtaaaaaaagaatatgcaatacactgctgaaccttggattttatttaaatggttacattcgaaatttcactggattacatat

SEQ ID NO: 104858 - protein, 215 aa, Arabidopsis thaliana
  peptide (1)..(215): Ceres Seq. ID no. 13615894
  misc_feature (29)..(213): Pfam Name: Mob1/phocein family Pfam Description: Mob1/phocein family
  misc_feature (1)..(215): Homolog of NCBI NO: 26449776 NR Description: unknown protein [Arabidopsis thaliana]
  misc_feature (9)..(215): Homolog of NCBI NO: 15234110 NR Description: expressed protein [Arabidopsis thaliana]
  misc_feature (1)..(215): Homolog of NCBI NO: 15242430 NR Description: expressed protein [Arabidopsis thaliana] gene_id:MFC19.22~pir||T04426~similar to unknown protein thaliana] >gi|15028015|gb|AAK76538.1| unknown protein
  misc_feature (1)..(215): Homolog of NCBI NO: 32470635 NR Description: putative Mob1/phocein family protein [Solanum
  misc_feature (1)..(215): Homolog of NCBI NO: 32470654 NR Description: unknown [Solanum bulbocastanum]
  misc_feature (1)..(212): Homolog of NCBI NO: 19309913 NR Description: Mob1-like protein [Medicago sativa subsp. falcata]
  misc_feature (8)..(213): Homolog of NCBI NO: 37534032 NR Description: putative F-box protein family [Oryza sativa
  misc_feature (23)..(212): Homolog of NCBI NO: 10800806 NR Description: hypothetical protein [Cicer arietinum]
  misc_feature (3)..(211): Homolog of NCBI NO: 28277885 NR Description: Similar to hypothetical protein LOC92597 [Danio
  misc_feature (3)..(211): Homolog of NCBI NO: 27735029 NR Description: hypothetical protein LOC92597 [Homo sapiens] RIKEN cDNA 1110003E08 [Mus musculus] >gi|23271309|gb|AAH38112.1|
MSLFGLGRNQKTFRPKKSAPSGTKGAELRKHIDATLGSGNLREAVKLPPGEDLNEWLAVNTVDFFNQVNLLFGTLTEFCTPENCSTMTAGPKYEYRWADGVQIKKPIEVSAPKYVEYLMDWIETQLDDETIFPQKLGAAFPPNFKEVVKTIFKRLFRVYAHIYHSHFQKIVSLKEEAHLNTCFKHFILFTHEFVLIDKKELAPLQELIESIIAPY

SEQ ID NO: 104859 - protein, 129 aa, Arabidopsis thaliana
  peptide (1)..(129): Ceres Seq. ID no. 13615895
  misc_feature (1)..(127): Pfam Name: Mob1/phocein family Pfam Description: Mob1/phocein family
  misc_feature (1)..(129): Homolog of NCBI NO: 26449776 NR Description: unknown protein [Arabidopsis thaliana]
  misc_feature (1)..(129): Homolog of NCBI NO: 15234110 NR Description: expressed protein [Arabidopsis thaliana]
  misc_feature (1)..(129): Homolog of NCBI NO: 15242430 NR Description: expressed protein [Arabidopsis thaliana] gene_id:MFC19.22~pir||T04426~similar to unknown protein thaliana] >gi|15028015|gb|AAK76538.1| unknown protein
  misc_feature (1)..(129): Homolog of NCBI NO: 32470635 NR Description: putative Mob1/phocein family protein [Solanum
  misc_feature (1)..(129): Homolog of NCBI NO: 32470654 NR Description: unknown [Solanum bulbocastanum]
  misc_feature (1)..(126): Homolog of NCBI NO: 19309913 NR Description: Mob1-like protein [Medicago sativa subsp. falcata]
  misc_feature (1)..(127): Homolog of NCBI NO: 37534032 NR Description: putative F-box protein family [Oryza sativa
  misc_feature (1)..(126): Homolog of NCBI NO: 10800806 NR Description: hypothetical protein [Cicer arietinum]
  misc_feature (1)..(125): Homolog of NCBI NO: 28277885 NR Description: Similar to hypothetical protein LOC92597 [Danio
  misc_feature (1)..(125): Homolog of NCBI NO: 27735029 NR Description: hypothetical protein LOC92597 [Homo sapiens] RIKEN cDNA 1110003E08 [Mus musculus] >gi|23271309|gb|AAH38112.1|
MTAGPKYEYRWADGVQIKKPIEVSAPKYVEYLMDWIETQLDDETIFPQKLGAAFPPNFKEVVKTIFKRLFRVYAHIYHSHFQKIVSLKEEAHLNTCFKHFILFTHEFVLIDKKELAPLQELIESIIAPY

SEQ ID NO: 104860 - DNA, 1212 bp, Arabidopsis thaliana
  misc_feature (1)..(1212): Ceres Seq. ID no. 13615914
  misc_feature: MA Experiment ID: 108434 Result: Down-regulated in Transcription
  misc_feature: MA Experiment 108434 PARAMETER Experiment Name: At_Root_Tips_cDNA_P Parameter: Tissue Value: Root Tips
  misc_feature: MA Experiment ID: 108435 Result: Down-regulated in Transcription
  misc_feature: MA Experiment 108435 PARAMETER Experiment Name: At_stm_Mutants_cDNA_P Parameter: Plant Line Value: wt Landsburg vs stm
  misc_feature: MA Experiment 108435 PARAMETER Experiment Name: At_stm_Mutants_cDNA_P Parameter: Tissue Value: Shoot Apical Meristem Region
  misc_feature: MA Experiment ID: 108463 Result: Down-regulated in Transcription
  misc_feature: MA Experiment 108463 PARAMETER Experiment Name: At_Germinating_Seeds_cDNA_P Parameter: Age (day) Value: 3 vs. 0
  misc_feature: MA Experiment 108463 PARAMETER Experiment Name: At_Germinating_Seeds_cDNA_P Parameter: Tissue Value: Germinating Seeds
  misc_feature: MA Experiment ID: 108469 Result: Up-regulated in Transcription
  misc_feature: MA Experiment ID: 108561 Result: Up-regulated in Transcription
  misc_feature: MA Experiment 108561 PARAMETER Experiment Name: At_100uM_ABA_cDNA_P Parameter: Timepoint (hr) Value: 6
  misc_feature: MA Experiment 108561 PARAMETER Experiment Name: At_100uM_ABA_cDNA_P Parameter: Tissue Value: Aerial
  misc_feature: MA Experiment 108561 PARAMETER Experiment Name: At_100uM_ABA_cDNA_P Parameter: Treatment Value: 100uM ABA vs. No Treatment
  misc_feature: MA Experiment ID: 108572 Result: Down-regulated in Transcription
  misc_feature: MA Experiment 108572 PARAMETER Experiment Name: At_Drought_cDNA_P Parameter: Timepoint (hr) Value: 1
  misc_feature: MA Experiment 108572 PARAMETER Experiment Name: At_Drought_cDNA_P Parameter: Tissue Value: Aerial
  misc_feature: MA Experiment 108572 PARAMETER Experiment Name: At_Drought_cDNA_P Parameter: Treatment Value: Drought vs. No Drought
  misc_feature: MA Experiment ID: 108574 Result: Down-regulated in Transcription
  misc_feature: MA Experiment 108574 PARAMETER Experiment Name: At_Wounding__cDNA_P Parameter: Timepoint (hr) Value: 1
  misc_feature: MA Experiment 108574 PARAMETER Experiment Name: At_Wounding__cDNA_P Parameter: Tissue Value: Aerial
  misc_feature: MA Experiment 108574 PARAMETER Experiment Name: At_Wounding__cDNA_P Parameter: Treatment Value: Wounding vs. No Wounding
  misc_feature: MA Experiment ID: 108579 Result: Down-regulated in Transcription
  misc_feature: MA Experiment 108579 PARAMETER Experiment Name: At_4deg_Cold_cDNA_P Parameter: Temperature (deg C) Value: 4 vs. 22
  misc_feature: MA Experiment 108579 PARAMETER Experiment Name: At_4deg_Cold_cDNA_P Parameter: Timepoint (hr) Value: 6
  misc_feature: MA Experiment 108579 PARAMETER Experiment Name: At_4deg_Cold_cDNA_P Parameter: Tissue Value: Aerial
  misc_feature: MA Experiment ID: 108594 Result: Up-regulated in Transcription
  misc_feature: MA Experiment 108594 PARAMETER Experiment Name: At_Ler-rhl_Root_cDNA_P Parameter: Plant Line Value: null
  misc_feature: MA Experiment ID: 108605 Result: Up-regulated in Transcription
  misc_feature: MA Experiment 108605 PARAMETER Experiment Name: At_100uM_ABA_cDNA_P Parameter: Timepoint (hr) Value: 6
  misc_feature: MA Experiment 108605 PARAMETER Experiment Name: At_100uM_ABA_cDNA_P Parameter: Tissue Value: Aerial
  misc_feature: MA Experiment 108605 PARAMETER Experiment Name: At_100uM_ABA_cDNA_P Parameter: Treatment Value: 100uM ABA vs. No Treatment
  misc_feature: MA Experiment ID: 108668 Result: Up-regulated in Transcription
  misc_feature: MA Experiment 108668 PARAMETER Experiment Name: At_2mM_SA_cDNA_P Parameter: Plant Line Value: WS
  misc_feature: MA Experiment 108668 PARAMETER Experiment Name: At_2mM_SA_cDNA_P Parameter: Timepoint (hr) Value: 6
  misc_feature: MA Experiment 108668 PARAMETER Experiment Name: At_2mM_SA_cDNA_P Parameter: Treatment Value: 2mM SA vs. No Treatment
  misc_feature: MA Experiment ID: 20000030 Result: Up-regulated in Transcription
  misc_feature: MA Experiment 20000030 PARAMETER Experiment Name: At_CS6630_Roots_cDNA_P Parameter: Plant Line Value: CS6630 vs. WS
  misc_feature: MA Experiment 20000030 PARAMETER Experiment Name: At_CS6630_Roots_cDNA_P Parameter: Tissue Value: Roots
  misc_feature: MA Experiment ID: 20000069 Result: Up-regulated in Transcription
  misc_feature: MA Experiment 20000069 PARAMETER Experiment Name: At_100uM_ABA_Mutants_cDNA_P Parameter: Plant Line Value: CS23
  misc_feature: MA Experiment 20000069 PARAMETER Experiment Name: At_100uM_ABA_Mutants_cDNA_P Parameter: Timepoint (hr) Value: 6
  misc_feature: MA Experiment 20000069 PARAMETER Experiment Name: At_100uM_ABA_Mutants_cDNA_P Parameter: Tissue Value: Aerial
  misc_feature: MA Experiment 20000069 PARAMETER Experiment Name: At_100uM_ABA_Mutants_cDNA_P Parameter: Treatment Value: 100uM ABA vs. No Treatment
  misc_feature: MA Experiment ID: 20000070 Result: Up-regulated in Transcription
  misc_feature: MA Experiment 20000070 PARAMETER Experiment Name: At_100uM_ABA_Mutants_cDNA_P Parameter: Plant Line Value: CS24
  misc_feature: MA Experiment 20000070 PARAMETER Experiment Name: At_100uM_ABA_Mutants_cDNA_P Parameter: Timepoint (hr) Value: 6
  misc_feature: MA Experiment 20000070 PARAMETER Experiment Name: At_100uM_ABA_Mutants_cDNA_P Parameter: Tissue Value: Aerial
  misc_feature: MA Experiment 20000070 PARAMETER Experiment Name: At_100uM_ABA_Mutants_cDNA_P Parameter: Treatment Value: 100uM ABA vs. No Treatment
  misc_feature: MA Experiment ID: 20000072 Result: Up-regulated in Transcription
  misc_feature: MA Experiment 20000072 PARAMETER Experiment Name: At_100uM_ABA_Mutants_cDNA_P Parameter: Plant Line Value: CS8105
  misc_feature: MA Experiment 20000072 PARAMETER Experiment Name: At_100uM_ABA_Mutants_cDNA_P Parameter: Timepoint (hr) Value: 6
  misc_feature: MA Experiment 20000072 PARAMETER Experiment Name: At_100uM_ABA_Mutants_cDNA_P Parameter: Tissue Value: Aerial
  misc_feature: MA Experiment 20000072 PARAMETER Experiment Name: At_100uM_ABA_Mutants_cDNA_P Parameter: Treatment Value: 100uM ABA vs. No Treatment
  misc_feature: MA Experiment ID: 20000184 Result: Down-regulated in Transcription
  misc_feature: MA Experiment 20000184 PARAMETER Experiment Name: At_Shoots__P Parameter: Age (day) Value: 7
  misc_feature: MA Experiment 20000184 PARAMETER Experiment Name: At_Shoots__P Parameter: Tissue Value: Shoots vs. Whole Plant
  misc_feature: MA Experiment ID: 20000224 Result: Down-regulated in Transcription
  misc_feature: MA Experiment ID: 20000234 Result: Down-regulated in Transcription
  misc_feature: MA Experiment 20000234 PARAMETER Experiment Name: At_Siliques_P Parameter: Age (day) Value: 21
  misc_feature: MA Experiment 20000234 PARAMETER Experiment Name: At_Siliques_P Parameter: Organism Value: A. thaliana
  misc_feature: MA Experiment 20000234 PARAMETER Experiment Name: At_Siliques_P Parameter: Plant Line Value: WS
  misc_feature: MA Experiment 20000234 PARAMETER Experiment Name: At_Siliques_P Parameter: Tissue Value: Less Than 5mm Siliques vs. Whole Plant
  misc_feature: MA Experiment ID: 20000265 Result: Down-regulated in Transcription
  misc_feature: MA Experiment 20000265 PARAMETER Experiment Name: At_Open_Flower_P Parameter: Age (day) Value: 21
  misc_feature: MA Experiment 20000265 PARAMETER Experiment Name: At_Open_Flower_P Parameter: Plant Line Value: WS
  misc_feature: MA Experiment 20000265 PARAMETER Experiment Name: At_Open_Flower_P Parameter: Tissue Value: Closed Flower vs. Whole Plant
  misc_feature: MA Experiment ID: 20000267 Result: Down-regulated in Transcription
  misc_feature: MA Experiment 20000267 PARAMETER Experiment Name: At_Drought_P Parameter: Age (day) Value: 7
  misc_feature: MA Experiment 20000267 PARAMETER Experiment Name: At_Drought_P Parameter: Organism Value: A. thaliana
  misc_feature: MA Experiment 20000267 PARAMETER Experiment Name: At_Drought_P Parameter: Plant Line Value: WS
  misc_feature: MA Experiment 20000267 PARAMETER Experiment Name: At_Drought_P Parameter: Timepoint (hr) Value: 6
  misc_feature: MA Experiment 20000267 PARAMETER Experiment Name: At_Drought_P Parameter: Tissue Value: Whole Plant
  misc_feature: MA Experiment 20000267 PARAMETER Experiment Name: At_Drought_P Parameter: Treatment Value: Drought vs. No Drought
  misc_feature: MA Experiment ID: 20000268 Result: Down-regulated in Transcription
  misc_feature: MA Experiment 20000268 PARAMETER Experiment Name: At_100mM_NaCl__P Parameter: Age (day) Value: 14
  misc_feature: MA Experiment 20000268 PARAMETER Experiment Name: At_100mM_NaCl__P Parameter: Organism Value: A. thaliana
  misc_feature: MA Experiment 20000268 PARAMETER Experiment Name: At_100mM_NaCl__P Parameter: Plant Line Value: WS
  misc_feature: MA Experiment 20000268 PARAMETER Experiment Name: At_100mM_NaCl__P Parameter: Timepoint (hr) Value: 6
  misc_feature: MA Experiment 20000268 PARAMETER Experiment Name: At_100mM_NaCl__P Parameter: Tissue Value: Whole Plant
  misc_feature: MA Experiment 20000268 PARAMETER Experiment Name: At_100mM_NaCl__P Parameter: Treatment Value: 100mM NaCl vs. No Treatment
  misc_feature: MA Experiment ID: 20000436 Result: Down-regulated in Transcription
  misc_feature: MA Experiment 20000436 PARAMETER Experiment Name: At_Drought_P Parameter: Age (day) Value: 7
  misc_feature: MA Experiment 20000436 PARAMETER Experiment Name: At_Drought_P Parameter: Organism Value: A. thaliana
  misc_feature: MA Experiment 20000436 PARAMETER Experiment Name: At_Drought_P Parameter: Plant Line Value: WS
  misc_feature: MA Experiment 20000436 PARAMETER Experiment Name: At_Drought_P Parameter: Timepoint (hr) Value: 12
  misc_feature: MA Experiment 20000436 PARAMETER Experiment Name: At_Drought_P Parameter: Tissue Value: Whole Plant
  misc_feature: MA Experiment 20000436 PARAMETER Experiment Name: At_Drought_P Parameter: Treatment Value: Drought vs. No Drought
  misc_feature: MA Experiment ID: 20000438 Result: Down-regulated in Transcription
  misc_feature: MA Experiment 20000438 PARAMETER Experiment Name: At_Shoots__P Parameter: Age (day) Value: 14
  misc_feature: MA Experiment 20000438 PARAMETER Experiment Name: At_Shoots__P Parameter: Tissue Value: Shoots vs. Whole Plant
  misc_feature: MA Experiment ID: 20000439 Result: Down-regulated in Transcription
  misc_feature: MA Experiment 20000439 PARAMETER Experiment Name: At_Roots__P Parameter: Age (day) Value: 14 vs. 21
  misc_feature: MA Experiment 20000439 PARAMETER Experiment Name: At_Roots__P Parameter: Organism Value: A. thaliana
  misc_feature: MA Experiment 20000439 PARAMETER Experiment Name: At_Roots__P Parameter: Tissue Value: Roots vs. Whole Plant
  misc_feature: MA Experiment ID: 20000441 Result: Up-regulated in Transcription
  misc_feature: MA Experiment 20000441 PARAMETER Experiment Name: At_1uM_BR-BRZ__P Parameter: Tissue Value: Shoot Apices
  misc_feature: MA Experiment 20000441 PARAMETER Experiment Name: At_1uM_BR-BRZ__P Parameter: Treatment Value: 1uM BR vs. No Treatment
  misc_feature: MA Experiment ID: 20000527 Result: Up-regulated in Transcription
  misc_feature: MA Experiment 20000527 PARAMETER Experiment Name: At_10percent_PEG_P Parameter: Age (day) Value: 20
  misc_feature: MA Experiment 20000527 PARAMETER Experiment Name: At_10percent_PEG_P Parameter: Organism Value: A. thaliana
  misc_feature: MA Experiment 20000527 PARAMETER Experiment Name: At_10percent_PEG_P Parameter: Plant Line Value: WS
  misc_feature: MA Experiment 20000527 PARAMETER Experiment Name: At_10percent_PEG_P Parameter: Timepoint (day) Value: 20
  misc_feature: MA Experiment 20000527 PARAMETER Experiment Name: At_10percent_PEG_P Parameter: Tissue Value: Whole Plant
  misc_feature: MA Experiment 20000527 PARAMETER Experiment Name: At_10percent_PEG_P Parameter: Treatment Value: 10percent PEG vs. No Treatment
  misc_feature: MA Experiment ID: 20000573 Result: Up-regulated in Transcription
  misc_feature: MA Experiment 20000573 PARAMETER Experiment Name: At_100uM_ABA_Mutants__P Parameter: Organism Value: A. thaliana
  misc_feature: MA Experiment 20000573 PARAMETER Experiment Name: At_100uM_ABA_Mutants__P Parameter: Plant Line Value: CS22 vs. Ler wt
  misc_feature: MA Experiment 20000573 PARAMETER Experiment Name: At_100uM_ABA_Mutants__P Parameter: Timepoint (hr) Value: N/A
  misc_feature: MA Experiment 20000573 PARAMETER Experiment Name: At_100uM_ABA_Mutants__P Parameter: Tissue Value: Whole Plant
  misc_feature: MA Experiment 20000573 PARAMETER Experiment Name: At_100uM_ABA_Mutants__P Parameter: Treatment Value: None
  misc_feature: MA Experiment ID: 20000574 Result: Up-regulated in Transcription
  misc_feature: MA Experiment 20000574 PARAMETER Experiment Name: At_100uM_ABA_Mutants__P Parameter: Organism Value: A. thaliana
  misc_feature: MA Experiment 20000574 PARAMETER Experiment Name: At_100uM_ABA_Mutants__P Parameter: Plant Line Value: CS23 vs. Ler wt
  misc_feature: MA Experiment 20000574 PARAMETER Experiment Name: At_100uM_ABA_Mutants__P Parameter: Timepoint (hr) Value: N/A
  misc_feature: MA Experiment 20000574 PARAMETER Experiment Name: At_100uM_ABA_Mutants__P Parameter: Tissue Value: Whole Plant
  misc_feature: MA Experiment 20000574 PARAMETER Experiment Name: At_100uM_ABA_Mutants__P Parameter: Treatment Value: None
  misc_feature: MA Experiment ID: 20000575 Result: Down-regulated in Transcription
  misc_feature: MA Experiment 20000575 PARAMETER Experiment Name: At_100uM_ABA_Mutants__P Parameter: Organism Value: A. thaliana
  misc_feature: MA Experiment 20000575 PARAMETER Experiment Name: At_100uM_ABA_Mutants__P Parameter: Plant Line Value: CS22
  misc_feature: MA Experiment 20000575 PARAMETER Experiment Name: At_100uM_ABA_Mutants__P Parameter: Timepoint (hr) Value: 6
  misc_feature: MA Experiment 20000575 PARAMETER Experiment Name: At_100uM_ABA_Mutants__P Parameter: Tissue Value: Whole Plant
  misc_feature: MA Experiment 20000575 PARAMETER Experiment Name: At_100uM_ABA_Mutants__P Parameter: Treatment Value: 1uM ABA vs. No Treatment
  misc_feature: MA Experiment ID: 20000576 Result: Down-regulated in Transcription
  misc_feature: MA Experiment 20000576 PARAMETER Experiment Name: At_100uM_ABA_Mutants__P Parameter: Organism Value: A. thaliana
  misc_feature: MA Experiment 20000576 PARAMETER Experiment Name: At_100uM_ABA_Mutants__P Parameter: Plant Line Value: CS23
  misc_feature: MA Experiment 20000576 PARAMETER Experiment Name: At_100uM_ABA_Mutants__P Parameter: Timepoint (hr) Value: 6
  misc_feature: MA Experiment 20000576 PARAMETER Experiment Name: At_100uM_ABA_Mutants__P Parameter: Tissue Value: Whole Plant
  misc_feature: MA Experiment 20000576 PARAMETER Experiment Name: At_100uM_ABA_Mutants__P Parameter: Treatment Value: 1uM ABA vs. No Treatment
  misc_feature: MA Experiment ID: 20000578 Result: Up-regulated in Transcription
  misc_feature: MA Experiment 20000578 PARAMETER Experiment Name: At_CS3726__P Parameter: Organism Value: A. thaliana
  misc_feature: MA Experiment 20000578 PARAMETER Experiment Name: At_CS3726__P Parameter: Plant Line Value: CS3726
  misc_feature: MA Experiment 20000578 PARAMETER Experiment Name: At_CS3726__P Parameter: Tissue Value: Whole Plant
  misc_feature: MA Experiment ID: 20000606 Result: Up-regulated in Transcription
  misc_feature: MA Experiment 20000606 PARAMETER Experiment Name: At_CS8548_Mutant_P Parameter: Age (day) Value: 14
  misc_feature: MA Experiment 20000606 PARAMETER Experiment Name: At_CS8548_Mutant_P Parameter: Plant Line Value: CS8548 vs. wt
  misc_feature: MA Experiment 20000606 PARAMETER Experiment Name: At_CS8548_Mutant_P Parameter: Tissue Value: Whole Plant
  misc_feature: MA Experiment ID: 20001248 Result: Up-regulated in Transcription
  misc_feature: MA Experiment 20001248 PARAMETER Experiment Name: At_Far-red-induction_P Parameter: Age (day) Value: 7
  misc_feature: MA Experiment 20001248 PARAMETER Experiment Name: At_Far-red-induction_P Parameter: Light Value: Far-red vs. White
  misc_feature: MA Experiment 20001248 PARAMETER Experiment Name: At_Far-red-induction_P Parameter: Organism Value: A. thaliana
  misc_feature: MA Experiment 20001248 PARAMETER Experiment Name: At_Far-red-induction_P Parameter: Plant Line Value: Columbia
  misc_feature: MA Experiment 20001248 PARAMETER Experiment Name: At_Far-red-induction_P Parameter: Timepoint (hr) Value: 4
  misc_feature: MA Experiment 20001248 PARAMETER Experiment Name: At_Far-red-induction_P Parameter: Tissue Value: Whole Plant
  misc_feature: MA Experiment ID: 20001450 Result: Up-regulated in Transcription
  misc_feature: MA Experiment 20001450 PARAMETER Experiment Name: At_Far-red-induction_P Parameter: Age (day) Value: 7
  misc_feature: MA Experiment 20001450 PARAMETER Experiment Name: At_Far-red-induction_P Parameter: Light Value: Far-red vs. White
  misc_feature: MA Experiment 20001450 PARAMETER Experiment Name: At_Far-red-induction_P Parameter: Organism Value: A. thaliana
  misc_feature: MA Experiment 20001450 PARAMETER Experiment Name: At_Far-red-induction_P Parameter: Plant Line Value: Columbia
  misc_feature: MA Experiment 20001450 PARAMETER Experiment Name: At_Far-red-induction_P Parameter: Timepoint (hr) Value: 8
  misc_feature: MA Experiment 20001450 PARAMETER Experiment Name: At_Far-red-induction_P Parameter: Tissue Value: Whole Plant
  misc_feature: MA Experiment ID: 20001451 Result: Up-regulated in Transcription
  misc_feature: MA Experiment 20001451 PARAMETER Experiment Name: At_Far-red-induction_P Parameter: Age (day) Value: 7
  misc_feature: MA Experiment 20001451 PARAMETER Experiment Name: At_Far-red-induction_P Parameter: Light Value: Far-red vs. White
  misc_feature: MA Experiment 20001451 PARAMETER Experiment Name: At_Far-red-induction_P Parameter: Organism Value: A. thaliana
  misc_feature: MA Experiment 20001451 PARAMETER Experiment Name: At_Far-red-induction_P Parameter: Plant Line Value: Columbia
  misc_feature: MA Experiment 20001451 PARAMETER Experiment Name: At_Far-red-induction_P Parameter: Timepoint (hr) Value: 24
  misc_feature: MA Experiment 20001451 PARAMETER Experiment Name: At_Far-red-induction_P Parameter: Tissue Value: Whole Plant
  misc_feature: MA Experiment ID: 20001557 Result: Up-regulated in Transcription
  misc_feature: MA Experiment 20001557 PARAMETER Experiment Name: At_Drought_Soil_Dry_P Parameter: Age (day) Value: 27
  misc_feature: MA Experiment 20001557 PARAMETER Experiment Name: At_Drought_Soil_Dry_P Parameter: Organism Value: A. thaliana
  misc_feature: MA Experiment 20001557 PARAMETER Experiment Name: At_Drought_Soil_Dry_P Parameter: Plant Line Value: WS
  misc_feature: MA Experiment 20001557 PARAMETER Experiment Name: At_Drought_Soil_Dry_P Parameter: Post Timepoint (hr) Value: 3
  misc_feature: MA Experiment 20001557 PARAMETER Experiment Name: At_Drought_Soil_Dry_P Parameter: Post-Treatment Value: Re-Water vs. No Drought
  misc_feature: MA Experiment 20001557 PARAMETER Experiment Name: At_Drought_Soil_Dry_P Parameter: Timepoint (day) Value: 13
  misc_feature: MA Experiment 20001557 PARAMETER Experiment Name: At_Drought_Soil_Dry_P Parameter: Treatment Value: Drought vs. No Drought
  misc_feature: MA Experiment ID: 20001558 Result: Up-regulated in Transcription
  misc_feature: MA Experiment 20001558 PARAMETER Experiment Name: At_Drought_Soil_Dry_P Parameter: Age (day) Value: 27
  misc_feature: MA Experiment 20001558 PARAMETER Experiment Name: At_Drought_Soil_Dry_P Parameter: Organism Value: A. thaliana
  misc_feature: MA Experiment 20001558 PARAMETER Experiment Name: At_Drought_Soil_Dry_P Parameter: Plant Line Value: WS
  misc_feature: MA Experiment 20001558 PARAMETER Experiment Name: At_Drought_Soil_Dry_P Parameter: Post Timepoint (hr) Value: 6
  misc_feature: MA Experiment 20001558 PARAMETER Experiment Name: At_Drought_Soil_Dry_P Parameter: Post-Treatment Value: Re-Water vs. No Drought
  misc_feature: MA Experiment 20001558 PARAMETER Experiment Name: At_Drought_Soil_Dry_P Parameter: Timepoint (day) Value: 13
  misc_feature: MA Experiment 20001558 PARAMETER Experiment Name: At_Drought_Soil_Dry_P Parameter: Treatment Value: Drought vs. No Drought
  misc_feature: MA Experiment ID: 20001770 Result: Up-regulated in Transcription
  misc_feature: MA Experiment 20001770 PARAMETER Experiment Name: At_Far-red-enriched-adult_P Parameter: Age (day) Value: 28
  misc_feature: MA Experiment 20001770 PARAMETER Experiment Name: At_Far-red-enriched-adult_P Parameter: Light Value: Far-red enriched vs. White
  misc_feature: MA Experiment 20001770 PARAMETER Experiment Name: At_Far-red-enriched-adult_P Parameter: Organism Value: A. thaliana
  misc_feature: MA Experiment 20001770 PARAMETER Experiment Name: At_Far-red-enriched-adult_P Parameter: Plant Line Value: Columbia
  misc_feature: MA Experiment 20001770 PARAMETER Experiment Name: At_Far-red-enriched-adult_P Parameter: Timepoint (hr) Value: 8
  misc_feature: MA Experiment 20001770 PARAMETER Experiment Name: At_Far-red-enriched-adult_P Parameter: Tissue Value: Aerial
  misc_feature: MA Experiment ID: 20001905 Result: Up-regulated in Transcription
  misc_feature: MA Experiment 20001905 PARAMETER Experiment Name: At_Drought_Reproduction_P Parameter: Age (day) Value: 40
  misc_feature: MA Experiment 20001905 PARAMETER Experiment Name: At_Drought_Reproduction_P Parameter: Organism Value: A. thaliana
  misc_feature: MA Experiment 20001905 PARAMETER Experiment Name: At_Drought_Reproduction_P Parameter: Plant Line Value: WS
  misc_feature: MA Experiment 20001905 PARAMETER Experiment Name: At_Drought_Reproduction_P Parameter: Timepoint (day) Value: 10
  misc_feature: MA Experiment 20001905 PARAMETER Experiment Name: At_Drought_Reproduction_P Parameter: Tissue Value: Rosettes
  misc_feature: MA Experiment 20001905 PARAMETER Experiment Name: At_Drought_Reproduction_P Parameter: Treatment Value: Drought vs. No Drought
aacaacatctttcacacaacaattcacacaatttctcgtttttttttgtttatcatcaaaagttttaatctaaattacgtatcaaattccgagcaagatgactattcttgttgaacattttgttcctgattcaagagtggatgaaaagaaagtgatagaggagagggataatgaattggtgttggatggaggttttgtggttccaaaatcaaaggaaactgatgcattcgatgctcctgatatgaatttcttgggccattccttcagggattatgagaatggtgaaagcgagagacaacaaggtgttgaggaattttacaggatgcaacacattcaccagacctatgactttgtgaagaagatgaggaaagagtatggaaaacttaacaagatggaaatgagtatatgggaatgttgtgagttattgaacaatgttgttgatgaaagcgatccggatcttgatgagcctcaaattcaacaccttctccaaaccgctgaagccattcgaagggactatcccgacgaagattggctccatctcactgccctaatccatgatcttggcaaggttctccttctgccagaattcggtggtcttccccagtgggctgtcgttggcgatacatttccagttggatgtaccttcgactcagccaatattcaccacaagtatttcaaaggaaaccatgatatcaacaacccaaagtacaacacaaaaaatggagtttacactgaaggatgtggtttagacaatgttctcatgtcatggggtcatgacgactacatgtatttggtggctaagaagaatggcacgacccttcctcacgctggtctcttcattattcgatatcattccttttatccattgcacaaggcaggagcctacacacacttgatgaacgatgaggacagagatgatctcaagtggctccatgtcttcaataaatatgacctatacagtaagagcaaagttctggtagatgtcgaacaagtgaagccttactacatttcactcatcaacaagtattttccggcgaaactaaaatggtgagataaagctacgagtcaattaattaactatcttttatgaggagaacgagatcgaaggttaacgagtttctattgtatacaacggaagataaatctatctaataaaaaagttggtgtgttcatttgtaattttttcccccatcagtttaaaagttatgttgt

SEQ ID NO: 104861 - protein, 317 aa, Arabidopsis thaliana
  peptide (1)..(317): Ceres Seq. ID no. 13615915
  misc_feature (61)..(317): Pfam Name: Family of unknown function (DUF706) Pfam Description: Family of unknown function (DUF706)
  misc_feature (1)..(317): Homolog of NCBI NO: 18399158 NR Description: expressed protein [Arabidopsis thaliana]
  misc_feature (1)..(317): Homolog of NCBI NO: 21554393 NR Description: unknown [Arabidopsis thaliana]
  misc_feature (76)..(317): Homolog of NCBI NO: 13877657 NR Description: Unknown protein [Arabidopsis thaliana]
  misc_feature (76)..(309): Homolog of NCBI NO: 25411930 NR Description: hypothetical protein At2g19800 [imported] -
  misc_feature (1)..(317): Homolog of NCBI NO: 7487428 NR Description: hypothetical protein T25K17.70 - Arabidopsis >gi|4539422|emb|CAB38955.1| putative protein [Arabidopsis >gi|7269477|emb|CAB79481.1| putative protein [Arabidopsis
  misc_feature (1)..(317): Homolog of NCBI NO: 30687167 NR Description: expressed protein [Arabidopsis thaliana]
  misc_feature (22)..(317): Homolog of NCBI NO: 21536858 NR Description: unknown [Arabidopsis thaliana]
  misc_feature (22)..(317): Homolog of NCBI NO: 15241891 NR Description: expressed protein [Arabidopsis thaliana] gene_id:MIK19.9~pir||T06010~similar to unknown protein
  misc_feature (1)..(317): Homolog of NCBI NO: 30683840 NR Description: expressed protein [Arabidopsis thaliana] unknown protein [Arabidopsis thaliana]
  misc_feature (1)..(317): Homolog of NCBI NO: 26451656 NR Description: unknown protein [Arabidopsis thaliana]
MTILVEHFVPDSRVDEKKVIEERDNELVLDGGFVVPKSKETDAFDAPDMNFLGHSFRDYENGESERQQGVEEFYRMQHIHQTYDFVKKMRKEYGKLNKMEMSIWECCELLNNVVDESDPDLDEPQIQHLLQTAEAIRRDYPDEDWLHLTALIHDLGKVLLLPEFGGLPQWAVVGDTFPVGCTFDSANIHHKYFKGNHDINNPKYNTKNGVYTEGCGLDNVLMSWGHDDYMYLVAKKNGTTLPHAGLFIIRYHSFYPLHKAGAYTHLMNDEDRDDLKWLHVFNKYDLYSKSKVLVDVEQVKPYYISLINKYFPAKLKW

SEQ ID NO: 104862 - protein, 269 aa, Arabidopsis thaliana
  peptide (1)..(269): Ceres Seq. ID no. 13615916
  misc_feature (13)..(269): Pfam Name: Family of unknown function (DUF706) Pfam Description: Family of unknown function (DUF706)
  misc_feature (1)..(269): Homolog of NCBI NO: 18399158 NR Description: expressed protein [Arabidopsis thaliana]
  misc_feature (1)..(269): Homolog of NCBI NO: 21554393 NR Description: unknown [Arabidopsis thaliana]
  misc_feature (28)..(269): Homolog of NCBI NO: 13877657 NR Description: Unknown protein [Arabidopsis thaliana]
  misc_feature (28)..(261): Homolog of NCBI NO: 25411930 NR Description: hypothetical protein At2g19800 [imported] -
  misc_feature (1)..(269): Homolog of NCBI NO: 7487428 NR Description: hypothetical protein T25K17.70 - Arabidopsis >gi|4539422|emb|CAB38955.1| putative protein [Arabidopsis >gi|7269477|emb|CAB79481.1| putative protein [Arabidopsis
  misc_feature (1)..(269): Homolog of NCBI NO: 30687167 NR Description: expressed protein [Arabidopsis thaliana]
  misc_feature (1)..(269): Homolog of NCBI NO: 21536858 NR Description: unknown [Arabidopsis thaliana]
  misc_feature (1)..(269): Homolog of NCBI NO: 15241891 NR Description: expressed protein [Arabidopsis thaliana] gene_id:MIK19.9~pir||T06010~similar to unknown protein
  misc_feature (1)..(269): Homolog of NCBI NO: 30683840 NR Description: expressed protein [Arabidopsis thaliana] unknown protein [Arabidopsis thaliana]
  misc_feature (1)..(269): Homolog of NCBI NO: 26451656 NR Description: unknown protein [Arabidopsis thaliana]
MNFLGHSFRDYENGESERQQGVEEFYRMQHIHQTYDFVKKMRKEYGKLNKMEMSIWECCELLNNVVDESDPDLDEPQIQHLLQTAEAIRRDYPDEDWLHLTALIHDLGKVLLLPEFGGLPQWAVVGDTFPVGCTFDSANIHHKYFKGNHDINNPKYNTKNGVYTEGCGLDNVLMSWGHDDYMYLVAKKNGTTLPHAGLFIIRYHSFYPLHKAGAYTHLMNDEDRDDLKWLHVFNKYDLYSKSKVLVDVEQVKPYYISLINKYFPAKLKW

SEQ ID NO: 104863 - protein, 242 aa, Arabidopsis thaliana; identical to SEQ ID NO: 36749
  peptide (1)..(242): Ceres Seq. ID no. 13615917
  misc_feature (1)..(242): Pfam Name: Family of unknown function (DUF706) Pfam Description: Family of unknown function (DUF706)
  misc_feature (1)..(242): Homolog of NCBI NO: 18399158 NR Description: expressed protein [Arabidopsis thaliana]
  misc_feature (1)..(242): Homolog of NCBI NO: 21554393 NR Description: unknown [Arabidopsis thaliana]
  misc_feature (1)..(242): Homolog of NCBI NO: 13877657 NR Description: Unknown protein [Arabidopsis thaliana]
  misc_feature (1)..(234): Homolog of NCBI NO: 25411930 NR Description: hypothetical protein At2g19800 [imported] -
  misc_feature (1)..(242): Homolog of NCBI NO: 7487428 NR Description: hypothetical protein T25K17.70 - Arabidopsis >gi|4539422|emb|CAB38955.1| putative protein [Arabidopsis >gi|7269477|emb|CAB79481.1| putative protein [Arabidopsis
  misc_feature (1)..(242): Homolog of NCBI NO: 30687167 NR Description: expressed protein [Arabidopsis thaliana]
  misc_feature (1)..(242): Homolog of NCBI NO: 21536858 NR Description: unknown [Arabidopsis thaliana]
  misc_feature (1)..(242): Homolog of NCBI NO: 15241891 NR Description: expressed protein [Arabidopsis thaliana] gene_id:MIK19.9~pir||T06010~similar to unknown protein
  misc_feature (1)..(242): Homolog of NCBI NO: 30683840 NR Description: expressed protein [Arabidopsis thaliana] unknown protein [Arabidopsis thaliana]
  misc_feature (1)..(242): Homolog of NCBI NO: 26451656 NR Description: unknown protein [Arabidopsis thaliana]

SEQ ID NO: 104864 - DNA, 1546 bp, Arabidopsis thaliana
  misc_feature (1)..(1546): Ceres Seq. ID no. 13615918
  misc_feature: MA Experiment ID: 108461 Result: Up-regulated in Transcription
  misc_feature: MA Experiment 108461 PARAMETER Experiment Name: At_Germinating_Seeds_cDNA_P Parameter: Age (day) Value: 1 vs. 0
  misc_feature: MA Experiment 108461 PARAMETER Experiment Name: At_Germinating_Seeds_cDNA_P Parameter: Tissue Value: Germinating Seeds
  misc_feature: MA Experiment ID: 108464 Result: Up-regulated in Transcription
  misc_feature: MA Experiment 108464 PARAMETER Experiment Name: At_Germinating_Seeds_cDNA_P Parameter: Age (day) Value: 4 vs. 0
  misc_feature: MA Experiment 108464 PARAMETER Experiment Name: At_Germinating_Seeds_cDNA_P Parameter: Tissue Value: Germinating Seeds
  misc_feature: MA Experiment ID: 108488 Result: Down-regulated in Transcription
  misc_feature: MA Experiment ID: 108572 Result: Up-regulated in Transcription
  misc_feature: MA Experiment 108572 PARAMETER Experiment Name: At_Drought_cDNA_P Parameter: Timepoint (hr) Value: 1
  misc_feature: MA Experiment 108572 PARAMETER Experiment Name: At_Drought_cDNA_P Parameter: Tissue Value: Aerial
  misc_feature: MA Experiment 108572 PARAMETER Experiment Name: At_Drought_cDNA_P Parameter: Treatment Value: Drought vs. No Drought
  misc_feature: MA Experiment ID: 108595 Result: Down-regulated in Transcription
  misc_feature: MA Experiment 108595 PARAMETER Experiment Name: At_Ler-pi_Ovule_cDNA_P Parameter: Plant Line Value: null
  misc_feature: MA Experiment ID: 108605 Result: Up-regulated in Transcription
  misc_feature: MA Experiment 108605 PARAMETER Experiment Name: At_100uM_ABA_cDNA_P Parameter: Timepoint (hr) Value: 6
  misc_feature: MA Experiment 108605 PARAMETER Experiment Name: At_100uM_ABA_cDNA_P Parameter: Tissue Value: Aerial
  misc_feature: MA Experiment 108605 PARAMETER Experiment Name: At_100uM_ABA_cDNA_P Parameter: Treatment Value: 100uM ABA vs. No Treatment
  misc_feature: MA Experiment ID: 108607 Result: Up-regulated in Transcription
  misc_feature: MA Experiment 108607 PARAMETER Experiment Name: At_100uM_ABA_cDNA_P Parameter: Timepoint (hr) Value: 4
  misc_feature: MA Experiment 108607 PARAMETER Experiment Name: At_100uM_ABA_cDNA_P Parameter: Tissue Value: Aerial
  misc_feature: MA Experiment 108607 PARAMETER Experiment Name: At_100uM_ABA_cDNA_P Parameter: Treatment Value: 100uM ABA vs. No Treatment
  misc_feature: MA Experiment ID: 20000069 Result: Up-regulated in Transcription
  misc_feature: MA Experiment 20000069 PARAMETER Experiment Name: At_100uM_ABA_Mutants_cDNA_P Parameter: Plant Line Value: CS23
  misc_feature: MA Experiment 20000069 PARAMETER Experiment Name: At_100uM_ABA_Mutants_cDNA_P Parameter: Timepoint (hr) Value: 6
  misc_feature: MA Experiment 20000069 PARAMETER Experiment Name: At_100uM_ABA_Mutants_cDNA_P Parameter: Tissue Value: Aerial
  misc_feature: MA Experiment 20000069 PARAMETER Experiment Name: At_100uM_ABA_Mutants_cDNA_P Parameter: Treatment Value: 100uM ABA vs. No Treatment
  misc_feature: MA Experiment ID: 20000086 Result: Up-regulated in Transcription
  misc_feature: MA Experiment 20000086 PARAMETER Experiment Name: At_100uM_ABA_Mutants_cDNA_P Parameter: Plant Line Value: CS22
  misc_feature: MA Experiment 20000086 PARAMETER Experiment Name: At_100uM_ABA_Mutants_cDNA_P Parameter: Timepoint (hr) Value: 6
  misc_feature: MA Experiment 20000086 PARAMETER Experiment Name: At_100uM_ABA_Mutants_cDNA_P Parameter: Tissue Value: Aerial
  misc_feature: MA Experiment 20000086 PARAMETER Experiment Name: At_100uM_ABA_Mutants_cDNA_P Parameter: Treatment Value: 100uM ABA vs. No Treatment
  misc_feature: MA Experiment ID: 20000087 Result: Up-regulated in Transcription
  misc_feature: MA Experiment 20000087 PARAMETER Experiment Name: At_100uM_ABA_Mutants_cDNA_P Parameter: Plant Line Value: WS
  misc_feature: MA Experiment 20000087 PARAMETER Experiment Name: At_100uM_ABA_Mutants_cDNA_P Parameter: Timepoint (hr) Value: 6
  misc_feature: MA Experiment 20000087 PARAMETER Experiment Name: At_100uM_ABA_Mutants_cDNA_P Parameter: Tissue Value: Aerial
  misc_feature: MA Experiment 20000087 PARAMETER Experiment Name: At_100uM_ABA_Mutants_cDNA_P Parameter: Treatment Value: 100uM ABA vs. No Treatment
  misc_feature: MA Experiment ID: 20000088 Result: Up-regulated in Transcription
  misc_feature: MA Experiment 20000088 PARAMETER Experiment Name: At_100uM_ABA_Mutants_cDNA_P Parameter: Plant Line Value: Landsberg
  misc_feature: MA Experiment 20000088 PARAMETER Experiment Name: At_100uM_ABA_Mutants_cDNA_P Parameter: Timepoint (hr) Value: 6
  misc_feature: MA Experiment 20000088 PARAMETER Experiment Name: At_100uM_ABA_Mutants_cDNA_P Parameter: Tissue Value: Aerial
  misc_feature: MA Experiment 20000088 PARAMETER Experiment Name: At_100uM_ABA_Mutants_cDNA_P Parameter: Treatment Value: 100uM ABA vs. No Treatment
  misc_feature: MA Experiment ID: 20000166 Result: Up-regulated in Transcription
  misc_feature: MA Experiment 20000166 PARAMETER Experiment Name: At_100uM_ABA_P Parameter: Age (day) Value: 14
  misc_feature: MA Experiment 20000166 PARAMETER Experiment Name: At_100uM_ABA_P Parameter: Organism Value: A. thaliana
  misc_feature: MA Experiment 20000166 PARAMETER Experiment Name: At_100uM_ABA_P Parameter: Plant Line Value: WS
  misc_feature: MA Experiment 20000166 PARAMETER Experiment Name: At_100uM_ABA_P Parameter: Timepoint (hr) Value: 1
  misc_feature: MA Experiment 20000166 PARAMETER Experiment Name: At_100uM_ABA_P Parameter: Tissue Value: Aerial
  misc_feature: MA Experiment 20000166 PARAMETER Experiment Name: At_100uM_ABA_P Parameter: Treatment Value: 100uM ABA vs. No Treatment
  misc_feature: MA Experiment ID: 20000169 Result: Up-regulated in Transcription
  misc_feature: MA Experiment 20000169 PARAMETER Experiment Name: At_100uM_ABA_P Parameter: Age (day) Value: 14
  misc_feature: MA Experiment 20000169 PARAMETER Experiment Name: At_100uM_ABA_P Parameter: Organism Value: A. thaliana
  misc_feature: MA Experiment 20000169 PARAMETER Experiment Name: At_100uM_ABA_P Parameter: Plant Line Value: WS
  misc_feature: MA Experiment 20000169 PARAMETER Experiment Name: At_100uM_ABA_P Parameter: Timepoint (hr) Value: 6
  misc_feature: MA Experiment 20000169 PARAMETER Experiment Name: At_100uM_ABA_P Parameter: Tissue Value: Aerial
  misc_feature: MA Experiment 20000169 PARAMETER Experiment Name: At_100uM_ABA_P Parameter: Treatment Value: 100uM ABA vs. No Treatment
  misc_feature: MA Experiment ID: 20000185 Result: Down-regulated in Transcription
  misc_feature: MA Experiment 20000185 PARAMETER Experiment Name: At_Roots__P Parameter: Age (day) Value: 7 vs. 21
  misc_feature: MA Experiment 20000185 PARAMETER Experiment Name: At_Roots__P Parameter: Organism Value: A. thaliana
  misc_feature: MA Experiment 20000185 PARAMETER Experiment Name: At_Roots__P Parameter: Tissue Value: Roots vs. Whole Plant
  misc_feature: MA Experiment ID: 20000224 Result: Down-regulated in Transcription
  misc_feature: MA Experiment ID: 20000227 Result: Down-regulated in Transcription
  misc_feature: MA Experiment 20000227 PARAMETER Experiment Name: At_Root-Tips-vs-Tops_P Parameter: Tissue Value: Root Tips vs. Root Tops
  misc_feature: MA Experiment ID: 20000234 Result: Down-regulated in Transcription
  misc_feature: MA Experiment 20000234 PARAMETER Experiment Name: At_Siliques_P Parameter: Age (day) Value: 21
  misc_feature: MA Experiment 20000234 PARAMETER Experiment Name: At_Siliques_P Parameter: Organism Value: A. thaliana
  misc_feature: MA Experiment 20000234 PARAMETER Experiment Name: At_Siliques_P Parameter: Plant Line Value: WS
  misc_feature: MA Experiment 20000234 PARAMETER Experiment Name: At_Siliques_P Parameter: Tissue Value: Less Than 5mm Siliques vs. Whole Plant
  misc_feature: MA Experiment ID: 20000235 Result: Down-regulated in Transcription
  misc_feature: MA Experiment 20000235 PARAMETER Experiment Name: At_Siliques_P Parameter: Age (day) Value: 21
  misc_feature: MA Experiment 20000235 PARAMETER Experiment Name: At_Siliques_P Parameter: Organism Value: A. thaliana
  misc_feature: MA Experiment 20000235 PARAMETER Experiment Name: At_Siliques_P Parameter: Plant Line Value: WS
  misc_feature: MA Experiment 20000235 PARAMETER Experiment Name: At_Siliques_P Parameter: Tissue Value: 5-10mm Siliques vs. Whole Plant
  misc_feature: MA Experiment ID: 20000264 Result: Down-regulated in Transcription
  misc_feature: MA Experiment 20000264 PARAMETER Experiment Name: At_Open_Flower_P Parameter: Age (day) Value: 21
  misc_feature: MA Experiment 20000264 PARAMETER Experiment Name: At_Open_Flower_P Parameter: Plant Line Value: WS
  misc_feature: MA Experiment 20000264 PARAMETER Experiment Name: At_Open_Flower_P Parameter: Tissue Value: Open Flower vs. Whole Plant
  misc_feature: MA Experiment ID: 20000265 Result: Down-regulated in Transcription
  misc_feature: MA Experiment 20000265 PARAMETER Experiment Name: At_Open_Flower_P Parameter: Age (day) Value: 21
  misc_feature: MA Experiment 20000265 PARAMETER Experiment Name: At_Open_Flower_P Parameter: Plant Line Value: WS
  misc_feature: MA Experiment 20000265 PARAMETER Experiment Name: At_Open_Flower_P Parameter: Tissue Value: Closed Flower vs. Whole Plant
  misc_feature: MA Experiment ID: 20000267 Result: Up-regulated in Transcription
  misc_feature: MA Experiment 20000267 PARAMETER Experiment Name: At_Drought_P Parameter: Age (day) Value: 7
  misc_feature: MA Experiment 20000267 PARAMETER Experiment Name: At_Drought_P Parameter: Organism Value: A. thaliana
  misc_feature: MA Experiment 20000267 PARAMETER Experiment Name: At_Drought_P Parameter: Plant Line Value: WS
  misc_feature: MA Experiment 20000267 PARAMETER Experiment Name: At_Drought_P Parameter: Timepoint (hr) Value: 6
  misc_feature: MA Experiment 20000267 PARAMETER Experiment Name: At_Drought_P Parameter: Tissue Value: Whole Plant
  misc_feature: MA Experiment 20000267 PARAMETER Experiment Name: At_Drought_P Parameter: Treatment Value: Drought vs. No Drought
  misc_feature: MA Experiment ID: 20000268 Result: Up-regulated in Transcription
  misc_feature: MA Experiment 20000268 PARAMETER Experiment Name: At_100mM_NaCl__P Parameter: Age (day) Value: 14
  misc_feature: MA Experiment 20000268 PARAMETER Experiment Name: At_100mM_NaCl__P Parameter: Organism Value: A. thaliana
  misc_feature: MA Experiment 20000268 PARAMETER Experiment Name: At_100mM_NaCl__P Parameter: Plant Line Value: WS
  misc_feature: MA Experiment 20000268 PARAMETER Experiment Name: At_100mM_NaCl__P Parameter: Timepoint (hr) Value: 6
  misc_feature: MA Experiment 20000268 PARAMETER Experiment Name: At_100mM_NaCl__P Parameter: Tissue Value: Whole Plant
  misc_feature: MA Experiment 20000268 PARAMETER Experiment Name: At_100mM_NaCl__P Parameter: Treatment Value: 100mM NaCl vs. No Treatment
  misc_feature: MA Experiment ID: 20000286 Result: Down-regulated in Transcription
  misc_feature: MA Experiment 20000286 PARAMETER Experiment Name: At_Open_Flower_P Parameter: Age (day) Value: 21
  misc_feature: MA Experiment 20000286 PARAMETER Experiment Name: At_Open_Flower_P Parameter: Plant Line Value: WS
  misc_feature: MA Experiment 20000286 PARAMETER Experiment Name: At_Open_Flower_P Parameter: Tissue Value: Half Open vs. Whole Plant
  misc_feature: MA Experiment ID: 20000436 Result: Up-regulated in Transcription
  misc_feature: MA Experiment 20000436 PARAMETER Experiment Name: At_Drought_P Parameter: Age (day) Value: 7
  misc_feature: MA Experiment 20000436 PARAMETER Experiment Name: At_Drought_P Parameter: Organism Value: A. thaliana
  misc_feature: MA Experiment 20000436 PARAMETER Experiment Name: At_Drought_P Parameter: Plant Line Value: WS
  misc_feature: MA Experiment 20000436 PARAMETER Experiment Name: At_Drought_P Parameter: Timepoint (hr) Value: 12
  misc_feature: MA Experiment 20000436 PARAMETER Experiment Name: At_Drought_P Parameter: Tissue Value: Whole Plant
  misc_feature: MA Experiment 20000436 PARAMETER Experiment Name: At_Drought_P Parameter: Treatment Value: Drought vs. No Drought
  misc_feature: MA Experiment ID: 20000437 Result: Up-regulated in Transcription
  misc_feature: MA Experiment 20000437 PARAMETER Experiment Name: At_Drought_P Parameter: Age (day) Value: 8
  misc_feature: MA Experiment 20000437 PARAMETER Experiment Name: At_Drought_P Parameter: Organism Value: A. thaliana
  misc_feature: MA Experiment 20000437 PARAMETER Experiment Name: At_Drought_P Parameter: Plant Line Value: WS
  misc_feature: MA Experiment 20000437 PARAMETER Experiment Name: At_Drought_P Parameter: Timepoint (hr) Value: 24
  misc_feature: MA Experiment 20000437 PARAMETER Experiment Name: At_Drought_P Parameter: Tissue Value: Whole Plant
  misc_feature: MA Experiment 20000437 PARAMETER Experiment Name: At_Drought_P Parameter: Treatment Value: Drought vs. No Drought
  misc_feature: MA Experiment ID: 20000439 Result: Down-regulated in Transcription
  misc_feature: MA Experiment 20000439 PARAMETER Experiment Name: At_Roots__P Parameter: Age (day) Value: 14 vs. 21
  misc_feature: MA Experiment 20000439 PARAMETER Experiment Name: At_Roots__P Parameter: Organism Value: A. thaliana
  misc_feature: MA Experiment 20000439 PARAMETER Experiment Name: At_Roots__P Parameter: Tissue Value: Roots vs. Whole Plant
  misc_feature: MA Experiment ID: 20000451 Result: Down-regulated in Transcription
  misc_feature: MA Experiment 20000451 PARAMETER Experiment Name: At_CS6879_Shoots-Roots_P Parameter: Age (day) Value: 14
  misc_feature: MA Experiment 20000451 PARAMETER Experiment Name: At_CS6879_Shoots-Roots_P Parameter: Organism Value: A. thaliana
  misc_feature: MA Experiment 20000451 PARAMETER Experiment Name: At_CS6879_Shoots-Roots_P Parameter: Plant Line Value: CS6879 vs. WS
  misc_feature: MA Experiment 20000451 PARAMETER Experiment Name: At_CS6879_Shoots-Roots_P Parameter: Tissue Value: Roots
  misc_feature: MA Experiment ID: 20000453 Result: Up-regulated in Transcription
  misc_feature: MA Experiment 20000453 PARAMETER Experiment Name: At_100uM_ABA_P Parameter: Age (day) Value: 15
  misc_feature: MA Experiment 20000453 PARAMETER Experiment Name: At_100uM_ABA_P Parameter: Organism Value: A. thaliana
  misc_feature: MA Experiment 20000453 PARAMETER Experiment Name: At_100uM_ABA_P Parameter: Plant Line Value: WS
  misc_feature: MA Experiment 20000453 PARAMETER Experiment Name: At_100uM_ABA_P Parameter: Timepoint (hr) Value: 24
  misc_feature: MA Experiment 20000453 PARAMETER Experiment Name: At_100uM_ABA_P Parameter: Tissue Value: Aerial
  misc_feature: MA Experiment 20000453 PARAMETER Experiment Name: At_100uM_ABA_P Parameter: Treatment Value: 100uM ABA vs. No Treatment
  misc_feature: MA Experiment ID: 20000574 Result: Down-regulated in Transcription
  misc_feature: MA Experiment 20000574 PARAMETER Experiment Name: At_100uM_ABA_Mutants__P Parameter: Organism Value: A. thaliana
  misc_feature: MA Experiment 20000574 PARAMETER Experiment Name: At_100uM_ABA_Mutants__P Parameter: Plant Line Value: CS23 vs. Ler wt
  misc_feature: MA Experiment 20000574 PARAMETER Experiment Name: At_100uM_ABA_Mutants__P Parameter: Timepoint (hr) Value: N/A
  misc_feature: MA Experiment 20000574 PARAMETER Experiment Name: At_100uM_ABA_Mutants__P Parameter: Tissue Value: Whole Plant
  misc_feature: MA Experiment 20000574 PARAMETER Experiment Name: At_100uM_ABA_Mutants__P Parameter: Treatment Value: None
  misc_feature: MA Experiment ID: 20000709 Result: Down-regulated in Transcription
  misc_feature: MA Experiment 20000709 PARAMETER Experiment Name: At_15mM_NH4NO3_L-to-H_P Parameter: Age (hr) Value: 14
  misc_feature: MA Experiment 20000709 PARAMETER Experiment Name: At_15mM_NH4NO3_L-to-H_P Parameter: Organism Value: A. thaliana
  misc_feature: MA Experiment 20000709 PARAMETER Experiment Name: At_15mM_NH4NO3_L-to-H_P Parameter: Plant Line Value: WS
  misc_feature: MA Experiment 20000709 PARAMETER Experiment Name: At_15mM_NH4NO3_L-to-H_P Parameter: Timepoint (hr) Value: 4
  misc_feature: MA Experiment 20000709 PARAMETER Experiment Name: At_15mM_NH4NO3_L-to-H_P Parameter: Tissue Value: Aerial
  misc_feature: MA Experiment 20000709 PARAMETER Experiment Name: At_15mM_NH4NO3_L-to-H_P Parameter: Treatment Value: 15mM NH4NO3 vs. 30mM Mannitol
  misc_feature: MA Experiment ID: 20000794 Result: Down-regulated in Transcription
  misc_feature: MA Experiment 20000794 PARAMETER Experiment Name: At_Petals_P Parameter: Age (day) Value: 23-25 days
  misc_feature: MA Experiment 20000794 PARAMETER Experiment Name: At_Petals_P Parameter: Plant Line Value: WS
  misc_feature: MA Experiment 20000794 PARAMETER Experiment Name: At_Petals_P Parameter: Tissue Value: Petals vs. Whole plant
  misc_feature: MA Experiment ID: 20001247 Result: Up-regulated in Transcription
  misc_feature: MA Experiment 20001247 PARAMETER Experiment Name: At_Far-red-induction_P Parameter: Age (day) Value: 7
  misc_feature: MA Experiment 20001247 PARAMETER Experiment Name: At_Far-red-induction_P Parameter: Light Value: Far-red vs. White
  misc_feature: MA Experiment 20001247 PARAMETER Experiment Name: At_Far-red-induction_P Parameter: Organism Value: A. thaliana
  misc_feature: MA Experiment 20001247 PARAMETER Experiment Name: At_Far-red-induction_P Parameter: Plant Line Value: Columbia
  misc_feature: MA Experiment 20001247 PARAMETER Experiment Name: At_Far-red-induction_P Parameter: Timepoint (hr) Value: 1
  misc_feature: MA Experiment 20001247 PARAMETER Experiment Name: At_Far-red-induction_P Parameter: Tissue Value: Whole Plant
  misc_feature: MA Experiment ID: 20001248 Result: Up-regulated in Transcription
  misc_feature: MA Experiment 20001248 PARAMETER Experiment Name: At_Far-red-induction_P Parameter: Age (day) Value: 7
  misc_feature: MA Experiment 20001248 PARAMETER Experiment Name: At_Far-red-induction_P Parameter: Light Value: Far-red vs. White
  misc_feature: MA Experiment 20001248 PARAMETER Experiment Name: At_Far-red-induction_P Parameter: Organism Value: A. thaliana
  misc_feature: MA Experiment 20001248 PARAMETER Experiment Name: At_Far-red-induction_P Parameter: Plant Line Value: Columbia
  misc_feature: MA Experiment 20001248 PARAMETER Experiment Name: At_Far-red-induction_P Parameter: Timepoint (hr) Value: 4
  misc_feature: MA Experiment 20001248 PARAMETER Experiment Name: At_Far-red-induction_P Parameter: Tissue Value: Whole Plant
  misc_feature: MA Experiment ID: 20001450 Result: Up-regulated in Transcription
  misc_feature: MA Experiment 20001450 PARAMETER Experiment Name: At_Far-red-induction_P Parameter: Age (day) Value: 7
  misc_feature: MA Experiment 20001450 PARAMETER Experiment Name: At_Far-red-induction_P Parameter: Light Value: Far-red vs. White
  misc_feature: MA Experiment 20001450 PARAMETER Experiment Name: At_Far-red-induction_P Parameter: Organism Value: A. thaliana
  misc_feature: MA Experiment 20001450 PARAMETER Experiment Name: At_Far-red-induction_P Parameter: Plant Line Value: Columbia
  misc_feature: MA Experiment 20001450 PARAMETER Experiment Name: At_Far-red-induction_P Parameter: Timepoint (hr) Value: 8
  misc_feature: MA Experiment 20001450 PARAMETER Experiment Name: At_Far-red-induction_P Parameter: Tissue Value: Whole Plant
  misc_feature: MA Experiment ID: 20001451 Result: Up-regulated in Transcription
  misc_feature: MA Experiment 20001451 PARAMETER Experiment Name: At_Far-red-induction_P Parameter: Age (day) Value: 7
  misc_feature: MA Experiment 20001451 PARAMETER Experiment Name: At_Far-red-induction_P Parameter: Light Value: Far-red vs. White
  misc_feature: MA Experiment 20001451 PARAMETER Experiment Name: At_Far-red-induction_P Parameter: Organism Value: A. thaliana
  misc_feature: MA Experiment 20001451 PARAMETER Experiment Name: At_Far-red-induction_P Parameter: Plant Line Value: Columbia
  misc_feature: MA Experiment 20001451 PARAMETER Experiment Name: At_Far-red-induction_P Parameter: Timepoint (hr) Value: 24
  misc_feature: MA Experiment 20001451 PARAMETER Experiment Name: At_Far-red-induction_P Parameter: Tissue Value: Whole Plant
  misc_feature: MA Experiment ID: 20001554 Result: Up-regulated in Transcription
  misc_feature: MA Experiment 20001554 PARAMETER Experiment Name: At_Drought_Soil_Dry_P Parameter: Age (day) Value: 21
  misc_feature: MA Experiment 20001554 PARAMETER Experiment Name: At_Drought_Soil_Dry_P Parameter: Organism Value: A. thaliana
  misc_feature: MA Experiment 20001554 PARAMETER Experiment Name: At_Drought_Soil_Dry_P Parameter: Plant Line Value: WS
  misc_feature: MA Experiment 20001554 PARAMETER Experiment Name: At_Drought_Soil_Dry_P Parameter: Post Timepoint (hr) Value: None
  misc_feature: MA Experiment 20001554 PARAMETER Experiment Name: At_Drought_Soil_Dry_P Parameter: Post-Treatment Value: None
  misc_feature: MA Experiment 20001554 PARAMETER Experiment Name: At_Drought_Soil_Dry_P Parameter: Timepoint (day) Value: 7
  misc_feature: MA Experiment 20001554 PARAMETER Experiment Name: At_Drought_Soil_Dry_P Parameter: Treatment Value: Drought vs. No Drought
  misc_feature: MA Experiment ID: 20001555 Result: Up-regulated in Transcription
  misc_feature: MA Experiment 20001555 PARAMETER Experiment Name: At_Drought_Soil_Dry_P Parameter: Age (day) Value: 24
  misc_feature: MA Experiment 20001555 PARAMETER Experiment Name: At_Drought_Soil_Dry_P Parameter: Organism Value: A. thaliana
  misc_feature: MA Experiment 20001555 PARAMETER Experiment Name: At_Drought_Soil_Dry_P Parameter: Plant Line Value: WS
  misc_feature: MA Experiment 20001555 PARAMETER Experiment Name: At_Drought_Soil_Dry_P Parameter: Post Timepoint (hr) Value: None
  misc_feature: MA Experiment 20001555 PARAMETER Experiment Name: At_Drought_Soil_Dry_P Parameter: Post-Treatment Value: None
  misc_feature: MA Experiment 20001555 PARAMETER Experiment Name: At_Drought_Soil_Dry_P Parameter: Timepoint (day) Value: 10
  misc_feature: MA Experiment 20001555 PARAMETER Experiment Name: At_Drought_Soil_Dry_P Parameter: Treatment Value: Drought vs. No Drought
  misc_feature: MA Experiment ID: 20001556 Result: Up-regulated in Transcription
  misc_feature: MA Experiment 20001556 PARAMETER Experiment Name: At_Drought_Soil_Dry_P Parameter: Age (day) Value: 26
  misc_feature: MA Experiment 20001556 PARAMETER Experiment Name: At_Drought_Soil_Dry_P Parameter: Organism Value: A. thaliana
  misc_feature: MA Experiment 20001556 PARAMETER Experiment Name: At_Drought_Soil_Dry_P Parameter: Plant Line Value: WS
  misc_feature: MA Experiment 20001556 PARAMETER Experiment Name: At_Drought_Soil_Dry_P Parameter: Post Timepoint (hr) Value: None
  misc_feature: MA Experiment 20001556 PARAMETER Experiment Name: At_Drought_Soil_Dry_P Parameter: Post-Treatment Value: None
  misc_feature: MA Experiment 20001556 PARAMETER Experiment Name: At_Drought_Soil_Dry_P Parameter: Timepoint (day) Value: 12
  misc_feature: MA Experiment 20001556 PARAMETER Experiment Name: At_Drought_Soil_Dry_P Parameter: Treatment Value: Drought vs. No Drought
  misc_feature: MA Experiment ID: 20001558 Result: Down-regulated in Transcription
  misc_feature: MA Experiment 20001558 PARAMETER Experiment Name: At_Drought_Soil_Dry_P Parameter: Age (day) Value: 27
  misc_feature: MA Experiment 20001558 PARAMETER Experiment Name: At_Drought_Soil_Dry_P Parameter: Organism Value: A. thaliana
  misc_feature: MA Experiment 20001558 PARAMETER Experiment Name: At_Drought_Soil_Dry_P Parameter: Plant Line Value: WS
  misc_feature: MA Experiment 20001558 PARAMETER Experiment Name: At_Drought_Soil_Dry_P Parameter: Post Timepoint (hr) Value: 6
  misc_feature: MA Experiment 20001558 PARAMETER Experiment Name: At_Drought_Soil_Dry_P Parameter: Post-Treatment Value: Re-Water vs. No Drought
  misc_feature: MA Experiment 20001558 PARAMETER Experiment Name: At_Drought_Soil_Dry_P Parameter: Timepoint (day) Value: 13
  misc_feature: MA Experiment 20001558 PARAMETER Experiment Name: At_Drought_Soil_Dry_P Parameter: Treatment Value: Drought vs. No Drought
  misc_feature: MA Experiment ID: 20001559 Result: Up-regulated in Transcription
  misc_feature: MA Experiment 20001559 PARAMETER Experiment Name: At_Drought_Soil_Dry_P Parameter: Age (day) Value: 28
  misc_feature: MA Experiment 20001559 PARAMETER Experiment Name: At_Drought_Soil_Dry_P Parameter: Organism Value: A. thaliana
  misc_feature: MA Experiment 20001559 PARAMETER Experiment Name: At_Drought_Soil_Dry_P Parameter: Plant Line Value: WS
  misc_feature: MA Experiment 20001559 PARAMETER Experiment Name: At_Drought_Soil_Dry_P Parameter: Post Timepoint (hr) Value: 29
  misc_feature: MA Experiment 20001559 PARAMETER Experiment Name: At_Drought_Soil_Dry_P Parameter: Post-Treatment Value: Re-Water vs. No Drought
  misc_feature: MA Experiment 20001559 PARAMETER Experiment Name: At_Drought_Soil_Dry_P Parameter: Timepoint (day) Value: 14
  misc_feature: MA Experiment 20001559 PARAMETER Experiment Name: At_Drought_Soil_Dry_P Parameter: Treatment Value: Drought vs. No Drought
  misc_feature: MA Experiment ID: 20001560 Result: Down-regulated in Transcription
  misc_feature: MA Experiment 20001560 PARAMETER Experiment Name: At_Drought_Soil_Dry_P Parameter: Age (day) Value: 28
  misc_feature: MA Experiment 20001560 PARAMETER Experiment Name: At_Drought_Soil_Dry_P Parameter: Organism Value: A. thaliana
  misc_feature: MA Experiment 20001560 PARAMETER Experiment Name: At_Drought_Soil_Dry_P Parameter: Plant Line Value: WS
  misc_feature: MA Experiment 20001560 PARAMETER Experiment Name: At_Drought_Soil_Dry_P Parameter: Post Timepoint (hr) Value: None
  misc_feature: MA Experiment 20001560 PARAMETER Experiment Name: At_Drought_Soil_Dry_P Parameter: Post-Treatment Value: None
  misc_feature: MA Experiment 20001560 PARAMETER Experiment Name: At_Drought_Soil_Dry_P Parameter: Timepoint (day) Value: 14
  misc_feature: MA Experiment 20001560 PARAMETER Experiment Name: At_Drought_Soil_Dry_P Parameter: Treatment Value: Drought vs. No Drought
  misc_feature: MA Experiment ID: 20001906 Result: Up-regulated in Transcription
  misc_feature: MA Experiment 20001906 PARAMETER Experiment Name: At_Drought_Reproduction_P Parameter: Age (day) Value: 35
  misc_feature: MA Experiment 20001906 PARAMETER Experiment Name: At_Drought_Reproduction_P Parameter: Organism Value: A. thaliana
  misc_feature: MA Experiment 20001906 PARAMETER Experiment Name: At_Drought_Reproduction_P Parameter: Plant Line Value: WS
  misc_feature: MA Experiment 20001906 PARAMETER Experiment Name: At_Drought_Reproduction_P Parameter: Timepoint (day) Value: 5
  misc_feature: MA Experiment 20001906 PARAMETER Experiment Name: At_Drought_Reproduction_P Parameter: Tissue Value: Siliques
  misc_feature: MA Experiment 20001906 PARAMETER Experiment Name: At_Drought_Reproduction_P Parameter: Treatment Value: Drought vs. No Drought
  misc_feature: MA Experiment ID: 20001910 Result: Up-regulated in Transcription
  misc_feature: MA Experiment 20001910 PARAMETER Experiment Name: At_Drought_Reproduction_P Parameter: Age (day) Value: 37
  misc_feature: MA Experiment 20001910 PARAMETER Experiment Name: At_Drought_Reproduction_P Parameter: Organism Value: A. thaliana
  misc_feature: MA Experiment 20001910 PARAMETER Experiment Name: At_Drought_Reproduction_P Parameter: Plant Line Value: WS
  misc_feature: MA Experiment 20001910 PARAMETER Experiment Name: At_Drought_Reproduction_P Parameter: Timepoint (day) Value: 7
  misc_feature: MA Experiment 20001910 PARAMETER Experiment Name: At_Drought_Reproduction_P Parameter: Tissue Value: Flowers
  misc_feature: MA Experiment 20001910 PARAMETER Experiment Name: At_Drought_Reproduction_P Parameter: Treatment Value: Drought vs. No Drought
  misc_feature: MA Experiment ID: 20001911 Result: Up-regulated in Transcription
  misc_feature: MA Experiment 20001911 PARAMETER Experiment Name: At_Drought_Reproduction_P Parameter: Age (day) Value: 40
  misc_feature: MA Experiment 20001911 PARAMETER Experiment Name: At_Drought_Reproduction_P Parameter: Organism Value: A. thaliana
  misc_feature: MA Experiment 20001911 PARAMETER Experiment Name: At_Drought_Reproduction_P Parameter: Plant Line Value: WS
  misc_feature: MA Experiment 20001911 PARAMETER Experiment Name: At_Drought_Reproduction_P Parameter: Timepoint (day) Value: 10
  misc_feature: MA Experiment 20001911 PARAMETER Experiment Name: At_Drought_Reproduction_P Parameter: Tissue Value: Flowers
  misc_feature: MA Experiment 20001911 PARAMETER Experiment Name: At_Drought_Reproduction_P Parameter: Treatment Value: Drought vs. No Drought
ataaagaagtaaagctttgccggagatttagcaaacacaaacacaaaaaacaaaaccaactcagacgaatgtgattttttcttcttgagtgaattgttgtaaaaaaatgatgatcggagaatctcatcgtggttttaatccaacggttcatattcctccatggccactttctgaagatctaacggtgtctgatatttacggaagtccagacggaggaagtagtatgatggaagctttggctgagttacaacgttatcttccgtcaaacgaaccggatccggattcagatccggatctctcgggtccggattcaccaatcgatgcttatacatgcgatcattttcggatgtatgagtttaaagtgagacgttgtgctcgtggccggagccatgattggacggagtgtccttacgctcatcccggagaaaaagctcgccgtcgtgatccgaggaagtttcattactccggtacggcgtgtcctgagtttcgtaaaggttgttgcaagagaggagacgcatgtgagttttctcatggtgtttttgagtgttggcttcacccggcgcgttaccggactcagccgtgtaaagacggtggtaactgtcgccgtcgtgtttgtttctttgctcattcgccggatcagattagggttttgcctaatcaaagccctgatcgtgttgattcgttcgacgttttgtctcctacgattcgtagagcgtttcagttttcgatttctccgtcgtctaactcgccgccggtgagtccacgaggtgactcggactcgtcgtgttcgttactgagtcgttcactcgggtctaatctgggaaacgacgtcgttgcgtctctcaggaatctgcaacttaataaagtgaagtcttctctttcgtcgtcatacaacaatcaaatcggaggatacggatccggattcgggtcgcctcgtggatcggttttgggtcctggtttccgtagcttaccaactacaccgacccgacctggttttatgaacatttgggagaatggcttggaggaagaaccggcgatggaacgggtcgagtcgggtcgtgaactgcgagcgcagctgttcgagaagctgagcaaagagaattgcatgggtcggattgaaccggatccggatcagggagcgggtgatactcctgatgtcgggtgggtctctgacttggttatgtgatttgaaccggattcgtaaaccggagtgtctgaaatttcgttgataaagattaattaaaggattattatcggcatgggaggttttttaatggatctcttcttaggaaaagaggagatttctctgcaagttttttttttgtatatttattatttcctaatttcgtataatctctgttccataatcgatgattcgagggagattcctcagtgtataggagttgcttaggatttttcattatgatggattcactaatattgatattgttggttattgttttttttatatattatgatgtaagatgcaagtcgcaatgtaattattaaatatcttatgaatgaaatgagaatgtaaattatttat

SEQ ID NO: 104865 - protein, 359 aa, Arabidopsis thaliana; identical to SEQ ID NO: 38897
  peptide (1)..(359): Ceres Seq. ID no. 13615919
  misc_feature (119)..(144): Pfam Name: Zinc finger C-x8-C-x5-C-x3-H type (and similar) Pfam Description: Zinc finger C-x8-C-x5-C-x3-H type (and similar)
  misc_feature (1)..(359): Homolog of NCBI NO: 15224852 NR Description: CCCH-type zinc finger protein -related
  misc_feature (1)..(359): Homolog of NCBI NO: 15233491 NR Description: expressed protein [Arabidopsis thaliana]
  misc_feature (1)..(219): Homolog of NCBI NO: 15225213 NR Description: CCCH-type zinc finger protein -related
  misc_feature (1)..(219): Homolog of NCBI NO: 21593538 NR Description: putative CCCH-type zinc finger protein
  misc_feature (1)..(223): Homolog of NCBI NO: 34906436 NR Description: putative zinc finger transcription factor [Oryza
  misc_feature (105)..(219): Homolog of NCBI NO: 1800279 NR Description: putative Cys3His zinc finger protein ATCTH
  misc_feature (258)..(335): Homolog of NCBI NO: 1800279 NR Description: putative Cys3His zinc finger protein ATCTH
  misc_feature (7)..(260): Homolog of NCBI NO: 15219557 NR Description: expressed protein [Arabidopsis thaliana]
  misc_feature (7)..(260): Homolog of NCBI NO: 26449538 NR Description: unknown protein [Arabidopsis thaliana]
  misc_feature (20)..(260): Homolog of NCBI NO: 28273376 NR Description: unknown protein [Oryza sativa (japonica

SEQ ID NO: 104866 - protein, 358 aa, Arabidopsis thaliana; identical to SEQ ID NO: 38898
  peptide (1)..(358): Ceres Seq. ID no. 13615920
  misc_feature (118)..(143): Pfam Name: Zinc finger C-x8-C-x5-C-x3-H type (and similar) Pfam Description: Zinc finger C-x8-C-x5-C-x3-H type (and similar)
  misc_feature (1)..(358): Homolog of NCBI NO: 15224852 NR Description: CCCH-type zinc finger protein -related
  misc_feature (1)..(358): Homolog of NCBI NO: 15233491 NR Description: expressed protein [Arabidopsis thaliana]
  misc_feature (1)..(218): Homolog of NCBI NO: 15225213 NR Description: CCCH-type zinc finger protein -related
  misc_feature (1)..(218): Homolog of NCBI NO: 21593538 NR Description: putative CCCH-type zinc finger protein
  misc_feature (1)..(222): Homolog of NCBI NO: 34906436 NR Description: putative zinc finger transcription factor [Oryza
  misc_feature (104)..(218): Homolog of NCBI NO: 1800279 NR Description: putative Cys3His zinc finger protein ATCTH
  misc_feature (257)..(334): Homolog of NCBI NO: 1800279 NR Description: putative Cys3His zinc finger protein ATCTH
  misc_feature (6)..(259): Homolog of NCBI NO: 15219557 NR Description: expressed protein [Arabidopsis thaliana]
  misc_feature (6)..(259): Homolog of NCBI NO: 26449538 NR Description: unknown protein [Arabidopsis thaliana]
  misc_feature (19)..(259): Homolog of NCBI NO: 28273376 NR Description: unknown protein [Oryza sativa (japonica

SEQ ID NO: 104867 - protein, 320 aa, Arabidopsis thaliana; identical to SEQ ID NO: 38899
  peptide (1)..(320): Ceres Seq. ID no. 13615921
  misc_feature (80)..(105): Pfam Name: Zinc finger C-x8-C-x5-C-x3-H type (and similar) Pfam Description: Zinc finger C-x8-C-x5-C-x3-H type (and similar)
  misc_feature (1)..(320): Homolog of NCBI NO: 15224852 NR Description: CCCH-type zinc finger protein -related
  misc_feature (1)..(320): Homolog of NCBI NO: 15233491 NR Description: expressed protein [Arabidopsis thaliana]
  misc_feature (1)..(180): Homolog of NCBI NO: 15225213 NR Description: CCCH-type zinc finger protein -related
  misc_feature (1)..(180): Homolog of NCBI NO: 21593538 NR Description: putative CCCH-type zinc finger protein
  misc_feature (1)..(184): Homolog of NCBI NO: 34906436 NR Description: putative zinc finger transcription factor [Oryza
  misc_feature (66)..(180): Homolog of NCBI NO: 1800279 NR Description: putative Cys3His zinc finger protein ATCTH
  misc_feature (219)..(296): Homolog of NCBI NO: 1800279 NR Description: putative Cys3His zinc finger protein ATCTH
  misc_feature (1)..(221): Homolog of NCBI NO: 15219557 NR Description: expressed protein [Arabidopsis thaliana]
  misc_feature (1)..(221): Homolog of NCBI NO: 26449538 NR Description: unknown protein [Arabidopsis thaliana]
  misc_feature (1)..(221): Homolog of NCBI NO: 28273376 NR Description: unknown protein [Oryza sativa (japonica

SEQ ID NO: 104868 - DNA, 1274 bp, Arabidopsis thaliana
  misc_feature (1)..(1274): Ceres Seq. ID no. 13615922
  misc_feature: MA Experiment ID: 108434 Result: Up-regulated in Transcription
  misc_feature: MA Experiment 108434 PARAMETER Experiment Name: At_Root_Tips_cDNA_P Parameter: Tissue Value: Root Tips
  misc_feature: MA Experiment ID: 108461 Result: Down-regulated in Transcription
  misc_feature: MA Experiment 108461 PARAMETER Experiment Name: At_Germinating_Seeds_cDNA_P Parameter: Age (day) Value: 1 vs. 0
  misc_feature: MA Experiment 108461 PARAMETER Experiment Name: At_Germinating_Seeds_cDNA_P Parameter: Tissue Value: Germinating Seeds
  misc_feature: MA Experiment ID: 108462 Result: Down-regulated in Transcription
  misc_feature: MA Experiment 108462 PARAMETER Experiment Name: At_Germinating_Seeds_cDNA_P Parameter: Age (day) Value: 2 vs. 0
  misc_feature: MA Experiment 108462 PARAMETER Experiment Name: At_Germinating_Seeds_cDNA_P Parameter: Tissue Value: Germinating Seeds
  misc_feature: MA Experiment ID: 108463 Result: Down-regulated in Transcription
  misc_feature: MA Experiment 108463 PARAMETER Experiment Name: At_Germinating_Seeds_cDNA_P Parameter: Age (day) Value: 3 vs. 0
  misc_feature: MA Experiment 108463 PARAMETER Experiment Name: At_Germinating_Seeds_cDNA_P Parameter: Tissue Value: Germinating Seeds
  misc_feature: MA Experiment ID: 108464 Result: Down-regulated in Transcription
  misc_feature: MA Experiment 108464 PARAMETER Experiment Name: At_Germinating_Seeds_cDNA_P Parameter: Age (day) Value: 4 vs. 0
  misc_feature: MA Experiment 108464 PARAMETER Experiment Name: At_Germinating_Seeds_cDNA_P Parameter: Tissue Value: Germinating Seeds
  misc_feature: MA Experiment ID: 20000111 Result: Up-regulated in Transcription
  misc_feature: MA Experiment 20000111 PARAMETER Experiment Name: At_42deg_Heat_cDNA_P Parameter: Temperature (deg C) Value: 42 vs. 22
  misc_feature: MA Experiment 20000111 PARAMETER Experiment Name: At_42deg_Heat_cDNA_P Parameter: Timepoint (hr) Value: 6
  misc_feature: MA Experiment 20000111 PARAMETER Experiment Name: At_42deg_Heat_cDNA_P Parameter: Tissue Value: Aerial
  misc_feature: MA Experiment ID: 20000227 Result: Up-regulated in Transcription
  misc_feature: MA Experiment 20000227 PARAMETER Experiment Name: At_Root-Tips-vs-Tops_P Parameter: Tissue Value: Root Tips vs. Root Tops
cctccagaagcctaaaaccttcaccaccaaatcggtgcctccttgaatagtcgccgccgtcgtctatcatcgccgcttgtgactccgatgagaagctaggttattgaatcagagattatggctgcttcaatttcaagaaggatttttcgcacttttggatccttttcagctctaggacgttcctcttcaccaaatttgtctgcgaatacatctggaaatggtttagcttctcttactaatgatctaaagtatggaatggctttactttccaaccgaaagctctccacttctattttgactcctgatgattcatttccttctgatttacttaccaaaaagactgtgcttacaccagaccgaaccataggacaatatcaagacttggtcattccagtgactaattttcagaacgaggaaaagggtttcatggttttagcaggtgatgtctttgatgttccaataaggaaagatatcattcacaatgtcgtgcgatggcagcttgcgaaacgccagcagggaactcattcgaccaaaacgttaagtgaggttagtggaactggtagaaagccatggaatcagaagggtacaggtcgagctagacatggtacactacgtggtccgcagttccgaggtggttgtgtaatgcatggacccaaaccaagaagccatgccataaaaatgaataagcaggttcgacggcttggactgaaaatagcattgacagctcgagccgcagaaggaaaactcctcgtgtttgatgatttgggattgcctacgcataaaacaaagaacattgtgaactattacaaccaaatggagaacacaaagaaagtccttgttgtagaaggtggtcctattgatgaaaagctgaagctagccacccaaaatctacactatgtcaacataattccatcaatagggctaaatgtttacagcattctgctacacgatacgcttctgatgtcccgtgatgctgtgaataagatcgttgagcgtatgcacactcctattaaccgttgaagagacaacaatgtcttaaaatggcactctcaataagaatactagatcacaaggaatcccgcatgtagtatctgtaccggttcattgtttgttagctttttggtctggttttgcaacatagaatggtgaaggattgagttttaaaataatgaatggtgatactatttctatgtttttagacattctttttttaccgttttaaatatgacttaggctttcgtgtttttgaaaaggcattttgatagaaaatttct

SEQ ID NO: 104869 - protein, 300 aa, Arabidopsis thaliana; identical to SEQ ID NO: 43198
  peptide (1)..(300): Ceres Seq. ID no. 13615923
  misc_feature (103)..(293): Pfam Name: Ribosomal protein L4/L1 family Pfam Description: Ribosomal protein L4/L1 family
  misc_feature (1)..(300): Homolog of NCBI NO: 18399235 NR Description: ribosomal protein L4p family [Arabidopsis >gi|18252969|gb|AAL62411.1| 50S ribosomal protein L4 [Arabidopsis >gi|20197568|gb|AAD24390.2| 50S ribosomal protein L4 protein L4
  misc_feature (1)..(300): Homolog of NCBI NO: 21553676 NR Description: 50S ribosomal protein L4 [Arabidopsis thaliana]
  misc_feature (36)..(300): Homolog of NCBI NO: 25411960 NR Description: 50S ribosomal protein L4 [imported] - Arabidopsis
  misc_feature (93)..(294): Homolog of NCBI NO: 22966121 NR Description: hypothetical protein [Rhodospirillum rubrum]
  misc_feature (93)..(294): Homolog of NCBI NO: 15892928 NR Description: 50S ribosomal protein L4 [Rickettsia conorii]
  misc_feature (93)..(294): Homolog of NCBI NO: 15604504 NR Description: 50S RIBOSOMAL PROTEIN L4 (rplD) [Rickettsia >gi|6226007|sp|Q9ZCQ6|RL4_RICPR 50S ribosomal protein L4
  misc_feature (93)..(294): Homolog of NCBI NO: 23014087 NR Description: hypothetical protein [Magnetospirillum
  misc_feature (91)..(293): Homolog of NCBI NO: 13470552 NR Description: 50S ribosomal protein L4 [Mesorhizobium loti]
  misc_feature (91)..(293): Homolog of NCBI NO: 15965110 NR Description: PROBABLE 50S RIBOSOMAL PROTEIN L4 [Sinorhizobium >gi|15074290|emb|CAC45936.1| PROBABLE 50S RIBOSOMAL PROTEIN L4
  misc_feature (93)..(293): Homolog of NCBI NO: 15889241 NR Description: AGR_C_3553p [Agrobacterium tumefaciens]

SEQ ID NO: 104870 - protein, 254 aa, Arabidopsis thaliana; identical to SEQ ID NO: 43199
  peptide (1)..(254): Ceres Seq. ID no. 13615924
  misc_feature (57)..(247): Pfam Name: Ribosomal protein L4/L1 family Pfam Description: Ribosomal protein L4/L1 family
  misc_feature (1)..(254): Homolog of NCBI NO: 18399235 NR Description: ribosomal protein L4p family [Arabidopsis >gi|18252969|gb|AAL62411.1| 50S ribosomal protein L4 [Arabidopsis >gi|20197568|gb|AAD24390.2| 50S ribosomal protein L4 protein L4
  misc_feature (1)..(254): Homolog of NCBI NO: 21553676 NR Description: 50S ribosomal protein L4 [Arabidopsis thaliana]
  misc_feature (1)..(254): Homolog of NCBI NO: 25411960 NR Description: 50S ribosomal protein L4 [imported] - Arabidopsis
  misc_feature (47)..(248): Homolog of NCBI NO: 22966121 NR Description: hypothetical protein [Rhodospirillum rubrum]
  misc_feature (47)..(248): Homolog of NCBI NO: 15892928 NR Description: 50S ribosomal protein L4 [Rickettsia conorii]
  misc_feature (47)..(248): Homolog of NCBI NO: 15604504 NR Description: 50S RIBOSOMAL PROTEIN L4 (rplD) [Rickettsia >gi|6226007|sp|Q9ZCQ6|RL4_RICPR 50S ribosomal protein L4
  misc_feature (47)..(248): Homolog of NCBI NO: 23014087 NR Description: hypothetical protein [Magnetospirillum
  misc_feature (45)..(247): Homolog of NCBI NO: 13470552 NR Description: 50S ribosomal protein L4 [Mesorhizobium loti]
  misc_feature (45)..(247): Homolog of NCBI NO: 15965110 NR Description: PROBABLE 50S RIBOSOMAL PROTEIN L4 [Sinorhizobium >gi|15074290|emb|CAC45936.1| PROBABLE 50S RIBOSOMAL PROTEIN L4
  misc_feature (47)..(247): Homolog of NCBI NO: 15889241 NR Description: AGR_C_3553p [Agrobacterium tumefaciens]

SEQ ID NO: 104871 - protein, 197 aa, Arabidopsis thaliana; identical to SEQ ID NO: 43200
  peptide (1)..(197): Ceres Seq. ID no. 13615925
  misc_feature (1)..(190): Pfam Name: Ribosomal protein L4/L1 family Pfam Description: Ribosomal protein L4/L1 family
  misc_feature (1)..(197): Homolog of NCBI NO: 18399235 NR Description: ribosomal protein L4p family [Arabidopsis >gi|18252969|gb|AAL62411.1| 50S ribosomal protein L4 [Arabidopsis >gi|20197568|gb|AAD24390.2| 50S ribosomal protein L4 protein L4
  misc_feature (1)..(197): Homolog of NCBI NO: 21553676 NR Description: 50S ribosomal protein L4 [Arabidopsis thaliana]
  misc_feature (1)..(197): Homolog of NCBI NO: 25411960 NR Description: 50S ribosomal protein L4 [imported] - Arabidopsis
  misc_feature (1)..(191): Homolog of NCBI NO: 22966121 NR Description: hypothetical protein [Rhodospirillum rubrum]
  misc_feature (1)..(191): Homolog of NCBI NO: 15892928 NR Description: 50S ribosomal protein L4 [Rickettsia conorii]
  misc_feature (1)..(191): Homolog of NCBI NO: 15604504 NR Description: 50S RIBOSOMAL PROTEIN L4 (rplD) [Rickettsia >gi|6226007|sp|Q9ZCQ6|RL4_RICPR 50S ribosomal protein L4
  misc_feature (1)..(191): Homolog of NCBI NO: 23014087 NR Description: hypothetical protein [Magnetospirillum
  misc_feature (1)..(190): Homolog of NCBI NO: 13470552 NR Description: 50S ribosomal protein L4 [Mesorhizobium loti]
  misc_feature (1)..(190): Homolog of NCBI NO: 15965110 NR Description: PROBABLE 50S RIBOSOMAL PROTEIN L4 [Sinorhizobium >gi|15074290|emb|CAC45936.1| PROBABLE 50S RIBOSOMAL PROTEIN L4
  misc_feature (1)..(190): Homolog of NCBI NO: 15889241 NR Description: AGR_C_3553p [Agrobacterium tumefaciens]

SEQ ID NO: 104872 - DNA, 1655 bp, Arabidopsis thaliana
  misc_feature (1)..(1655): Ceres Seq. ID no. 13615946
  misc_feature: MA Experiment ID: 20000184 Result: Down-regulated in Transcription
  misc_feature: MA Experiment 20000184 PARAMETER Experiment Name: At_Shoots__P Parameter: Age (day) Value: 7
  misc_feature: MA Experiment 20000184 PARAMETER Experiment Name: At_Shoots__P Parameter: Tissue Value: Shoots vs. Whole Plant
  misc_feature: MA Experiment ID: 20001911 Result: Up-regulated in Transcription
  misc_feature: MA Experiment 20001911 PARAMETER Experiment Name: At_Drought_Reproduction_P Parameter: Age (day) Value: 40
  misc_feature: MA Experiment 20001911 PARAMETER Experiment Name: At_Drought_Reproduction_P Parameter: Organism Value: A. thaliana
  misc_feature: MA Experiment 20001911 PARAMETER Experiment Name: At_Drought_Reproduction_P Parameter: Plant Line Value: WS
  misc_feature: MA Experiment 20001911 PARAMETER Experiment Name: At_Drought_Reproduction_P Parameter: Timepoint (day) Value: 10
  misc_feature: MA Experiment 20001911 PARAMETER Experiment Name: At_Drought_Reproduction_P Parameter: Tissue Value: Flowers
  misc_feature: MA Experiment 20001911 PARAMETER Experiment Name: At_Drought_Reproduction_P Parameter: Treatment Value: Drought vs. No Drought
aaggagggaaaagaagagaacaaagcgtgagagagatagagataaatccggttctagaatcccggtttaaccgccataccggtggaagattctgctttactacgctctccgcttcttcttctcctcgattcgattctcctcatgggtttatcatgaatttttaggttttgagtaattcagaaactcgagtgatgatcccgaatgatgatgatgatgcaaattctatgaagaattatccgttaaatgatgatgatgcaaattctatgaagaattatccgttaaatgatgatgatgcaaattctatggagaattatccgttaaggtcaattccgacggagctttcacacacttgttcattgataccaccttctttaccaaacccttcagaagcagcagcagacatgtccttcaattcagaactcaatcaaatcatggcaaggccttgtgatatgctccctgccaatggtggagctgttggtcataacccttttttggaaccaggattcaactgccccgagacaacagattggattccctctccactcccccatatttattttccttcgggttctcccaatctaataatggaggatggtgtcattgatgagattcacaaacaaagtgacttgccactttggtatgacgacttgattaccactgatgaagatccactcatgtctagtatcttgggcgatcttctccttgacactaatttcaactcagcttcaaaggtccagcaaccaagtatgcaatcgcagattcaacaaccccaagctgttctgcagcagccttcttcttgtgtggaattgcgcccacttgataggacagtatcctcaaacagcaacaacaatagcaacagtaataatgcagcagcagcagctaagggacgtatgcgttggacgcctgaacttcatgaggtttttgttgacgctgttaaccagctcggtggcagtaatgaagcaactcctaaaggtgtcctgaagcatatgaaagtcgaaggtttgactatttttcatgtcaaaagtcatttgcagaaatatagaacagctaaatatataccagtaccatcagaaggttcgccggaggcaaggttgacaccgcttgagcaaattacatctgatgatacgaaacgtgggatagatatcactgagactctgcgaattcagatggaacatcagaagaaactgcatgagcagcttgagagtctaagaacaatgcaacttcggatagaagagcaaggaaaggcgctgttgatgatgattgagaagcaaaatatgggtttcggcggaccagaacaaggagagaaaacaagtgcgaaaacgcctgaaaatggttcagaggagtcggaatccccgcggccaaagcgtccgagaaatgaagaatgaaggaaacctttcttcggatggtagatcataaaactgtggttttggtggagttgtagagtatgacttattaggagtagagctttcagtcttcttcaggccttttctcttttttttttctttcttaaaactctaattttctgattctcagctctctaggaagaaacaaataaagagcaattccatctttgtgatgtaattctgagtgcagagattttagatttagtgtttaggtggattttaaactagcttttatttcgagtttcttcctgt

SEQ ID NO: 104873 - protein, 397 aa, Arabidopsis thaliana
  peptide (1)..(397): Ceres Seq. ID no. 13615947
  misc_feature (233)..(284): Pfam Name: Myb-like DNA-binding domain Pfam Description: Myb-like DNA-binding domain
  misc_feature (1)..(397): Homolog of NCBI NO: 30680980 NR Description: myb family transcription factor [Arabidopsis >gi|26451666|dbj|BAC42929.1| unknown protein [Arabidopsis >gi|29824287|gb|AAP04104.1| unknown protein [Arabidopsis
  misc_feature (1)..(306): Homolog of NCBI NO: 25411978 NR Description: hypothetical protein At2g20400 [imported] - thaliana >gi|4512695|gb|AAD21748.1| unknown protein [Arabidopsis
  misc_feature (336)..(397): Homolog of NCBI NO: 25411978 NR Description: hypothetical protein At2g20400 [imported] - thaliana >gi|4512695|gb|AAD21748.1| unknown protein [Arabidopsis
  misc_feature (108)..(397): Homolog of NCBI NO: 22329004 NR Description: expressed protein [Arabidopsis thaliana] phosphate starvation response regulator 1 [Arabidopsis thaliana] putative protein [Arabidopsis thaliana]
  misc_feature (108)..(397): Homolog of NCBI NO: 7487685 NR Description: hypothetical protein T5F17.60 - Arabidopsis >gi|7269716|emb|CAB81449.1| putative protein [Arabidopsis
  misc_feature (168)..(392): Homolog of NCBI NO: 6942190 NR Description: CDPK substrate protein 1; CSP1 [Mesembryanthemum
  misc_feature (157)..(385): Homolog of NCBI NO: 4519671 NR Description: transfactor [Nicotiana tabacum]
  misc_feature (139)..(382): Homolog of NCBI NO: 21537366 NR Description: transfactor, putative [Arabidopsis thaliana]
  misc_feature (139)..(382): Homolog of NCBI NO: 30692105 NR Description: expressed protein [Arabidopsis thaliana]
  misc_feature (139)..(382): Homolog of NCBI NO: 30692110 NR Description: expressed protein [Arabidopsis thaliana]
MIPNDDDDANSMKNYPLNDDDANSMKNYPLNDDDANSMENYPLRSIPTELSHTCSLIPPSLPNPSEAAADMSFNSELNQIMARPCDMLPANGGAVGHNPFLEPGFNCPETTDWIPSPLPHIYFPSGSPNLIMEDGVIDEIHKQSDLPLWYDDLITTDEDPLMSSILGDLLLDTNFNSASKVQQPSMQSQIQQPQAVLQQPSSCVELRPLDRTVSSNSNNNSNSNNAAAAAKGRMRWTPELHEVFVDAVNQLGGSNEATPKGVLKHMKVEGLTIFHVKSHLQKYRTAKYIPVPSEGSPEARLTPLEQITSDDTKRGIDITETLRIQMEHQKKLHEQLESLRTMQLRIEEQGKALLMMIEKQNMGFGGPEQGEKTSAKTPENGSEESESPRPKRPRNEE

SEQ ID NO: 104874 - protein, 386 aa, Arabidopsis thaliana
  peptide (1)..(386): Ceres Seq. ID no. 13615948
  misc_feature (222)..(273): Pfam Name: Myb-like DNA-binding domain Pfam Description: Myb-like DNA-binding domain
  misc_feature (1)..(386): Homolog of NCBI NO: 30680980 NR Description: myb family transcription factor [Arabidopsis >gi|26451666|dbj|BAC42929.1| unknown protein [Arabidopsis >gi|29824287|gb|AAP04104.1| unknown protein [Arabidopsis
  misc_feature (1)..(295): Homolog of NCBI NO: 25411978 NR Description: hypothetical protein At2g20400 [imported] - thaliana >gi|4512695|gb|AAD21748.1| unknown protein [Arabidopsis
  misc_feature (325)..(386): Homolog of NCBI NO: 25411978 NR Description: hypothetical protein At2g20400 [imported] - thaliana >gi|4512695|gb|AAD21748.1| unknown protein [Arabidopsis
  misc_feature (97)..(386): Homolog of NCBI NO: 22329004 NR Description: expressed protein [Arabidopsis thaliana] phosphate starvation response regulator 1 [Arabidopsis thaliana] putative protein [Arabidopsis thaliana]
  misc_feature (97)..(386): Homolog of NCBI NO: 7487685 NR Description: hypothetical protein T5F17.60 - Arabidopsis >gi|7269716|emb|CAB81449.1| putative protein [Arabidopsis
  misc_feature (157)..(381): Homolog of NCBI NO: 6942190 NR Description: CDPK substrate protein 1; CSP1 [Mesembryanthemum
  misc_feature (146)..(374): Homolog of NCBI NO: 4519671 NR Description: transfactor [Nicotiana tabacum]
  misc_feature (128)..(371): Homolog of NCBI NO: 21537366 NR Description: transfactor, putative [Arabidopsis thaliana]
  misc_feature (128)..(371): Homolog of NCBI NO: 21954075 NR Description: unknown protein [Arabidopsis thaliana]
  misc_feature (128)..(371): Homolog of NCBI NO: 30692105 NR Description: expressed protein [Arabidopsis thaliana]
MKNYPLNDDDANSMKNYPLNDDDANSMENYPLRSIPTELSHTCSLIPPSLPNPSEAAADMSFNSELNQIMARPCDMLPANGGAVGHNPFLEPGFNCPETTDWIPSPLPHIYFPSGSPNLIMEDGVIDEIHKQSDLPLWYDDLITTDEDPLMSSILGDLLLDTNFNSASKVQQPSMQSQIQQPQAVLQQPSSCVELRPLDRTVSSNSNNNSNSNNAAAAAKGRMRWTPELHEVFVDAVNQLGGSNEATPKGVLKHMKVEGLTIFHVKSHLQKYRTAKYIPVPSEGSPEARLTPLEQITSDDTKRGIDITETLRIQMEHQKKLHEQLESLRTMQLRIEEQGKALLMMIEKQNMGFGGPEQGEKTSAKTPENGSEESESPRPKRPRNEE

SEQ ID NO: 104875 - protein, 373 aa, Arabidopsis thaliana
  peptide (1)..(373): Ceres Seq. ID no. 13615949
  misc_feature (209)..(260): Pfam Name: Myb-like DNA-binding domain Pfam Description: Myb-like DNA-binding domain
  misc_feature (1)..(373): Homolog of NCBI NO: 30680980 NR Description: myb family transcription factor [Arabidopsis >gi|26451666|dbj|BAC42929.1| unknown protein [Arabidopsis >gi|29824287|gb|AAP04104.1| unknown protein [Arabidopsis
  misc_feature (1)..(282): Homolog of NCBI NO: 25411978 NR Description: hypothetical protein At2g20400 [imported] - thaliana >gi|4512695|gb|AAD21748.1| unknown protein [Arabidopsis
  misc_feature (312)..(373): Homolog of NCBI NO: 25411978 NR Description: hypothetical protein At2g20400 [imported] - thaliana >gi|4512695|gb|AAD21748.1| unknown protein [Arabidopsis
  misc_feature (84)..(373): Homolog of NCBI NO: 22329004 NR Description: expressed protein [Arabidopsis thaliana] phosphate starvation response regulator 1 [Arabidopsis thaliana] putative protein [Arabidopsis thaliana]
  misc_feature (84)..(373): Homolog of NCBI NO: 7487685 NR Description: hypothetical protein T5F17.60 - Arabidopsis >gi|7269716|emb|CAB81449.1| putative protein [Arabidopsis
  misc_feature (144)..(368): Homolog of NCBI NO: 6942190 NR Description: CDPK substrate protein 1; CSP1 [Mesembryanthemum
  misc_feature (133)..(361): Homolog of NCBI NO: 4519671 NR Description: transfactor [Nicotiana tabacum]
  misc_feature (115)..(358): Homolog of NCBI NO: 21537366 NR Description: transfactor, putative [Arabidopsis thaliana]
  misc_feature (115)..(358): Homolog of NCBI NO: 30692110 NR Description: expressed protein [Arabidopsis thaliana]
  misc_feature (115)..(358): Homolog of NCBI NO: 30692105 NR Description: expressed protein [Arabidopsis thaliana]
MKNYPLNDDDANSMENYPLRSIPTELSHTCSLIPPSLPNPSEAAADMSFNSELNQIMARPCDMLPANGGAVGHNPFLEPGFNCPETTDWIPSPLPHIYFPSGSPNLIMEDGVIDEIHKQSDLPLWYDDLITTDEDPLMSSILGDLLLDTNFNSASKVQQPSMQSQIQQPQAVLQQPSSCVELRPLDRTVSSNSNNNSNSNNAAAAAKGRMRWTPELHEVFVDAVNQLGGSNEATPKGVLKHMKVEGLTIFHVKSHLQKYRTAKYIPVPSEGSPEARLTPLEQITSDDTKRGIDITETLRIQMEHQKKLHEQLESLRTMQLRIEEQGKALLMMIEKQNMGFGGPEQGEKTSAKTPENGSEESESPRPKRPRNEE

SEQ ID NO: 104876 - DNA, 1281 bp, Arabidopsis thaliana
  misc_feature (1)..(1281): Ceres Seq. ID no. 13615969
  misc_feature: MA Experiment ID: 108434 Result: Down-regulated in Transcription
  misc_feature: MA Experiment 108434 PARAMETER Experiment Name: At_Root_Tips_cDNA_P Parameter: Tissue Value: Root Tips
  misc_feature: MA Experiment ID: 108461 Result: Up-regulated in Transcription
  misc_feature: MA Experiment 108461 PARAMETER Experiment Name: At_Germinating_Seeds_cDNA_P Parameter: Age (day) Value: 1 vs. 0
  misc_feature: MA Experiment 108461 PARAMETER Experiment Name: At_Germinating_Seeds_cDNA_P Parameter: Tissue Value: Germinating Seeds
  misc_feature: MA Experiment ID: 108462 Result: Up-regulated in Transcription
  misc_feature: MA Experiment 108462 PARAMETER Experiment Name: At_Germinating_Seeds_cDNA_P Parameter: Age (day) Value: 2 vs. 0
  misc_feature: MA Experiment 108462 PARAMETER Experiment Name: At_Germinating_Seeds_cDNA_P Parameter: Tissue Value: Germinating Seeds
  misc_feature: MA Experiment ID: 108463 Result: Up-regulated in Transcription
  misc_feature: MA Experiment 108463 PARAMETER Experiment Name: At_Germinating_Seeds_cDNA_P Parameter: Age (day) Value: 3 vs. 0
  misc_feature: MA Experiment 108463 PARAMETER Experiment Name: At_Germinating_Seeds_cDNA_P Parameter: Tissue Value: Germinating Seeds
  misc_feature: MA Experiment ID: 108464 Result: Up-regulated in Transcription
  misc_feature: MA Experiment 108464 PARAMETER Experiment Name: At_Germinating_Seeds_cDNA_P Parameter: Age (day) Value: 4 vs. 0
  misc_feature: MA Experiment 108464 PARAMETER Experiment Name: At_Germinating_Seeds_cDNA_P Parameter: Tissue Value: Germinating Seeds
  misc_feature: MA Experiment ID: 108488 Result: Down-regulated in Transcription
  misc_feature: MA Experiment ID: 108577 Result: Down-regulated in Transcription
  misc_feature: MA Experiment 108577 PARAMETER Experiment Name: At_42deg_Heat_cDNA_P Parameter: Temperature (deg C) Value: 42 vs. 22
  misc_feature: MA Experiment 108577 PARAMETER Experiment Name: At_42deg_Heat_cDNA_P Parameter: Timepoint (hr) Value: 6
  misc_feature: MA Experiment 108577 PARAMETER Experiment Name: At_42deg_Heat_cDNA_P Parameter: Tissue Value: Aerial
  misc_feature: MA Experiment ID: 108585 Result: Up-regulated in Transcription
  misc_feature: MA Experiment 108585 PARAMETER Experiment Name: At_5mM_NaNP_cDNA_P Parameter: Timepoint (hr) Value: 6
  misc_feature: MA Experiment 108585 PARAMETER Experiment Name: At_5mM_NaNP_cDNA_P Parameter: Tissue Value: Aerial
  misc_feature: MA Experiment 108585 PARAMETER Experiment Name: At_5mM_NaNP_cDNA_P Parameter: Treatment Value: null
  misc_feature: MA Experiment ID: 108595 Result: Down-regulated in Transcription
  misc_feature: MA Experiment 108595 PARAMETER Experiment Name: At_Ler-pi_Ovule_cDNA_P Parameter: Plant Line Value: null
  misc_feature: MA Experiment ID: 20000113 Result: Down-regulated in Transcription
  misc_feature: MA Experiment 20000113 PARAMETER Experiment Name: At_42deg_Heat_cDNA_P Parameter: Temperature (deg C) Value: 42 vs. 22
  misc_feature: MA Experiment 20000113 PARAMETER Experiment Name: At_42deg_Heat_cDNA_P Parameter: Timepoint (hr) Value: 8
  misc_feature: MA Experiment 20000113 PARAMETER Experiment Name: At_42deg_Heat_cDNA_P Parameter: Tissue Value: Aerial
  misc_feature: MA Experiment ID: 20000173 Result: Down-regulated in Transcription
  misc_feature: MA Experiment 20000173 PARAMETER Experiment Name: At_42deg_Heat_P Parameter: Age (day) Value: 14
  misc_feature: MA Experiment 20000173 PARAMETER Experiment Name: At_42deg_Heat_P Parameter: Organism Value: A. thaliana
  misc_feature: MA Experiment 20000173 PARAMETER Experiment Name: At_42deg_Heat_P Parameter: Plant Line Value: WS
  misc_feature: MA Experiment 20000173 PARAMETER Experiment Name: At_42deg_Heat_P Parameter: Temperature (deg C) Value: 42 vs. 22
  misc_feature: MA Experiment 20000173 PARAMETER Experiment Name: At_42deg_Heat_P Parameter: Timepoint (hr) Value: 6
  misc_feature: MA Experiment 20000173 PARAMETER Experiment Name: At_42deg_Heat_P Parameter: Tissue Value: Aerial
  misc_feature: MA Experiment ID: 20000180 Result: Up-regulated in Transcription
  misc_feature: MA Experiment 20000180 PARAMETER Experiment Name: At_Germinating_Seeds_P Parameter: Age (hr) Value: 24 vs. 0
  misc_feature: MA Experiment 20000180 PARAMETER Experiment Name: At_Germinating_Seeds_P Parameter: Tissue Value: Germinating Seeds
  misc_feature: MA Experiment ID: 20000184 Result: Down-regulated in Transcription
  misc_feature: MA Experiment 20000184 PARAMETER Experiment Name: At_Shoots__P Parameter: Age (day) Value: 7
  misc_feature: MA Experiment 20000184 PARAMETER Experiment Name: At_Shoots__P Parameter: Tissue Value: Shoots vs. Whole Plant
  misc_feature: MA Experiment ID: 20000185 Result: Up-regulated in Transcription
  misc_feature: MA Experiment 20000185 PARAMETER Experiment Name: At_Roots__P Parameter: Age (day) Value: 7 vs. 21
  misc_feature: MA Experiment 20000185 PARAMETER Experiment Name: At_Roots__P Parameter: Organism Value: A. thaliana
  misc_feature: MA Experiment 20000185 PARAMETER Experiment Name: At_Roots__P Parameter: Tissue Value: Roots vs. Whole Plant
  misc_feature: MA Experiment ID: 20000224 Result: Up-regulated in Transcription
  misc_feature: MA Experiment ID: 20001450 Result: Down-regulated in Transcription
  misc_feature: MA Experiment 20001450 PARAMETER Experiment Name: At_Far-red-induction_P Parameter: Age (day) Value: 7
  misc_feature: MA Experiment 20001450 PARAMETER Experiment Name: At_Far-red-induction_P Parameter: Light Value: Far-red vs. White
  misc_feature: MA Experiment 20001450 PARAMETER Experiment Name: At_Far-red-induction_P Parameter: Organism Value: A. thaliana
  misc_feature: MA Experiment 20001450 PARAMETER Experiment Name: At_Far-red-induction_P Parameter: Plant Line Value: Columbia
  misc_feature: MA Experiment 20001450 PARAMETER Experiment Name: At_Far-red-induction_P Parameter: Timepoint (hr) Value: 8
  misc_feature: MA Experiment 20001450 PARAMETER Experiment Name: At_Far-red-induction_P Parameter: Tissue Value: Whole Plant
  misc_feature: MA Experiment ID: 20001906 Result: Down-regulated in Transcription
  misc_feature: MA Experiment 20001906 PARAMETER Experiment Name: At_Drought_Reproduction_P Parameter: Age (day) Value: 35
  misc_feature: MA Experiment 20001906 PARAMETER Experiment Name: At_Drought_Reproduction_P Parameter: Organism Value: A. thaliana
  misc_feature: MA Experiment 20001906 PARAMETER Experiment Name: At_Drought_Reproduction_P Parameter: Plant Line Value: WS
  misc_feature: MA Experiment 20001906 PARAMETER Experiment Name: At_Drought_Reproduction_P Parameter: Timepoint (day) Value: 5
  misc_feature: MA Experiment 20001906 PARAMETER Experiment Name: At_Drought_Reproduction_P Parameter: Tissue Value: Siliques
  misc_feature: MA Experiment 20001906 PARAMETER Experiment Name: At_Drought_Reproduction_P Parameter: Treatment Value: Drought vs. No Drought
gtgaaagaatgtagcaaataataatagagagaatttgtttagggaatacttttgccttgagaaaaatataaagaagaaaagtcgtcggcggaggaagtcagtagccaataatgataagaatcaccggctgttcacatgtggattgattacctcacattcatatttattacataaactcatctctctgtttttctttcttagaatcattcatatttcagacacaaaggcagagaaacaaattcttgtaacaatggcaggcagagagattctccataagatgaaggttggattatgcggatctgacacaggcagaggtaaaaccaaggtgtggaagaacatcgcacacggttatgactttgtgaaaggcaaagcgggccatccgatggaggactatgttgtgtctgagttcaagaaagtagacggccatgatttgggtttgtttgctatctttgatggtcacttagggcatgatgtagccaagtacttgcaaaccaatctctttgataacatactcaaagagaaggatttttggactgatacgaaaaacgctataaggaatgcatacatatcaaccgatgctgtgatattagagcagtcacttaaacttggcaaaggtggatcaacggctgtaacaggcattctgatagatgggaaaacgctagtgattgctaacgttggagactcacgtgcagtgatgtcaaagaacggtgttgcttctcaactctctgttgatcatgaaccaagcaaggaacaaaaggaaatagaaagccgtggtggctttgtatcaaatattccaggggatgttccaagagttgatggacaactagcggttgctagggcgtttggagataagagcttaaagatacatctgagctcagatccagacataagagacgagaatatcgatcatgagactgagtttatccttttcgcaagtgatggagtttggaaggtgatgtcgaaccaagaagcggtggatttgatcaaaagcataaaagatccacaagcggcagccaaggagttgatagaagaagcagtctctaagcaaagcacagacgacatttcttgtatagttgtaaggttccagtgatagataaacttttgttgtctataaactttaccattccggtgtgtgtgagagggagaaacaaaagacgtataaaacgcctaagctgtgtgatcaaagtcatgtcttgcttaaacaattccattgacaataaatgttctggccacaatgtaaaatccatggttgttgatccaatactctaaatggtttctttt

SEQ ID NO: 104877 - protein, 279 aa, Arabidopsis thaliana; identical to SEQ ID NO: 35269
  peptide (1)..(279): Ceres Seq. ID no. 13615970
  misc_feature (32)..(271): Pfam Name: Protein phosphatase 2C Pfam Description: Protein phosphatase 2C
  misc_feature (1)..(279): Homolog of NCBI NO: 18399423 NR Description: protein phosphatase 2C (PP2C), putative thaliana] >gi|15724170|gb|AAL06477.1|AF411787_1 [Arabidopsis thaliana] >gi|18652945|dbj|BAB84701.1| protein
  misc_feature (1)..(279): Homolog of NCBI NO: 25411985 NR Description: probable protein phosphatase 2C [imported] -
  misc_feature (1)..(278): Homolog of NCBI NO: 18417190 NR Description: protein phosphatase 2C (PP2C), putative thaliana] >gi|16604585|gb|AAL24149.1| putative protein
  misc_feature (26)..(278): Homolog of NCBI NO: 7488280 NR Description: protein phosphatase 2C homolog F20O9.80 -
  misc_feature (1)..(279): Homolog of NCBI NO: 4336436 NR Description: protein phosphatase type 2C [Lotus japonicus]
  misc_feature (1)..(279): Homolog of NCBI NO: 15232538 NR Description: protein phosphatase 2C (PP2C), putative thaliana] >gi|9294253|dbj|BAB02155.1| protein phosphatase type 2C thaliana] >gi|26450048|dbj|BAC42144.1| putative protein
  misc_feature (1)..(279): Homolog of NCBI NO: 21539551 NR Description: putative protein phosphatase type 2C [Arabidopsis
  misc_feature (1)..(278): Homolog of NCBI NO: 23307574 NR Description: putative protein phosphatase 2C homolog [Oryza
  misc_feature (5)..(279): Homolog of NCBI NO: 32488822 NR Description: OSJNBa0085I10.2 [Oryza sativa (japonica
  misc_feature (13)..(279): Homolog of NCBI NO: 18395099 NR Description: protein phosphatase 2C (PP2C), putative

SEQ ID NO: 104878 - protein, 270 aa, Arabidopsis thaliana; identical to SEQ ID NO: 35270
  peptide (1)..(270): Ceres Seq. ID no. 13615971
  misc_feature (23)..(262): Pfam Name: Protein phosphatase 2C Pfam Description: Protein phosphatase 2C
  misc_feature (1)..(270): Homolog of NCBI NO: 18399423 NR Description: protein phosphatase 2C (PP2C), putative thaliana] >gi|15724170|gb|AAL06477.1|AF411787_1 [Arabidopsis thaliana] >gi|18652945|dbj|BAB84701.1| protein
  misc_feature (1)..(270): Homolog of NCBI NO: 25411985 NR Description: probable protein phosphatase 2C [imported] -
  misc_feature (1)..(269): Homolog of NCBI NO: 18417190 NR Description: protein phosphatase 2C (PP2C), putative thaliana] >gi|16604585|gb|AAL24149.1| putative protein
  misc_feature (17)..(269): Homolog of NCBI NO: 7488280 NR Description: protein phosphatase 2C homolog F20O9.80 -
  misc_feature (1)..(270): Homolog of NCBI NO: 4336436 NR Description: protein phosphatase type 2C [Lotus japonicus]
  misc_feature (1)..(270): Homolog of NCBI NO: 15232538 NR Description: protein phosphatase 2C (PP2C), putative thaliana] >gi|9294253|dbj|BAB02155.1| protein phosphatase type 2C thaliana] >gi|26450048|dbj|BAC42144.1| putative protein
  misc_feature (1)..(270): Homolog of NCBI NO: 21539551 NR Description: putative protein phosphatase type 2C [Arabidopsis
  misc_feature (1)..(269): Homolog of NCBI NO: 23307574 NR Description: putative protein phosphatase 2C homolog [Oryza
  misc_feature (1)..(270): Homolog of NCBI NO: 32488822 NR Description: OSJNBa0085I10.2 [Oryza sativa (japonica
  misc_feature (4)..(270): Homolog of NCBI NO: 18395099 NR Description: protein phosphatase 2C (PP2C), putative

SEQ ID NO: 104879 - protein, 235 aa, Arabidopsis thaliana; identical to SEQ ID NO: 35271
  peptide (1)..(235): Ceres Seq. ID no. 13615972
  misc_feature (1)..(227): Pfam Name: Protein phosphatase 2C Pfam Description: Protein phosphatase 2C
  misc_feature (1)..(235): Homolog of NCBI NO: 18399423 NR Description: protein phosphatase 2C (PP2C), putative thaliana] >gi|15724170|gb|AAL06477.1|AF411787_1 [Arabidopsis thaliana] >gi|18652945|dbj|BAB84701.1| protein
  misc_feature (1)..(235): Homolog of NCBI NO: 25411985 NR Description: probable protein phosphatase 2C [imported] -
  misc_feature (1)..(234): Homolog of NCBI NO: 18417190 NR Description: protein phosphatase 2C (PP2C), putative thaliana] >gi|16604585|gb|AAL24149.1| putative protein
  misc_feature (1)..(234): Homolog of NCBI NO: 7488280 NR Description: protein phosphatase 2C homolog F20O9.80 -
  misc_feature (1)..(235): Homolog of NCBI NO: 4336436 NR Description: protein phosphatase type 2C [Lotus japonicus]
  misc_feature (1)..(235): Homolog of NCBI NO: 15232538 NR Description: protein phosphatase 2C (PP2C), putative thaliana] >gi|9294253|dbj|BAB02155.1| protein phosphatase type 2C thaliana] >gi|26450048|dbj|BAC42144.1| putative protein
  misc_feature (1)..(235): Homolog of NCBI NO: 21539551 NR Description: putative protein phosphatase type 2C [Arabidopsis
  misc_feature (1)..(234): Homolog of NCBI NO: 23307574 NR Description: putative protein phosphatase 2C homolog [Oryza
  misc_feature (1)..(235): Homolog of NCBI NO: 32488822 NR Description: OSJNBa0085I10.2 [Oryza sativa (japonica
  misc_feature (1)..(235): Homolog of NCBI NO: 18395099 NR Description: protein phosphatase 2C (PP2C), putative

SEQ ID NO: 104880 - DNA, 1147 bp, Arabidopsis thaliana
  misc_feature (1)..(1147): Ceres Seq. ID no. 13615977
  misc_feature: MA Experiment ID: 108573 Result: Up-regulated in Transcription
  misc_feature: MA Experiment 108573 PARAMETER Experiment Name: At_Drought_cDNA_P Parameter: Timepoint (hr) Value: 6
  misc_feature: MA Experiment 108573 PARAMETER Experiment Name: At_Drought_cDNA_P Parameter: Tissue Value: Aerial
  misc_feature: MA Experiment 108573 PARAMETER Experiment Name: At_Drought_cDNA_P Parameter: Treatment Value: Drought vs. No Drought
  misc_feature: MA Experiment ID: 108577 Result: Down-regulated in Transcription
  misc_feature: MA Experiment 108577 PARAMETER Experiment Name: At_42deg_Heat_cDNA_P Parameter: Temperature (deg C) Value: 42 vs. 22
  misc_feature: MA Experiment 108577 PARAMETER Experiment Name: At_42deg_Heat_cDNA_P Parameter: Timepoint (hr) Value: 6
  misc_feature: MA Experiment 108577 PARAMETER Experiment Name: At_42deg_Heat_cDNA_P Parameter: Tissue Value: Aerial
  misc_feature: MA Experiment ID: 108595 Result: Up-regulated in Transcription
  misc_feature: MA Experiment 108595 PARAMETER Experiment Name: At_Ler-pi_Ovule_cDNA_P Parameter: Plant Line Value: null
  misc_feature: MA Experiment ID: 20000224 Result: Down-regulated in Transcription
atctccaatcgctctctctctctctctctctctctcgctcggtgtgatccgtgtagagagattggatttgctgagtaacggtgcaatgtctcgctaccagtctcattcctttgatgacggagaaattaatccttttgcgaatcctacaagtgtcccagctgcaacgtcaaagctttctcctcttccccctgagccgtacgaccgtggtgccacaatggatattcctcttgactctggaaaggatctgaaagctaaggagaaggaactccgggaaaaggaggctgaattgaagaggcgggagcaggaaatcaagcggaaagaagatgctatagcacaggccggaattgtgatagaagagaaaaactggccaccgttttttcctctcatccatcatgacatttcaaatgagatacccatccatctgcagagaatccaatatgttgctttcacatcaatgctgggtcttgtggtgtgcctgttatggaacattgtcgcagttactactgcgtggattaagggagaaggtccaacaatatggtttctagctattatctatttcatatcaggggttcctggagcgtatgttatgtggtatcgccctctttatcgtgccatgaggactgatagtgctctgaagtttgggtggtttttcttcacgtatctgtttcacatagcgttttgtgtgtttgcggcggtggctcctccaattatcttcaagggaaaatcgctgacaggaatattgccggcgatcgacgtattgagtgggaatatcttggtcgggatattttacttcattgggtttgggttcttctgtctggagtcactcgtcagcatctgggttattcagcaagtgtacatgtacttcagggggagcgggaaagcagcagagatgaagcaggaggccacaagacgagcaatgatggcagctctctgaccaatgaccacatacacacaccttttaacccatctccaattttttcccatttaacatacaaacaaacagtgaacgttagatcctcttgaaggggattgattatactccgctactcacttcatttttgttttcctcccgatttcatttaactaagattccagtgaactcaacttcttacttttttttggtaaaaggtgaagtcaacttcttact

SEQ ID NO: 104881 - protein, 310 aa, Arabidopsis thaliana
  peptide (1)..(310): Ceres Seq. ID no. 13615978
  misc_feature (118)..(292): Pfam Name: SCAMP family Pfam Description: SCAMP family
  misc_feature (29)..(310): Homolog of NCBI NO: 15226410 NR Description: secretory carrier-associated membrane protein [Arabidopsis thaliana] >gi|25411996|pir||A84594 hypothetical
  misc_feature (29)..(310): Homolog of NCBI NO: 18379111 NR Description: expressed protein [Arabidopsis thaliana]
  misc_feature (30)..(310): Homolog of NCBI NO: 15219893 NR Description: secretory carrier membrane protein [Arabidopsis >gi|7109228|gb|AAF36686.1|AF225920_1 secretory carrier membrane
  misc_feature (31)..(310): Homolog of NCBI NO: 15220305 NR Description: secretory carrier membrane protein -related
  misc_feature (31)..(309): Homolog of NCBI NO: 7109232 NR Description: secretory carrier membrane protein [Oryza sativa]
  misc_feature (47)..(309): Homolog of NCBI NO: 34899754 NR Description: putative secretory carrier membrane protein
  misc_feature (31)..(310): Homolog of NCBI NO: 3941289 NR Description: similarity to SCAMP37 [Pisum sativum]
  misc_feature (31)..(310): Homolog of NCBI NO: 25402653 NR Description: hypothetical protein [imported] - Arabidopsis >gi|5734732|gb|AAD49997.1|AC007259_10 Hypothetical protein
  misc_feature (29)..(291): Homolog of NCBI NO: 15222550 NR Description: secretory carrier membrane protein -related thaliana] >gi|25403140|pir||G86444 probable secretory carrier
  misc_feature (175)..(310): Homolog of NCBI NO: 7485909 NR Description: hypothetical protein F21B7.17 - Arabidopsis
SPIALSLSLSLSLGVIRVERLDLLSNGAMSRYQSHSFDDGEINPFANPTSVPAATSKLSPLPPEPYDRGATMDIPLDSGKDLKAKEKELREKEAELKRREQEIKRKEDAIAQAGIVIEEKNWPPFFPLIHHDISNEIPIHLQRIQYVAFTSMLGLVVCLLWNIVAVTTAWIKGEGPTIWFLAIIYFISGVPGAYVMWYRPLYRAMRTDSALKFGWFFFTYLFHIAFCVFAAVAPPIIFKGKSLTGILPAIDVLSGNILVGIFYFIGFGFFCLESLVSIWVIQQVYMYFRGSGKAAEMKQEATRRAMMAAL

SEQ ID NO: 104882 - protein, 282 aa, Arabidopsis thaliana
  peptide (1)..(282): Ceres Seq. ID no. 13615979
  misc_feature (90)..(264): Pfam Name: SCAMP family Pfam Description: SCAMP family
  misc_feature (1)..(282): Homolog of NCBI NO: 15226410 NR Description: secretory carrier-associated membrane protein [Arabidopsis thaliana] >gi|25411996|pir||A84594 hypothetical
  misc_feature (1)..(282): Homolog of NCBI NO: 18379111 NR Description: expressed protein [Arabidopsis thaliana]
  misc_feature (2)..(282): Homolog of NCBI NO: 15219893 NR Description: secretory carrier membrane protein [Arabidopsis >gi|7109228|gb|AAF36686.1|AF225920_1 secretory carrier membrane
  misc_feature (3)..(282): Homolog of NCBI NO: 15220305 NR Description: secretory carrier membrane protein -related
  misc_feature (3)..(281): Homolog of NCBI NO: 7109232 NR Description: secretory carrier membrane protein [Oryza sativa]
  misc_feature (19)..(281): Homolog of NCBI NO: 34899754 NR Description: putative secretory carrier membrane protein
  misc_feature (3)..(282): Homolog of NCBI NO: 3941289 NR Description: similarity to SCAMP37 [Pisum sativum]
  misc_feature (3)..(282): Homolog of NCBI NO: 25402653 NR Description: hypothetical protein [imported] - Arabidopsis >gi|5734732|gb|AAD49997.1|AC007259_10 Hypothetical protein
  misc_feature (1)..(263): Homolog of NCBI NO: 15222550 NR Description: secretory carrier membrane protein -related thaliana] >gi|25403140|pir||G86444 probable secretory carrier
  misc_feature (147)..(282): Homolog of NCBI NO: 7485909 NR Description: hypothetical protein F21B7.17 - Arabidopsis
MSRYQSHSFDDGEINPFANPTSVPAATSKLSPLPPEPYDRGATMDIPLDSGKDLKAKEKELREKEAELKRREQEIKRKEDAIAQAGIVIEEKNWPPFFPLIHHDISNEIPIHLQRIQYVAFTSMLGLVVCLLWNIVAVTTAWIKGEGPTIWFLAIIYFISGVPGAYVMWYRPLYRAMRTDSALKFGWFFFTYLFHIAFCVFAAVAPPIIFKGKSLTGILPAIDVLSGNILVGIFYFIGFGFFCLESLVSIWVIQQVYMYFRGSGKAAEMKQEATRRAMMAAL

SEQ ID NO: 104883 - protein, 239 aa, Arabidopsis thaliana
  peptide (1)..(239): Ceres Seq. ID no. 13615980
  misc_feature (47)..(221): Pfam Name: SCAMP family Pfam Description: SCAMP family
  misc_feature (1)..(239): Homolog of NCBI NO: 15226410 NR Description: secretory carrier-associated membrane protein [Arabidopsis thaliana] >gi|25411996|pir||A84594 hypothetical
  misc_feature (1)..(239): Homolog of NCBI NO: 18379111 NR Description: expressed protein [Arabidopsis thaliana]
  misc_feature (1)..(239): Homolog of NCBI NO: 15219893 NR Description: secretory carrier membrane protein [Arabidopsis >gi|7109228|gb|AAF36686.1|AF225920_1 secretory carrier membrane
  misc_feature (1)..(239): Homolog of NCBI NO: 15220305 NR Description: secretory carrier membrane protein -related
  misc_feature (1)..(238): Homolog of NCBI NO: 7109232 NR Description: secretory carrier membrane protein [Oryza sativa]
  misc_feature (1)..(238): Homolog of NCBI NO: 34899754 NR Description: putative secretory carrier membrane protein
  misc_feature (1)..(239): Homolog of NCBI NO: 3941289 NR Description: similarity to SCAMP37 [Pisum sativum]
  misc_feature (1)..(239): Homolog of NCBI NO: 25402653 NR Description: hypothetical protein [imported] - Arabidopsis >gi|5734732|gb|AAD49997.1|AC007259_10 Hypothetical protein
  misc_feature (1)..(220): Homolog of NCBI NO: 15222550 NR Description: secretory carrier membrane protein -related thaliana] >gi|25403140|pir||G86444 probable secretory carrier
  misc_feature (104)..(239): Homolog of NCBI NO: 7485909 NR Description: hypothetical protein F21B7.17 - Arabidopsis
MDIPLDSGKDLKAKEKELREKEAELKRREQEIKRKEDAIAQAGIVIEEKNWPPFFPLIHHDISNEIPIHLQRIQYVAFTSMLGLVVCLLWNIVAVTTAWIKGEGPTIWFLAIIYFISGVPGAYVMWYRPLYRAMRTDSALKFGWFFFTYLFHIAFCVFAAVAPPIIFKGKSLTGILPAIDVLSGNILVGIFYFIGFGFFCLESLVSIWVIQQVYMYFRGSGKAAEMKQEATRRAMMAAL

SEQ ID NO: 104884 - DNA, 1620 bp, Arabidopsis thaliana
  misc_feature (1)..(1620): Ceres Seq. ID no. 13615983
  misc_feature: MA Experiment ID: 108434 Result: Down-regulated in Transcription
  misc_feature: MA Experiment 108434 PARAMETER Experiment Name: At_Root_Tips_cDNA_P Parameter: Tissue Value: Root Tips
  misc_feature: MA Experiment ID: 108462 Result: Up-regulated in Transcription
  misc_feature: MA Experiment 108462 PARAMETER Experiment Name: At_Germinating_Seeds_cDNA_P Parameter: Age (day) Value: 2 vs. 0
  misc_feature: MA Experiment 108462 PARAMETER Experiment Name: At_Germinating_Seeds_cDNA_P Parameter: Tissue Value: Germinating Seeds
  misc_feature: MA Experiment ID: 108463 Result: Up-regulated in Transcription
  misc_feature: MA Experiment 108463 PARAMETER Experiment Name: At_Germinating_Seeds_cDNA_P Parameter: Age (day) Value: 3 vs. 0
  misc_feature: MA Experiment 108463 PARAMETER Experiment Name: At_Germinating_Seeds_cDNA_P Parameter: Tissue Value: Germinating Seeds
  misc_feature: MA Experiment ID: 108464 Result: Up-regulated in Transcription
  misc_feature: MA Experiment 108464 PARAMETER Experiment Name: At_Germinating_Seeds_cDNA_P Parameter: Age (day) Value: 4 vs. 0
  misc_feature: MA Experiment 108464 PARAMETER Experiment Name: At_Germinating_Seeds_cDNA_P Parameter: Tissue Value: Germinating Seeds
  misc_feature: MA Experiment ID: 108469 Result: Up-regulated in Transcription
  misc_feature: MA Experiment ID: 108488 Result: Down-regulated in Transcription
  misc_feature: MA Experiment ID: 108561 Result: Up-regulated in Transcription
  misc_feature: MA Experiment 108561 PARAMETER Experiment Name: At_100uM_ABA_cDNA_P Parameter: Timepoint (hr) Value: 6
  misc_feature: MA Experiment 108561 PARAMETER Experiment Name: At_100uM_ABA_cDNA_P Parameter: Tissue Value: Aerial
  misc_feature: MA Experiment 108561 PARAMETER Experiment Name: At_100uM_ABA_cDNA_P Parameter: Treatment Value: 100uM ABA vs. No Treatment
  misc_feature: MA Experiment ID: 108585 Result: Up-regulated in Transcription
  misc_feature: MA Experiment 108585 PARAMETER Experiment Name: At_5mM_NaNP_cDNA_P Parameter: Timepoint (hr) Value: 6
  misc_feature: MA Experiment 108585 PARAMETER Experiment Name: At_5mM_NaNP_cDNA_P Parameter: Tissue Value: Aerial
  misc_feature: MA Experiment 108585 PARAMETER Experiment Name: At_5mM_NaNP_cDNA_P Parameter: Treatment Value: null
  misc_feature: MA Experiment ID: 108594 Result: Down-regulated in Transcription
  misc_feature: MA Experiment 108594 PARAMETER Experiment Name: At_Ler-rhl_Root_cDNA_P Parameter: Plant Line Value: null
  misc_feature: MA Experiment ID: 108605 Result: Up-regulated in Transcription
  misc_feature: MA Experiment 108605 PARAMETER Experiment Name: At_100uM_ABA_cDNA_P Parameter: Timepoint (hr) Value: 6
  misc_feature: MA Experiment 108605 PARAMETER Experiment Name: At_100uM_ABA_cDNA_P Parameter: Tissue Value: Aerial
  misc_feature: MA Experiment 108605 PARAMETER Experiment Name: At_100uM_ABA_cDNA_P Parameter: Treatment Value: 100uM ABA vs. No Treatment
  misc_feature: MA Experiment ID: 108607 Result: Up-regulated in Transcription
  misc_feature: MA Experiment 108607 PARAMETER Experiment Name: At_100uM_ABA_cDNA_P Parameter: Timepoint (hr) Value: 4
  misc_feature: MA Experiment 108607 PARAMETER Experiment Name: At_100uM_ABA_cDNA_P Parameter: Tissue Value: Aerial
  misc_feature: MA Experiment 108607 PARAMETER Experiment Name: At_100uM_ABA_cDNA_P Parameter: Treatment Value: 100uM ABA vs. No Treatment
  misc_feature: MA Experiment ID: 108609 Result: Up-regulated in Transcription
  misc_feature: MA Experiment 108609 PARAMETER Experiment Name: At_100uM_ABA_cDNA_P Parameter: Timepoint (hr) Value: 24
  misc_feature: MA Experiment 108609 PARAMETER Experiment Name: At_100uM_ABA_cDNA_P Parameter: Tissue Value: Aerial
  misc_feature: MA Experiment 108609 PARAMETER Experiment Name: At_100uM_ABA_cDNA_P Parameter: Treatment Value: 100uM ABA vs. No Treatment
  misc_feature: MA Experiment ID: 108667 Result: Up-regulated in Transcription
  misc_feature: MA Experiment 108667 PARAMETER Experiment Name: At_2mM_SA_cDNA_P Parameter: Plant Line Value: WS
  misc_feature: MA Experiment 108667 PARAMETER Experiment Name: At_2mM_SA_cDNA_P Parameter: Timepoint (hr) Value: 1
  misc_feature: MA Experiment 108667 PARAMETER Experiment Name: At_2mM_SA_cDNA_P Parameter: Treatment Value: 2mM SA vs. No Treatment
  misc_feature: MA Experiment ID: 108668 Result: Up-regulated in Transcription
  misc_feature: MA Experiment 108668 PARAMETER Experiment Name: At_2mM_SA_cDNA_P Parameter: Plant Line Value: WS
  misc_feature: MA Experiment 108668 PARAMETER Experiment Name: At_2mM_SA_cDNA_P Parameter: Timepoint (hr) Value: 6
  misc_feature: MA Experiment 108668 PARAMETER Experiment Name: At_2mM_SA_cDNA_P Parameter: Treatment Value: 2mM SA vs. No Treatment
  misc_feature: MA Experiment ID: 20000070 Result: Up-regulated in Transcription
  misc_feature: MA Experiment 20000070 PARAMETER Experiment Name: At_100uM_ABA_Mutants_cDNA_P Parameter: Plant Line Value: CS24
  misc_feature: MA Experiment 20000070 PARAMETER Experiment Name: At_100uM_ABA_Mutants_cDNA_P Parameter: Timepoint (hr) Value: 6
  misc_feature: MA Experiment 20000070 PARAMETER Experiment Name: At_100uM_ABA_Mutants_cDNA_P Parameter: Tissue Value: Aerial
  misc_feature: MA Experiment 20000070 PARAMETER Experiment Name: At_100uM_ABA_Mutants_cDNA_P Parameter: Treatment Value: 100uM ABA vs. No Treatment
  misc_feature: MA Experiment ID: 20000071 Result: Up-regulated in Transcription
  misc_feature: MA Experiment 20000071 PARAMETER Experiment Name: At_100uM_ABA_Mutants_cDNA_P Parameter: Plant Line Value: CS8104
  misc_feature: MA Experiment 20000071 PARAMETER Experiment Name: At_100uM_ABA_Mutants_cDNA_P Parameter: Timepoint (hr) Value: 6
  misc_feature: MA Experiment 20000071 PARAMETER Experiment Name: At_100uM_ABA_Mutants_cDNA_P Parameter: Tissue Value: Aerial
  misc_feature: MA Experiment 20000071 PARAMETER Experiment Name: At_100uM_ABA_Mutants_cDNA_P Parameter: Treatment Value: 100uM ABA vs. No Treatment
  misc_feature: MA Experiment ID: 20000072 Result: Up-regulated in Transcription
  misc_feature: MA Experiment 20000072 PARAMETER Experiment Name: At_100uM_ABA_Mutants_cDNA_P Parameter: Plant Line Value: CS8105
  misc_feature: MA Experiment 20000072 PARAMETER Experiment Name: At_100uM_ABA_Mutants_cDNA_P Parameter: Timepoint (hr) Value: 6
  misc_feature: MA Experiment 20000072 PARAMETER Experiment Name: At_100uM_ABA_Mutants_cDNA_P Parameter: Tissue Value: Aerial
  misc_feature: MA Experiment 20000072 PARAMETER Experiment Name: At_100uM_ABA_Mutants_cDNA_P Parameter: Treatment Value: 100uM ABA vs. No Treatment
  misc_feature: MA Experiment ID: 20000087 Result: Up-regulated in Transcription
  misc_feature: MA Experiment 20000087 PARAMETER Experiment Name: At_100uM_ABA_Mutants_cDNA_P Parameter: Plant Line Value: WS
  misc_feature: MA Experiment 20000087 PARAMETER Experiment Name: At_100uM_ABA_Mutants_cDNA_P Parameter: Timepoint (hr) Value: 6
  misc_feature: MA Experiment 20000087 PARAMETER Experiment Name: At_100uM_ABA_Mutants_cDNA_P Parameter: Tissue Value: Aerial
  misc_feature: MA Experiment 20000087 PARAMETER Experiment Name: At_100uM_ABA_Mutants_cDNA_P Parameter: Treatment Value: 100uM ABA vs. No Treatment
  misc_feature: MA Experiment ID: 20000089 Result: Up-regulated in Transcription
  misc_feature: MA Experiment ID: 20000169 Result: Up-regulated in Transcription
  misc_feature: MA Experiment 20000169 PARAMETER Experiment Name: At_100uM_ABA_P Parameter: Age (day) Value: 14
  misc_feature: MA Experiment 20000169 PARAMETER Experiment Name: At_100uM_ABA_P Parameter: Organism Value: A. thaliana
  misc_feature: MA Experiment 20000169 PARAMETER Experiment Name: At_100uM_ABA_P Parameter: Plant Line Value: WS
  misc_feature: MA Experiment 20000169 PARAMETER Experiment Name: At_100uM_ABA_P Parameter: Timepoint (hr) Value: 6
  misc_feature: MA Experiment 20000169 PARAMETER Experiment Name: At_100uM_ABA_P Parameter: Tissue Value: Aerial
  misc_feature: MA Experiment 20000169 PARAMETER Experiment Name: At_100uM_ABA_P Parameter: Treatment Value: 100uM ABA vs. No Treatment
  misc_feature: MA Experiment ID: 20000179 Result: Down-regulated in Transcription
  misc_feature: MA Experiment 20000179 PARAMETER Experiment Name: At_Germinating_Seeds_P Parameter: Age (hr) Value: 6 vs. 0
  misc_feature: MA Experiment 20000179 PARAMETER Experiment Name: At_Germinating_Seeds_P Parameter: Tissue Value: Germinating Seeds
  misc_feature: MA Experiment ID: 20000182 Result: Up-regulated in Transcription
  misc_feature: MA Experiment 20000182 PARAMETER Experiment Name: At_2mM_SA_P Parameter: Age (day) Value: 14
  misc_feature: MA Experiment 20000182 PARAMETER Experiment Name: At_2mM_SA_P Parameter: Organism Value: A. thaliana
  misc_feature: MA Experiment 20000182 PARAMETER Experiment Name: At_2mM_SA_P Parameter: Plant Line Value: WS
  misc_feature: MA Experiment 20000182 PARAMETER Experiment Name: At_2mM_SA_P Parameter: Timepoint (hr) Value: 6
  misc_feature: MA Experiment 20000182 PARAMETER Experiment Name: At_2mM_SA_P Parameter: Tissue Value: Aerial
  misc_feature: MA Experiment 20000182 PARAMETER Experiment Name: At_2mM_SA_P Parameter: Treatment Value: 2mM SA vs. No Treatment
  misc_feature: MA Experiment ID: 20000184 Result: Up-regulated in Transcription
  misc_feature: MA Experiment 20000184 PARAMETER Experiment Name: At_Shoots__P Parameter: Age (day) Value: 7
  misc_feature: MA Experiment 20000184 PARAMETER Experiment Name: At_Shoots__P Parameter: Tissue Value: Shoots vs. Whole Plant
  misc_feature: MA Experiment ID: 20000185 Result: Up-regulated in Transcription
  misc_feature: MA Experiment 20000185 PARAMETER Experiment Name: At_Roots__P Parameter: Age (day) Value: 7 vs. 21
  misc_feature: MA Experiment 20000185 PARAMETER Experiment Name: At_Roots__P Parameter: Organism Value: A. thaliana
  misc_feature: MA Experiment 20000185 PARAMETER Experiment Name: At_Roots__P Parameter: Tissue Value: Roots vs. Whole Plant
  misc_feature: MA Experiment ID: 20000264 Result: Up-regulated in Transcription
  misc_feature: MA Experiment 20000264 PARAMETER Experiment Name: At_Open_Flower_P Parameter: Age (day) Value: 21
  misc_feature: MA Experiment 20000264 PARAMETER Experiment Name: At_Open_Flower_P Parameter: Plant Line Value: WS
  misc_feature: MA Experiment 20000264 PARAMETER Experiment Name: At_Open_Flower_P Parameter: Tissue Value: Open Flower vs. Whole Plant
  misc_feature: MA Experiment ID: 20000286 Result: Up-regulated in Transcription
  misc_feature: MA Experiment 20000286 PARAMETER Experiment Name: At_Open_Flower_P Parameter: Age (day) Value: 21
  misc_feature: MA Experiment 20000286 PARAMETER Experiment Name: At_Open_Flower_P Parameter: Plant Line Value: WS
  misc_feature: MA Experiment 20000286 PARAMETER Experiment Name: At_Open_Flower_P Parameter: Tissue Value: Half Open vs. Whole Plant
  misc_feature: MA Experiment ID: 20000438 Result: Up-regulated in Transcription
  misc_feature: MA Experiment 20000438 PARAMETER Experiment Name: At_Shoots__P Parameter: Age (day) Value: 14
  misc_feature: MA Experiment 20000438 PARAMETER Experiment Name: At_Shoots__P Parameter: Tissue Value: Shoots vs. Whole Plant
  misc_feature: MA Experiment ID: 20000439 Result: Up-regulated in Transcription
  misc_feature: MA Experiment 20000439 PARAMETER Experiment Name: At_Roots__P Parameter: Age (day) Value: 14 vs. 21
  misc_feature: MA Experiment 20000439 PARAMETER Experiment Name: At_Roots__P Parameter: Organism Value: A. thaliana
  misc_feature: MA Experiment 20000439 PARAMETER Experiment Name: At_Roots__P Parameter: Tissue Value: Roots vs. Whole Plant
  misc_feature: MA Experiment ID: 20000445 Result: Up-regulated in Transcription
  misc_feature: MA Experiment 20000445 PARAMETER Experiment Name: At_100uM_NAA__P Parameter: Age (day) Value: 14
  misc_feature: MA Experiment 20000445 PARAMETER Experiment Name: At_100uM_NAA__P Parameter: Organism Value: A. thaliana
  misc_feature: MA Experiment 20000445 PARAMETER Experiment Name: At_100uM_NAA__P Parameter: Plant Line Value: WS
  misc_feature: MA Experiment 20000445 PARAMETER Experiment Name: At_100uM_NAA__P Parameter: Timepoint (hr) Value: 6
  misc_feature: MA Experiment 20000445 PARAMETER Experiment Name: At_100uM_NAA__P Parameter: Tissue Value: Aerial
  misc_feature: MA Experiment 20000445 PARAMETER Experiment Name: At_100uM_NAA__P Parameter: Treatment Value: 100uM NAA vs. No Treatment
  misc_feature: MA Experiment ID: 20000453 Result: Up-regulated in Transcription
  misc_feature: MA Experiment 20000453 PARAMETER Experiment Name: At_100uM_ABA_P Parameter: Age (day) Value: 15
  misc_feature: MA Experiment 20000453 PARAMETER Experiment Name: At_100uM_ABA_P Parameter: Organism Value: A. thaliana
  misc_feature: MA Experiment 20000453 PARAMETER Experiment Name: At_100uM_ABA_P Parameter: Plant Line Value: WS
  misc_feature: MA Experiment 20000453 PARAMETER Experiment Name: At_100uM_ABA_P Parameter: Timepoint (hr) Value: 24
  misc_feature: MA Experiment 20000453 PARAMETER Experiment Name: At_100uM_ABA_P Parameter: Tissue Value: Aerial
  misc_feature: MA Experiment 20000453 PARAMETER Experiment Name: At_100uM_ABA_P Parameter: Treatment Value: 100uM ABA vs. No Treatment
  misc_feature: MA Experiment ID: 20000527 Result: Down-regulated in Transcription
  misc_feature: MA Experiment 20000527 PARAMETER Experiment Name: At_10percent_PEG_P Parameter: Age (day) Value: 20
  misc_feature: MA Experiment 20000527 PARAMETER Experiment Name: At_10percent_PEG_P Parameter: Organism Value: A. thaliana
  misc_feature: MA Experiment 20000527 PARAMETER Experiment Name: At_10percent_PEG_P Parameter: Plant Line Value: WS
  misc_feature: MA Experiment 20000527 PARAMETER Experiment Name: At_10percent_PEG_P Parameter: Timepoint (day) Value: 20
  misc_feature: MA Experiment 20000527 PARAMETER Experiment Name: At_10percent_PEG_P Parameter: Tissue Value: Whole Plant
  misc_feature: MA Experiment 20000527 PARAMETER Experiment Name: At_10percent_PEG_P Parameter: Treatment Value: 10percent PEG vs. No Treatment
  misc_feature: MA Experiment ID: 20000709 Result: Up-regulated in Transcription
  misc_feature: MA Experiment 20000709 PARAMETER Experiment Name: At_15mM_NH4NO3_L-to-H_P Parameter: Age (hr) Value: 14
  misc_feature: MA Experiment 20000709 PARAMETER Experiment Name: At_15mM_NH4NO3_L-to-H_P Parameter: Organism Value: A. thaliana
  misc_feature: MA Experiment 20000709 PARAMETER Experiment Name: At_15mM_NH4NO3_L-to-H_P Parameter: Plant Line Value: WS
  misc_feature: MA Experiment 20000709 PARAMETER Experiment Name: At_15mM_NH4NO3_L-to-H_P Parameter: Timepoint (hr) Value: 4
  misc_feature: MA Experiment 20000709 PARAMETER Experiment Name: At_15mM_NH4NO3_L-to-H_P Parameter: Tissue Value: Aerial
  misc_feature: MA Experiment 20000709 PARAMETER Experiment Name: At_15mM_NH4NO3_L-to-H_P Parameter: Treatment Value: 15mM NH4NO3 vs. 30mM Mannitol
  misc_feature: MA Experiment ID: 20000794 Result: Up-regulated in Transcription
  misc_feature: MA Experiment 20000794 PARAMETER Experiment Name: At_Petals_P Parameter: Age (day) Value: 23-25 days
  misc_feature: MA Experiment 20000794 PARAMETER Experiment Name: At_Petals_P Parameter: Plant Line Value: WS
  misc_feature: MA Experiment 20000794 PARAMETER Experiment Name: At_Petals_P Parameter: Tissue Value: Petals vs. Whole plant
  misc_feature: MA Experiment ID: 20001560 Result: Up-regulated in Transcription
  misc_feature: MA Experiment 20001560 PARAMETER Experiment Name: At_Drought_Soil_Dry_P Parameter: Age (day) Value: 28
  misc_feature: MA Experiment 20001560 PARAMETER Experiment Name: At_Drought_Soil_Dry_P Parameter: Organism Value: A. thaliana
  misc_feature: MA Experiment 20001560 PARAMETER Experiment Name: At_Drought_Soil_Dry_P Parameter: Plant Line Value: WS
  misc_feature: MA Experiment 20001560 PARAMETER Experiment Name: At_Drought_Soil_Dry_P Parameter: Post Timepoint (hr) Value: None
  misc_feature: MA Experiment 20001560 PARAMETER Experiment Name: At_Drought_Soil_Dry_P Parameter: Post-Treatment Value: None
  misc_feature: MA Experiment 20001560 PARAMETER Experiment Name: At_Drought_Soil_Dry_P Parameter: Timepoint (day) Value: 14
  misc_feature: MA Experiment 20001560 PARAMETER Experiment Name: At_Drought_Soil_Dry_P Parameter: Treatment Value: Drought vs. No Drought
  misc_feature: MA Experiment ID: 20001904 Result: Up-regulated in Transcription
  misc_feature: MA Experiment 20001904 PARAMETER Experiment Name: At_Drought_Reproduction_P Parameter: Age (day) Value: 37
  misc_feature: MA Experiment 20001904 PARAMETER Experiment Name: At_Drought_Reproduction_P Parameter: Organism Value: A. thaliana
  misc_feature: MA Experiment 20001904 PARAMETER Experiment Name: At_Drought_Reproduction_P Parameter: Plant Line Value: WS
  misc_feature: MA Experiment 20001904 PARAMETER Experiment Name: At_Drought_Reproduction_P Parameter: Timepoint (day) Value: 7
  misc_feature: MA Experiment 20001904 PARAMETER Experiment Name: At_Drought_Reproduction_P Parameter: Tissue Value: Rosettes
  misc_feature: MA Experiment 20001904 PARAMETER Experiment Name: At_Drought_Reproduction_P Parameter: Treatment Value: Drought vs. No Drought
  misc_feature: MA Experiment ID: 20001905 Result: Up-regulated in Transcription
  misc_feature: MA Experiment 20001905 PARAMETER Experiment Name: At_Drought_Reproduction_P Parameter: Age (day) Value: 40
  misc_feature: MA Experiment 20001905 PARAMETER Experiment Name: At_Drought_Reproduction_P Parameter: Organism Value: A. thaliana
  misc_feature: MA Experiment 20001905 PARAMETER Experiment Name: At_Drought_Reproduction_P Parameter: Plant Line Value: WS
  misc_feature: MA Experiment 20001905 PARAMETER Experiment Name: At_Drought_Reproduction_P Parameter: Timepoint (day) Value: 10
  misc_feature: MA Experiment 20001905 PARAMETER Experiment Name: At_Drought_Reproduction_P Parameter: Tissue Value: Rosettes
  misc_feature: MA Experiment 20001905 PARAMETER Experiment Name: At_Drought_Reproduction_P Parameter: Treatment Value: Drought vs. No Drought
  misc_feature: MA Experiment ID: 20001906 Result: Up-regulated in Transcription
  misc_feature: MA Experiment 20001906 PARAMETER Experiment Name: At_Drought_Reproduction_P Parameter: Age (day) Value: 35
  misc_feature: MA Experiment 20001906 PARAMETER Experiment Name: At_Drought_Reproduction_P Parameter: Organism Value: A. thaliana
  misc_feature: MA Experiment 20001906 PARAMETER Experiment Name: At_Drought_Reproduction_P Parameter: Plant Line Value: WS
  misc_feature: MA Experiment 20001906 PARAMETER Experiment Name: At_Drought_Reproduction_P Parameter: Timepoint (day) Value: 5
  misc_feature: MA Experiment 20001906 PARAMETER Experiment Name: At_Drought_Reproduction_P Parameter: Tissue Value: Siliques
  misc_feature: MA Experiment 20001906 PARAMETER Experiment Name: At_Drought_Reproduction_P Parameter: Treatment Value: Drought vs. No Drought
acaacgtgaaaacacaggttcgtgctactactccaatgatacgggtctcaaaatactcaaaactctggcatgtctcaattccacaaattattgtttaatcattctgcttcttctataactgcagaagaaagaagaaagaagaagaagaagagattagagcttgagccataatatataatcccttgatcattagtctaaagaaccacataaaaagatgggattctggtcgttgttggaggtggcttctatgccggttattcaagttcttttcatgagtcttgtgggagctttcatggcctctgatcgttgcaagctcttccctgttgaagcccgtaattccatgaacaaggtggtgtttgtactatttgcaccggctctcatgtttgccaatctagctcagacggttacacttgaagacatcatctcatggtggtttatgccggtgaacatgggacttacatttctaatcggaggacttcttgggtggttggttgttaagattttgaaaccacctccttatcttgaaggtcttattgttgcaacttgttctgcaggaaatatggggaacctaccaatcatacttgtcccagcaatctgcgatgaggacaaaagtccttttggtaaccgaagtgtatgtagaaccgtcgggctctcttacgcgtctttctccatggcgctagggggtttctacatatggacatacacattccggctgattaaagggtccgcaatgaaagttcaagccatagaagaatctgagaaaatagcaattaaatcatccaatagtgacttagaagctgatcataagacccatctcctcggtgcaccggaagacaaggaaaacaaagtggtaaaggaaaagacagggttttggagaaaaggagtagacttcctccatgagatattggaggagcttcttgcaccacctacacttggtgcaattatcggtttcattttcggtgcagtaagatggctcagaaatcttatcataggtgatgatgctcctttacgaatagtacaaagcactgcaaaacttcttggagatgggaccattccctgtatgactattatactagggggaaacctcatacaaggtttacgttcttcggcagtcaaaccgatggttgtacttggaatagtctgtgttcggtacatagctatgccaattatcggtataggcattgtactaacagctgcaaatctcggatttcttccagctgatcctttgtttcagtatgttttgatgcttcagttcaccctcccgcctgccatgaatatcggtaccatgacacagctgtacaatgttgctcaagacgaatgctcagtgctcatgctttggacctacttggtcgcgatactggccctcactgtatggtccaccatcttccttcacttgttagtctaaagaacctgcaactctgtatgagcacaagaagattctatctctctactactacagagaccgaagctctgtcaagggatcttaccattctttttgtctatcacataaaatttgatcataacttgatagatttttctggttgcatgcgtacctttctgcaaatcttcatttttctccatatcccgatttgtaaacgccaatattgtatcaagtattac

SEQ ID NO: 104885 - protein, 396 aa, Arabidopsis thaliana
  peptide (1)..(396): Ceres Seq. ID no. 13615984
  misc_feature (9)..(388): Pfam Name: Auxin Efflux Carrier Pfam Description: Auxin Efflux Carrier
  misc_feature (1)..(396): Homolog of NCBI NO: 18398448 NR Description: auxin efflux carrier protein family [Arabidopsis >gi|30680004|ref|NP_849964.1| auxin efflux carrier protein family
  misc_feature (1)..(396): Homolog of NCBI NO: 21536598 NR Description: unknown [Arabidopsis thaliana]
  misc_feature (1)..(395): Homolog of NCBI NO: 15239215 NR Description: auxin efflux carrier protein family [Arabidopsis >gi|10177113|dbj|BAB10403.1| gb|AAD32907.1~gene_id:K2A18.4~strong
  misc_feature (6)..(395): Homolog of NCBI NO: 18411126 NR Description: auxin efflux carrier protein family [Arabidopsis >gi|30699180|ref|NP_849892.1| auxin efflux carrier protein family
  misc_feature (6)..(395): Homolog of NCBI NO: 21553424 NR Description: unknown [Arabidopsis thaliana]
  misc_feature (1)..(395): Homolog of NCBI NO: 22329697 NR Description: auxin efflux carrier protein family [Arabidopsis
  misc_feature (7)..(395): Homolog of NCBI NO: 15241659 NR Description: auxin efflux carrier protein family [Arabidopsis
  misc_feature (195)..(394): Homolog of NCBI NO: 34394344 NR Description: auxin efflux carrier protein family-like protein
  misc_feature (12)..(214): Homolog of NCBI NO: 18409758 NR Description: auxin efflux carrier protein family [Arabidopsis
  misc_feature (231)..(396): Homolog of NCBI NO: 18409758 NR Description: auxin efflux carrier protein family [Arabidopsis
MGFWSLLEVASMPVIQVLFMSLVGAFMASDRCKLFPVEARNSMNKVVFVLFAPALMFANLAQTVTLEDIISWWFMPVNMGLTFLIGGLLGWLVVKILKPPPYLEGLIVATCSAGNMGNLPIILVPAICDEDKSPFGNRSVCRTVGLSYASFSMALGGFYIWTYTFRLIKGSAMKVQAIEESEKIAIKSSNSDLEADHKTHLLGAPEDKENKVVKEKTGFWRKGVDFLHEILEELLAPPTLGAIIGFIFGAVRWLRNLIIGDDAPLRIVQSTAKLLGDGTIPCMTIILGGNLIQGLRSSAVKPMVVLGIVCVRYIAMPIIGIGIVLTAANLGFLPADPLFQYVLMLQFTLPPAMNIGTMTQLYNVAQDECSVLMLWTYLVAILALTVWSTIFLHLLV

SEQ ID NO: 104886 - protein, 385 aa, Arabidopsis thaliana
  peptide (1)..(385): Ceres Seq. ID no. 13615985
  misc_feature (1)..(377): Pfam Name: Auxin Efflux Carrier Pfam Description: Auxin Efflux Carrier
  misc_feature (1)..(385): Homolog of NCBI NO: 18398448 NR Description: auxin efflux carrier protein family [Arabidopsis >gi|30680004|ref|NP_849964.1| auxin efflux carrier protein family
  misc_feature (1)..(385): Homolog of NCBI NO: 21536598 NR Description: unknown [Arabidopsis thaliana]
  misc_feature (1)..(384): Homolog of NCBI NO: 15239215 NR Description: auxin efflux carrier protein family [Arabidopsis >gi|10177113|dbj|BAB10403.1| gb|AAD32907.1~gene_id:K2A18.4~strong
  misc_feature (1)..(384): Homolog of NCBI NO: 18411126 NR Description: auxin efflux carrier protein family [Arabidopsis >gi|30699180|ref|NP_849892.1| auxin efflux carrier protein family
  misc_feature (1)..(384): Homolog of NCBI NO: 21553424 NR Description: unknown [Arabidopsis thaliana]
  misc_feature (1)..(384): Homolog of NCBI NO: 22329697 NR Description: auxin efflux carrier protein family [Arabidopsis
  misc_feature (1)..(384): Homolog of NCBI NO: 15241659 NR Description: auxin efflux carrier protein family [Arabidopsis
  misc_feature (184)..(383): Homolog of NCBI NO: 34394344 NR Description: auxin efflux carrier protein family-like protein
  misc_feature (1)..(203): Homolog of NCBI NO: 18409758 NR Description: auxin efflux carrier protein family [Arabidopsis
  misc_feature (220)..(385): Homolog of NCBI NO: 18409758 NR Description: auxin efflux carrier protein family [Arabidopsis
MPVIQVLFMSLVGAFMASDRCKLFPVEARNSMNKVVFVLFAPALMFANLAQTVTLEDIISWWFMPVNMGLTFLIGGLLGWLVVKILKPPPYLEGLIVATCSAGNMGNLPIILVPAICDEDKSPFGNRSVCRTVGLSYASFSMALGGFYIWTYTFRLIKGSAMKVQAIEESEKIAIKSSNSDLEADHKTHLLGAPEDKENKVVKEKTGFWRKGVDFLHEILEELLAPPTLGAIIGFIFGAVRWLRNLIIGDDAPLRIVQSTAKLLGDGTIPCMTIILGGNLIQGLRSSAVKPMVVLGIVCVRYIAMPIIGIGIVLTAANLGFLPADPLFQYVLMLQFTLPPAMNIGTMTQLYNVAQDECSVLMLWTYLVAILALTVWSTIFLHLLV

SEQ ID NO: 104887 - protein, 377 aa, Arabidopsis thaliana
  peptide (1)..(377): Ceres Seq. ID no. 13615986
  misc_feature (1)..(369): Pfam Name: Auxin Efflux Carrier Pfam Description: Auxin Efflux Carrier
  misc_feature (1)..(377): Homolog of NCBI NO: 18398448 NR Description: auxin efflux carrier protein family [Arabidopsis >gi|30680004|ref|NP_849964.1| auxin efflux carrier protein family
  misc_feature (1)..(377): Homolog of NCBI NO: 21536598 NR Description: unknown [Arabidopsis thaliana]
  misc_feature (1)..(376): Homolog of NCBI NO: 15239215 NR Description: auxin efflux carrier protein family [Arabidopsis >gi|10177113|dbj|BAB10403.1| gb|AAD32907.1~gene_id:K2A18.4~strong
  misc_feature (1)..(376): Homolog of NCBI NO: 18411126 NR Description: auxin efflux carrier protein family [Arabidopsis >gi|30699180|ref|NP_849892.1| auxin efflux carrier protein family
  misc_feature (1)..(376): Homolog of NCBI NO: 21553424 NR Description: unknown [Arabidopsis thaliana]
  misc_feature (1)..(376): Homolog of NCBI NO: 22329697 NR Description: auxin efflux carrier protein family [Arabidopsis
  misc_feature (1)..(376): Homolog of NCBI NO: 15241659 NR Description: auxin efflux carrier protein family [Arabidopsis
  misc_feature (176)..(375): Homolog of NCBI NO: 34394344 NR Description: auxin efflux carrier protein family-like protein
  misc_feature (1)..(195): Homolog of NCBI NO: 18409758 NR Description: auxin efflux carrier protein family [Arabidopsis
  misc_feature (212)..(377): Homolog of NCBI NO: 18409758 NR Description: auxin efflux carrier protein family [Arabidopsis
MSLVGAFMASDRCKLFPVEARNSMNKVVFVLFAPALMFANLAQTVTLEDIISWWFMPVNMGLTFLIGGLLGWLVVKILKPPPYLEGLIVATCSAGNMGNLPIILVPAICDEDKSPFGNRSVCRTVGLSYASFSMALGGFYIWTYTFRLIKGSAMKVQAIEESEKIAIKSSNSDLEADHKTHLLGAPEDKENKVVKEKTGFWRKGVDFLHEILEELLAPPTLGAIIGFIFGAVRWLRNLIIGDDAPLRIVQSTAKLLGDGTIPCMTIILGGNLIQGLRSSAVKPMVVLGIVCVRYIAMPIIGIGIVLTAANLGFLPADPLFQYVLMLQFTLPPAMNIGTMTQLYNVAQDECSVLMLWTYLVAILALTVWSTIFLHLLV

SEQ ID NO: 104888 - DNA, 1285 bp, Arabidopsis thaliana
  misc_feature (1)..(1285): Ceres Seq. ID no. 13615990
  misc_feature: MA Experiment ID: 108434 Result: Down-regulated in Transcription
  misc_feature: MA Experiment 108434 PARAMETER Experiment Name: At_Root_Tips_cDNA_P Parameter: Tissue Value: Root Tips
  misc_feature: MA Experiment ID: 20000112 Result: Up-regulated in Transcription
  misc_feature: MA Experiment 20000112 PARAMETER Experiment Name: At_42deg_Heat_cDNA_P Parameter: Temperature (deg C) Value: 42 vs. 22
  misc_feature: MA Experiment 20000112 PARAMETER Experiment Name: At_42deg_Heat_cDNA_P Parameter: Timepoint (hr) Value: 2
  misc_feature: MA Experiment 20000112 PARAMETER Experiment Name: At_42deg_Heat_cDNA_P Parameter: Tissue Value: Aerial
  misc_feature: MA Experiment ID: 20000184 Result: Down-regulated in Transcription
  misc_feature: MA Experiment 20000184 PARAMETER Experiment Name: At_Shoots__P Parameter: Age (day) Value: 7
  misc_feature: MA Experiment 20000184 PARAMETER Experiment Name: At_Shoots__P Parameter: Tissue Value: Shoots vs. Whole Plant
  misc_feature: MA Experiment ID: 20000227 Result: Down-regulated in Transcription
  misc_feature: MA Experiment 20000227 PARAMETER Experiment Name: At_Root-Tips-vs-Tops_P Parameter: Tissue Value: Root Tips vs. Root Tops
  misc_feature: MA Experiment ID: 20000794 Result: Up-regulated in Transcription
  misc_feature: MA Experiment 20000794 PARAMETER Experiment Name: At_Petals_P Parameter: Age (day) Value: 23-25 days
  misc_feature: MA Experiment 20000794 PARAMETER Experiment Name: At_Petals_P Parameter: Plant Line Value: WS
  misc_feature: MA Experiment 20000794 PARAMETER Experiment Name: At_Petals_P Parameter: Tissue Value: Petals vs. Whole plant
atgaatggcgatgagcttcctttcgagagtggtttcgaggtttacgctaagggaactcataagtcagagtttgactcgaatttgcttgatcctcgttctgatcctatttgggatgctataagagaagaagctaaacttgaggcagagaaagagcctattttgagtagcttcttgtatgctggtatcttagcacatgattgtttagagcaagctttagggtttgttctagccaaccgtctccaaaacccaaccttgttggcaacacaactcttggatatattttatggtgttatgatgcatgacaaaggtattcagagttcgattcgccatgatctccaggcatttaaagatcgtgatcctgcttgtctgtcgtatagttctgctattttacatctgaagggttatcatgcgttacaagcatatagggttgcgcataaactgtggaatgaagggaggaaactattagctcttgcattgcaaagccgaataagcgaggtagttggtgatcattgtcttttggttgagtcttgctggagctgcatttttgagctcaatgtctgatctatgctgtggtttctctcaggtttttggcattgacatacatccaggtagagttttgagcttcatatctctgctctcatctgtttgaacattctcagtttcccttctctgttgtaatagttgatcaggtttaccggtgaattgattgctggttatacatattacttgaattctctttctgcatagcggcaagaattggggagggaatattgttggatcatggaactggagtggtcattggtgagaccgctgtgataggcaacggtgtctcgatcttacatggtgtgactttaggaggaaccggaaaggaaactggcgatcgccacccaaagataggtgaaggtgcattgcttggagcttgtgtgactatacttggtaacataagcataggtgctggagcaatggtagctgcaggttcacttgtgttaaaagacgttccttcgcatagtgtggtggctggaaatcctgcaaaactgatcagggtcatggaagagcaagacccgtctctagcaatgaaacacgatgctactaaagagttctttcgacatgtagctgatggttacaaaggggcacaatctaacggaccatcactttcagcaggagatacagagaaaggacacactaacagcacatcatgagatctttgtatgcaaatttcttaccatcataagctaattcttgtatgctcttgcttatcatcataagctaatctcagcatttcctc

SEQ ID NO: 104889 - protein, 186 aa, Arabidopsis thaliana
  peptide (1)..(186): Ceres Seq. ID no. 13615991
  misc_feature (1)..(168): Homolog of NCBI NO: 5597011 NR Description: serine acetyltranferase 2 [Arabidopsis thaliana]
  misc_feature (1)..(168): Homolog of NCBI NO: 18398491 NR Description: acetyltransferase, putative [Arabidopsis >gi|4406384|gb|AAD19963.1| serine acetyltransferase [Arabidopsis
  misc_feature (1)..(168): Homolog of NCBI NO: 20198259 NR Description: serine acetyltransferase (GB:AF112303)
  misc_feature (1)..(168): Homolog of NCBI NO: 25286519 NR Description: probable serine acetyltransferase [imported] -
  misc_feature (1)..(167): Homolog of NCBI NO: 7433701 NR Description: serine O-acetyltransferase (EC 2.3.1.30)
  misc_feature (3)..(168): Homolog of NCBI NO: 17225592 NR Description: serine acetyltransferase [Arabidopsis thaliana] unknown protein [Arabidopsis thaliana]
  misc_feature (3)..(166): Homolog of NCBI NO: 30690434 NR Description: acetyltransferase family [Arabidopsis thaliana]
  misc_feature (3)..(166): Homolog of NCBI NO: 7433700 NR Description: serine O-acetyltransferase (EC 2.3.1.30) - Arabidopsis thaliana >gi|3367582|emb|CAA20034.1| putative [Arabidopsis thaliana] >gi|7270515|emb|CAB80280.1| putative
  misc_feature (9)..(166): Homolog of NCBI NO: 22758278 NR Description: Putative serine acetyltransferase [Oryza sativa
  misc_feature (36)..(166): Homolog of NCBI NO: 1361979 NR Description: serine O-acetyltransferase (EC 2.3.1.30) - >gi|1350550|dbj|BAA12843.1| serine acetyltransferase [Citrullus >gi|1841312|dbj|BAA08479.1| serine acetyltransferase. [Citrullus
MNGDELPFESGFEVYAKGTHKSEFDSNLLDPRSDPIWDAIREEAKLEAEKEPILSSFLYAGILAHDCLEQALGFVLANRLQNPTLLATQLLDIFYGVMMHDKGIQSSIRHDLQAFKDRDPACLSYSSAILHLKGYHALQAYRVAHKLWNEGRKLLALALQSRISEVVGDHCLLVESCWSCIFELNV

SEQ ID NO: 104890 - DNA, 1603 bp, Arabidopsis thaliana
  misc_feature (1)..(1603): Ceres Seq. ID no. 13615992
  misc_feature: MA Experiment ID: 108434 Result: Up-regulated in Transcription
  misc_feature: MA Experiment 108434 PARAMETER Experiment Name: At_Root_Tips_cDNA_P Parameter: Tissue Value: Root Tips
  misc_feature: MA Experiment ID: 108461 Result: Down-regulated in Transcription
  misc_feature: MA Experiment 108461 PARAMETER Experiment Name: At_Germinating_Seeds_cDNA_P Parameter: Age (day) Value: 1 vs. 0
  misc_feature: MA Experiment 108461 PARAMETER Experiment Name: At_Germinating_Seeds_cDNA_P Parameter: Tissue Value: Germinating Seeds
  misc_feature: MA Experiment ID: 108462 Result: Down-regulated in Transcription
  misc_feature: MA Experiment 108462 PARAMETER Experiment Name: At_Germinating_Seeds_cDNA_P Parameter: Age (day) Value: 2 vs. 0
  misc_feature: MA Experiment 108462 PARAMETER Experiment Name: At_Germinating_Seeds_cDNA_P Parameter: Tissue Value: Germinating Seeds
  misc_feature: MA Experiment ID: 108463 Result: Down-regulated in Transcription
  misc_feature: MA Experiment 108463 PARAMETER Experiment Name: At_Germinating_Seeds_cDNA_P Parameter: Age (day) Value: 3 vs. 0
  misc_feature: MA Experiment 108463 PARAMETER Experiment Name: At_Germinating_Seeds_cDNA_P Parameter: Tissue Value: Germinating Seeds
  misc_feature: MA Experiment ID: 108464 Result: Down-regulated in Transcription
  misc_feature: MA Experiment 108464 PARAMETER Experiment Name: At_Germinating_Seeds_cDNA_P Parameter: Age (day) Value: 4 vs. 0
  misc_feature: MA Experiment 108464 PARAMETER Experiment Name: At_Germinating_Seeds_cDNA_P Parameter: Tissue Value: Germinating Seeds
  misc_feature: MA Experiment ID: 108501 Result: Up-regulated in Transcription
  misc_feature: MA Experiment 108501 PARAMETER Experiment Name: At_ap2_floral_buds_cDNA_P Parameter: Plant Line Value: ap2 (Ler.)
  misc_feature: MA Experiment 108501 PARAMETER Experiment Name: At_ap2_floral_buds_cDNA_P Parameter: Tissue Value: Closed Flower
  misc_feature: MA Experiment ID: 108595 Result: Down-regulated in Transcription
  misc_feature: MA Experiment 108595 PARAMETER Experiment Name: At_Ler-pi_Ovule_cDNA_P Parameter: Plant Line Value: null
  misc_feature: MA Experiment ID: 20000180 Result: Down-regulated in Transcription
  misc_feature: MA Experiment 20000180 PARAMETER Experiment Name: At_Germinating_Seeds_P Parameter: Age (hr) Value: 24 vs. 0
  misc_feature: MA Experiment 20000180 PARAMETER Experiment Name: At_Germinating_Seeds_P Parameter: Tissue Value: Germinating Seeds
  misc_feature: MA Experiment ID: 20000227 Result: Up-regulated in Transcription
  misc_feature: MA Experiment 20000227 PARAMETER Experiment Name: At_Root-Tips-vs-Tops_P Parameter: Tissue Value: Root Tips vs. Root Tops
  misc_feature: MA Experiment ID: 20001557 Result: Up-regulated in Transcription
  misc_feature: MA Experiment 20001557 PARAMETER Experiment Name: At_Drought_Soil_Dry_P Parameter: Age (day) Value: 27
  misc_feature: MA Experiment 20001557 PARAMETER Experiment Name: At_Drought_Soil_Dry_P Parameter: Organism Value: A. thaliana
  misc_feature: MA Experiment 20001557 PARAMETER Experiment Name: At_Drought_Soil_Dry_P Parameter: Plant Line Value: WS
  misc_feature: MA Experiment 20001557 PARAMETER Experiment Name: At_Drought_Soil_Dry_P Parameter: Post Timepoint (hr) Value: 3
  misc_feature: MA Experiment 20001557 PARAMETER Experiment Name: At_Drought_Soil_Dry_P Parameter: Post-Treatment Value: Re-Water vs. No Drought
  misc_feature: MA Experiment 20001557 PARAMETER Experiment Name: At_Drought_Soil_Dry_P Parameter: Timepoint (day) Value: 13
  misc_feature: MA Experiment 20001557 PARAMETER Experiment Name: At_Drought_Soil_Dry_P Parameter: Treatment Value: Drought vs. No Drought
  misc_feature: MA Experiment ID: 20001558 Result: Up-regulated in Transcription
  misc_feature: MA Experiment 20001558 PARAMETER Experiment Name: At_Drought_Soil_Dry_P Parameter: Age (day) Value: 27
  misc_feature: MA Experiment 20001558 PARAMETER Experiment Name: At_Drought_Soil_Dry_P Parameter: Organism Value: A. thaliana
  misc_feature: MA Experiment 20001558 PARAMETER Experiment Name: At_Drought_Soil_Dry_P Parameter: Plant Line Value: WS
  misc_feature: MA Experiment 20001558 PARAMETER Experiment Name: At_Drought_Soil_Dry_P Parameter: Post Timepoint (hr) Value: 6
  misc_feature: MA Experiment 20001558 PARAMETER Experiment Name: At_Drought_Soil_Dry_P Parameter: Post-Treatment Value: Re-Water vs. No Drought
  misc_feature: MA Experiment 20001558 PARAMETER Experiment Name: At_Drought_Soil_Dry_P Parameter: Timepoint (day) Value: 13
  misc_feature: MA Experiment 20001558 PARAMETER Experiment Name: At_Drought_Soil_Dry_P Parameter: Treatment Value: Drought vs. No Drought
ctttttgcgatcaatcgaaagaaaacaaaaaatggggaaagttccgtcgtcgtttcgtagtatgccggcgaacttattggtcagaaaaacaacaccatctcctccagcgccgccgcgagattttcgcaacagaaccgccgtgggaggagattcagccaaacttccccagaatactcaagcccctcgcgagccctccttgaggaatccattcaagtcaccaaatctctcagacgctaaaagcctcttcaattcaatcgccgccacttcacgaatcccactcgatctcaagttccacaactctgttcttcaatcatacggttcaatcgccgtcgtcaacgatacggtgaaactctttcagcatattttgaaatcgcagcctaatttcaggccgggacgttcaacgttccttatcttgctttcacatgcttgtagagctcctgattcgtcgatttcgaatgttcatagagttcttaatctcatggttaataatggtttagagcctgatcaagtaactaccgatatcgcggtgaggtctctttgcgaaacgggtcgggttgatgaagctaaggatttgatgaaggagctcactgagaaacactctcctccggatacatatacttataactttctactgaagcatttgtgcaaatgcaaagatcttcatgttgtttatgagtttgttgatgagatgagagatgatttcgatgttaagccggatcttgttagcttcactatcttgattgataatgtttgtaactctaagaacttgagggaggcaatgtatctagttagtaagttaggtaatgctgggtttaagccggattgtttcctctataacacgattatgaaaggtttttgcacactgagtaaagggagtgaggcggttggtgtgtataagaaaatgaaggaagaaggtgttgagccagatcagattacctacaatactttgatatttggactgtcgaaagctggtagagttgaggaagctaggatgtatttgaaaactatggttgatgcggggtatgagccggatactgctacttacacatcactgatgaatggaatgtgtagaaaaggtgagtctttaggtgcgttgagtttgttagaagaaatggaagcaagagggtgtgctccaaatgattgtacttataatactttgcttcatggattgtgtaaagcaaggttgatggataaagggatggagttatatgaaatgatgaaatcaagtggtgtaaagcttgagagtaatggttatgctacacttgtgaggtctctggttaaaagtggcaaggtcgcagaggcttatgaagtgtttgattatgcagttgatagcaagagtttgtcagatgcttctgcgtactctacacttgaaactaccttgaaatggttgaaaaaagctaaagaacaaggcttggttccataaatggtatcctctagctgagctttaccgactttcttctttatgcaagtccatatttcatttttgaagtagtgttactccaaaagcaatgaatttgtttcgaaatatgctgttcgattcttaagggaccagcagtgatttataatagtaactttgttggtaatattattgtcacttgagatt

SEQ ID NO: 104891 - protein, 473 aa, Arabidopsis thaliana
  peptide (1)..(473): Ceres Seq. ID no. 13615993
  misc_feature (205)..(239): Pfam Name: PPR repeat Pfam Description: PPR repeat
  misc_feature (11)..(473): Homolog of NCBI NO: 18398498 NR Description: pentatricopeptide (PPR) repeat-containing protein
  misc_feature (11)..(473): Homolog of NCBI NO: 21553611 NR Description: unknown [Arabidopsis thaliana]
  misc_feature (11)..(473): Homolog of NCBI NO: 7485272 NR Description: hypothetical protein A_TM017A05.11 - Arabidopsis
  misc_feature (71)..(453): Homolog of NCBI NO: 15231863 NR Description: pentatricopeptide (PPR) repeat-containing protein
  misc_feature (128)..(456): Homolog of NCBI NO: 18391414 NR Description: pentatricopeptide (PPR) repeat-containing protein thaliana] >gi|13605505|gb|AAK32746.1|AF361578_1 [Arabidopsis thaliana] >gi|24111307|gb|AAN46777.1|
  misc_feature (128)..(456): Homolog of NCBI NO: 9502388 NR Description: T12C24.15 [Arabidopsis thaliana]
  misc_feature (42)..(470): Homolog of NCBI NO: 15218325 NR Description: pentatricopeptide (PPR) repeat-containing protein
  misc_feature (91)..(437): Homolog of NCBI NO: 38567720 NR Description: B1358B12.18 [Oryza sativa (japonica
  misc_feature (73)..(456): Homolog of NCBI NO: 25518293 NR Description: hypothetical protein F13K23.2 - Arabidopsis >gi|8698724|gb|AAF78482.1|AC012187_2 Contains similarity to an protein F16M19.7 gi|6598837 from Arabidopsis thaliana BAC
  misc_feature (125)..(453): Homolog of NCBI NO: 34896698 NR Description: putative pentatricopeptide repeat protein [Oryza
FLRSIERKQKMGKVPSSFRSMPANLLVRKTTPSPPAPPRDFRNRTAVGGDSAKLPQNTQAPREPSLRNPFKSPNLSDAKSLFNSIAATSRIPLDLKFHNSVLQSYGSIAVVNDTVKLFQHILKSQPNFRPGRSTFLILLSHACRAPDSSISNVHRVLNLMVNNGLEPDQVTTDIAVRSLCETGRVDEAKDLMKELTEKHSPPDTYTYNFLLKHLCKCKDLHVVYEFVDEMRDDFDVKPDLVSFTILIDNVCNSKNLREAMYLVSKLGNAGFKPDCFLYNTIMKGFCTLSKGSEAVGVYKKMKEEGVEPDQITYNTLIFGLSKAGRVEEARMYLKTMVDAGYEPDTATYTSLMNGMCRKGESLGALSLLEEMEARGCAPNDCTYNTLLHGLCKARLMDKGMELYEMMKSSGVKLESNGYATLVRSLVKSGKVAEAYEVFDYAVDSKSLSDASAYSTLETTLKWLKKAKEQGLVP

SEQ ID NO: 104892 - protein, 463 aa, Arabidopsis thaliana; identical to SEQ ID NO: 42925
  peptide (1)..(463): Ceres Seq. ID no. 13615994
  misc_feature (195)..(229): Pfam Name: PPR repeat Pfam Description: PPR repeat
  misc_feature (1)..(463): Homolog of NCBI NO: 18398498 NR Description: pentatricopeptide (PPR) repeat-containing protein
  misc_feature (1)..(463): Homolog of NCBI NO: 21553611 NR Description: unknown [Arabidopsis thaliana]
  misc_feature (1)..(463): Homolog of NCBI NO: 7485272 NR Description: hypothetical protein A_TM017A05.11 - Arabidopsis
  misc_feature (61)..(443): Homolog of NCBI NO: 15231863 NR Description: pentatricopeptide (PPR) repeat-containing protein
  misc_feature (118)..(446): Homolog of NCBI NO: 18391414 NR Description: pentatricopeptide (PPR) repeat-containing protein thaliana] >gi|13605505|gb|AAK32746.1|AF361578_1 [Arabidopsis thaliana] >gi|24111307|gb|AAN46777.1|
  misc_feature (118)..(446): Homolog of NCBI NO: 9502388 NR Description: T12C24.15 [Arabidopsis thaliana]
  misc_feature (32)..(460): Homolog of NCBI NO: 15218325 NR Description: pentatricopeptide (PPR) repeat-containing protein
  misc_feature (81)..(427): Homolog of NCBI NO: 38567720 NR Description: B1358B12.18 [Oryza sativa (japonica
  misc_feature (63)..(446): Homolog of NCBI NO: 25518293 NR Description: hypothetical protein F13K23.2 - Arabidopsis >gi|8698724|gb|AAF78482.1|AC012187_2 Contains similarity to an protein F16M19.7 gi|6598837 from Arabidopsis thaliana BAC
  misc_feature (115)..(443): Homolog of NCBI NO: 34896698 NR Description: putative pentatricopeptide repeat protein [Oryza

SEQ ID NO: 104893 - protein, 453 aa, Arabidopsis thaliana; identical to SEQ ID NO: 42926
  peptide (1)..(453): Ceres Seq. ID no. 13615995
  misc_feature (185)..(219): Pfam Name: PPR repeat Pfam Description: PPR repeat
  misc_feature (1)..(453): Homolog of NCBI NO: 18398498 NR Description: pentatricopeptide (PPR) repeat-containing protein
  misc_feature (1)..(453): Homolog of NCBI NO: 21553611 NR Description: unknown [Arabidopsis thaliana]
  misc_feature (1)..(453): Homolog of NCBI NO: 7485272 NR Description: hypothetical protein A_TM017A05.11 - Arabidopsis
  misc_feature (51)..(433): Homolog of NCBI NO: 15231863 NR Description: pentatricopeptide (PPR) repeat-containing protein
  misc_feature (108)..(436): Homolog of NCBI NO: 18391414 NR Description: pentatricopeptide (PPR) repeat-containing protein thaliana] >gi|13605505|gb|AAK32746.1|AF361578_1 [Arabidopsis thaliana] >gi|24111307|gb|AAN46777.1|
  misc_feature (108)..(436): Homolog of NCBI NO: 9502388 NR Description: T12C24.15 [Arabidopsis thaliana]
  misc_feature (22)..(450): Homolog of NCBI NO: 15218325 NR Description: pentatricopeptide (PPR) repeat-containing protein
  misc_feature (71)..(417): Homolog of NCBI NO: 38567720 NR Description: B1358B12.18 [Oryza sativa (japonica
  misc_feature (53)..(436): Homolog of NCBI NO: 25518293 NR Description: hypothetical protein F13K23.2 - Arabidopsis >gi|8698724|gb|AAF78482.1|AC012187_2 Contains similarity to an protein F16M19.7 gi|6598837 from Arabidopsis thaliana BAC
  misc_feature (105)..(433): Homolog of NCBI NO: 34896698 NR Description: putative pentatricopeptide repeat protein [Oryza

SEQ ID NO: 104894 - DNA, 883 bp, Arabidopsis thaliana
  misc_feature (1)..(883): Ceres Seq. ID no. 13615999
  misc_feature: MA Experiment ID: 108595 Result: Up-regulated in Transcription
  misc_feature: MA Experiment 108595 PARAMETER Experiment Name: At_Ler-pi_Ovule_cDNA_P Parameter: Plant Line Value: null
  misc_feature: MA Experiment ID: 20000265 Result: Down-regulated in Transcription
  misc_feature: MA Experiment 20000265 PARAMETER Experiment Name: At_Open_Flower_P Parameter: Age (day) Value: 21
  misc_feature: MA Experiment 20000265 PARAMETER Experiment Name: At_Open_Flower_P Parameter: Plant Line Value: WS
  misc_feature: MA Experiment 20000265 PARAMETER Experiment Name: At_Open_Flower_P Parameter: Tissue Value: Closed Flower vs. Whole Plant
  misc_feature: MA Experiment ID: 20000438 Result: Down-regulated in Transcription
  misc_feature: MA Experiment 20000438 PARAMETER Experiment Name: At_Shoots__P Parameter: Age (day) Value: 14
  misc_feature: MA Experiment 20000438 PARAMETER Experiment Name: At_Shoots__P Parameter: Tissue Value: Shoots vs. Whole Plant
  misc_feature: MA Experiment ID: 20000794 Result: Up-regulated in Transcription
  misc_feature: MA Experiment 20000794 PARAMETER Experiment Name: At_Petals_P Parameter: Age (day) Value: 23-25 days
  misc_feature: MA Experiment 20000794 PARAMETER Experiment Name: At_Petals_P Parameter: Plant Line Value: WS
  misc_feature: MA Experiment 20000794 PARAMETER Experiment Name: At_Petals_P Parameter: Tissue Value: Petals vs. Whole plant
  misc_feature: MA Experiment ID: 20001555 Result: Down-regulated in Transcription
  misc_feature: MA Experiment 20001555 PARAMETER Experiment Name: At_Drought_Soil_Dry_P Parameter: Age (day) Value: 24
  misc_feature: MA Experiment 20001555 PARAMETER Experiment Name: At_Drought_Soil_Dry_P Parameter: Organism Value: A. thaliana
  misc_feature: MA Experiment 20001555 PARAMETER Experiment Name: At_Drought_Soil_Dry_P Parameter: Plant Line Value: WS
  misc_feature: MA Experiment 20001555 PARAMETER Experiment Name: At_Drought_Soil_Dry_P Parameter: Post Timepoint (hr) Value: None
  misc_feature: MA Experiment 20001555 PARAMETER Experiment Name: At_Drought_Soil_Dry_P Parameter: Post-Treatment Value: None
  misc_feature: MA Experiment 20001555 PARAMETER Experiment Name: At_Drought_Soil_Dry_P Parameter: Timepoint (day) Value: 10
  misc_feature: MA Experiment 20001555 PARAMETER Experiment Name: At_Drought_Soil_Dry_P Parameter: Treatment Value: Drought vs. No Drought
  misc_feature: MA Experiment ID: 20001556 Result: Down-regulated in Transcription
  misc_feature: MA Experiment 20001556 PARAMETER Experiment Name: At_Drought_Soil_Dry_P Parameter: Age (day) Value: 26
  misc_feature: MA Experiment 20001556 PARAMETER Experiment Name: At_Drought_Soil_Dry_P Parameter: Organism Value: A. thaliana
  misc_feature: MA Experiment 20001556 PARAMETER Experiment Name: At_Drought_Soil_Dry_P Parameter: Plant Line Value: WS
  misc_feature: MA Experiment 20001556 PARAMETER Experiment Name: At_Drought_Soil_Dry_P Parameter: Post Timepoint (hr) Value: None
  misc_feature: MA Experiment 20001556 PARAMETER Experiment Name: At_Drought_Soil_Dry_P Parameter: Post-Treatment Value: None
  misc_feature: MA Experiment 20001556 PARAMETER Experiment Name: At_Drought_Soil_Dry_P Parameter: Timepoint (day) Value: 12
  misc_feature: MA Experiment 20001556 PARAMETER Experiment Name: At_Drought_Soil_Dry_P Parameter: Treatment Value: Drought vs. No Drought
  misc_feature: MA Experiment ID: 20001558 Result: Down-regulated in Transcription
  misc_feature: MA Experiment 20001558 PARAMETER Experiment Name: At_Drought_Soil_Dry_P Parameter: Age (day) Value: 27
  misc_feature: MA Experiment 20001558 PARAMETER Experiment Name: At_Drought_Soil_Dry_P Parameter: Organism Value: A. thaliana
  misc_feature: MA Experiment 20001558 PARAMETER Experiment Name: At_Drought_Soil_Dry_P Parameter: Plant Line Value: WS
  misc_feature: MA Experiment 20001558 PARAMETER Experiment Name: At_Drought_Soil_Dry_P Parameter: Post Timepoint (hr) Value: 6
  misc_feature: MA Experiment 20001558 PARAMETER Experiment Name: At_Drought_Soil_Dry_P Parameter: Post-Treatment Value: Re-Water vs. No Drought
  misc_feature: MA Experiment 20001558 PARAMETER Experiment Name: At_Drought_Soil_Dry_P Parameter: Timepoint (day) Value: 13
  misc_feature: MA Experiment 20001558 PARAMETER Experiment Name: At_Drought_Soil_Dry_P Parameter: Treatment Value: Drought vs. No Drought
  misc_feature: MA Experiment ID: 20001559 Result: Down-regulated in Transcription
  misc_feature: MA Experiment 20001559 PARAMETER Experiment Name: At_Drought_Soil_Dry_P Parameter: Age (day) Value: 28
  misc_feature: MA Experiment 20001559 PARAMETER Experiment Name: At_Drought_Soil_Dry_P Parameter: Organism Value: A. thaliana
  misc_feature: MA Experiment 20001559 PARAMETER Experiment Name: At_Drought_Soil_Dry_P Parameter: Plant Line Value: WS
  misc_feature: MA Experiment 20001559 PARAMETER Experiment Name: At_Drought_Soil_Dry_P Parameter: Post Timepoint (hr) Value: 29
  misc_feature: MA Experiment 20001559 PARAMETER Experiment Name: At_Drought_Soil_Dry_P Parameter: Post-Treatment Value: Re-Water vs. No Drought
  misc_feature: MA Experiment 20001559 PARAMETER Experiment Name: At_Drought_Soil_Dry_P Parameter: Timepoint (day) Value: 14
  misc_feature: MA Experiment 20001559 PARAMETER Experiment Name: At_Drought_Soil_Dry_P Parameter: Treatment Value: Drought vs. No Drought
  misc_feature: MA Experiment ID: 20001757 Result: Down-regulated in Transcription
  misc_feature: MA Experiment 20001757 PARAMETER Experiment Name: At_50mM_NH4NO3_L-to-H_P Parameter: Timepoint (hr) Value: 6
  misc_feature: MA Experiment 20001757 PARAMETER Experiment Name: At_50mM_NH4NO3_L-to-H_P Parameter: Tissue Value: Leaf
  misc_feature: MA Experiment 20001757 PARAMETER Experiment Name: At_50mM_NH4NO3_L-to-H_P Parameter: Treatment Value: 50mM NH4NO3 vs 100mM Mannitol
  misc_feature: MA Experiment ID: 20001773 Result: Up-regulated in Transcription
  misc_feature: MA Experiment 20001773 PARAMETER Experiment Name: At_Far-red-enriched-adult_P Parameter: Age (day) Value: 30
  misc_feature: MA Experiment 20001773 PARAMETER Experiment Name: At_Far-red-enriched-adult_P Parameter: Light Value: Far-red enriched vs. White
  misc_feature: MA Experiment 20001773 PARAMETER Experiment Name: At_Far-red-enriched-adult_P Parameter: Organism Value: A. thaliana
  misc_feature: MA Experiment 20001773 PARAMETER Experiment Name: At_Far-red-enriched-adult_P Parameter: Plant Line Value: Columbia
  misc_feature: MA Experiment 20001773 PARAMETER Experiment Name: At_Far-red-enriched-adult_P Parameter: Timepoint (hr) Value: 48
  misc_feature: MA Experiment 20001773 PARAMETER Experiment Name: At_Far-red-enriched-adult_P Parameter: Tissue Value: Aerial
  misc_feature: MA Experiment ID: 20001905 Result: Down-regulated in Transcription
  misc_feature: MA Experiment 20001905 PARAMETER Experiment Name: At_Drought_Reproduction_P Parameter: Age (day) Value: 40
  misc_feature: MA Experiment 20001905 PARAMETER Experiment Name: At_Drought_Reproduction_P Parameter: Organism Value: A. thaliana
  misc_feature: MA Experiment 20001905 PARAMETER Experiment Name: At_Drought_Reproduction_P Parameter: Plant Line Value: WS
  misc_feature: MA Experiment 20001905 PARAMETER Experiment Name: At_Drought_Reproduction_P Parameter: Timepoint (day) Value: 10
  misc_feature: MA Experiment 20001905 PARAMETER Experiment Name: At_Drought_Reproduction_P Parameter: Tissue Value: Rosettes
  misc_feature: MA Experiment 20001905 PARAMETER Experiment Name: At_Drought_Reproduction_P Parameter: Treatment Value: Drought vs. No Drought
agttacatctacttgtctacttgtcgtttcttgtatagttggagtttatagtttgtcttaacgtacaagataatttgaaaggtagacgtagacgttggatacttatttggtaggctcttaagaatcttaggtgtatctctttagtttgaaggttagattcagaatctctgtagattcattagtagctttttctgtgtgatctttgtgttgtatatatatagatcgaattgattttagctggtgaaaggtgaagttgtggtatgaatatgaagaaacagattatggatgagtctgtaaagtcattgatgctgcctcctcctccaccgcttcttcctccatctcagggatatggatcaagaaagatcgatggagacagcataaccaataaacagatcaagaagttctggagacagaagcagatcattgaagaggatcatctctattctgctattaaggctgcagctcgtgtcagagctcgtaatctctctgatgaggactacaaacgctttgaagaaagcttggacatggaggacctggaaaccgaagatcatcagggattgaaagactggtggacaaagagcaaatacgcgtacttgaaccagccggctcttggatctgcagattcactgaagagaaagaggttttcgacttatacaccaaactgtttctcgttcaagccttgcaatcctctctacgcaacttcgctcaatgtcttttgaaccatgagcagcaaactctgcaagatcaatcgtcttgcatatatgtatatatttgttcgtgtgtgtctctgtacatgtcatgtgttattgcttctatattaatggatctggactttggtgtggttgttgatttgtaactgttgaataaaatctttctatggaac

SEQ ID NO: 104895 - protein, 152 aa, Arabidopsis thaliana; identical to SEQ ID NO: 25888
  peptide (1)..(152): Ceres Seq. ID no. 13616000
  misc_feature (1)..(152): Homolog of NCBI NO: 18398508 NR Description: expressed protein [Arabidopsis thaliana] At2g17710/T17A5.17 [Arabidopsis thaliana]
  misc_feature (3)..(152): Homolog of NCBI NO: 21618216 NR Description: unknown [Arabidopsis thaliana]
  misc_feature (8)..(152): Homolog of NCBI NO: 25371275 NR Description: hypothetical protein At2g17710 [imported] -
  misc_feature (39)..(93): Homolog of NCBI NO: 38345846 NR Description: OSJNBa0084K11.10 [Oryza sativa (japonica
  misc_feature (94)..(138): Homolog of NCBI NO: 38345846 NR Description: OSJNBa0084K11.10 [Oryza sativa (japonica

SEQ ID NO: 104896 - protein, 150 aa, Arabidopsis thaliana; identical to SEQ ID NO: 25889
  peptide (1)..(150): Ceres Seq. ID no. 13616001
  misc_feature (1)..(150): Homolog of NCBI NO: 18398508 NR Description: expressed protein [Arabidopsis thaliana] At2g17710/T17A5.17 [Arabidopsis thaliana]
  misc_feature (1)..(150): Homolog of NCBI NO: 21618216 NR Description: unknown [Arabidopsis thaliana]
  misc_feature (6)..(150): Homolog of NCBI NO: 25371275 NR Description: hypothetical protein At2g17710 [imported] -
  misc_feature (37)..(91): Homolog of NCBI NO: 38345846 NR Description: OSJNBa0084K11.10 [Oryza sativa (japonica
  misc_feature (92)..(136): Homolog of NCBI NO: 38345846 NR Description: OSJNBa0084K11.10 [Oryza sativa (japonica

SEQ ID NO: 104897 - protein, 145 aa, Arabidopsis thaliana; identical to SEQ ID NO: 25890
  peptide (1)..(145): Ceres Seq. ID no. 13616002
  misc_feature (1)..(145): Homolog of NCBI NO: 18398508 NR Description: expressed protein [Arabidopsis thaliana] At2g17710/T17A5.17 [Arabidopsis thaliana]
  misc_feature (1)..(145): Homolog of NCBI NO: 21618216 NR Description: unknown [Arabidopsis thaliana]
  misc_feature (1)..(145): Homolog of NCBI NO: 25371275 NR Description: hypothetical protein At2g17710 [imported] -
  misc_feature (32)..(86): Homolog of NCBI NO: 38345846 NR Description: OSJNBa0084K11.10 [Oryza sativa (japonica
  misc_feature (87)..(131): Homolog of NCBI NO: 38345846 NR Description: OSJNBa0084K11.10 [Oryza sativa (japonica

SEQ ID NO: 104898 - DNA, 1003 bp, Arabidopsis thaliana
  misc_feature (1)..(1003): Ceres Seq. ID no. 13616003
  misc_feature: MA Experiment ID: 108469 Result: Up-regulated in Transcription
  misc_feature: MA Experiment ID: 108474 Result: Down-regulated in Transcription
  misc_feature: MA Experiment 108474 PARAMETER Experiment Name: At_Drought_Flowers_cDNA_P Parameter: Timepoint (hr) Value: null
  misc_feature: MA Experiment 108474 PARAMETER Experiment Name: At_Drought_Flowers_cDNA_P Parameter: Treatment Value: Drought vs. No Drought
  misc_feature: MA Experiment ID: 108573 Result: Up-regulated in Transcription
  misc_feature: MA Experiment 108573 PARAMETER Experiment Name: At_Drought_cDNA_P Parameter: Timepoint (hr) Value: 6
  misc_feature: MA Experiment 108573 PARAMETER Experiment Name: At_Drought_cDNA_P Parameter: Tissue Value: Aerial
  misc_feature: MA Experiment 108573 PARAMETER Experiment Name: At_Drought_cDNA_P Parameter: Treatment Value: Drought vs. No Drought
  misc_feature: MA Experiment ID: 108579 Result: Up-regulated in Transcription
  misc_feature: MA Experiment 108579 PARAMETER Experiment Name: At_4deg_Cold_cDNA_P Parameter: Temperature (deg C) Value: 4 vs. 22
  misc_feature: MA Experiment 108579 PARAMETER Experiment Name: At_4deg_Cold_cDNA_P Parameter: Timepoint (hr) Value: 6
  misc_feature: MA Experiment 108579 PARAMETER Experiment Name: At_4deg_Cold_cDNA_P Parameter: Tissue Value: Aerial
  misc_feature: MA Experiment ID: 20000173 Result: Up-regulated in Transcription
  misc_feature: MA Experiment 20000173 PARAMETER Experiment Name: At_42deg_Heat_P Parameter: Age (day) Value: 14
  misc_feature: MA Experiment 20000173 PARAMETER Experiment Name: At_42deg_Heat_P Parameter: Organism Value: A. thaliana
  misc_feature: MA Experiment 20000173 PARAMETER Experiment Name: At_42deg_Heat_P Parameter: Plant Line Value: WS
  misc_feature: MA Experiment 20000173 PARAMETER Experiment Name: At_42deg_Heat_P Parameter: Temperature (deg C) Value: 42 vs. 22
  misc_feature: MA Experiment 20000173 PARAMETER Experiment Name: At_42deg_Heat_P Parameter: Timepoint (hr) Value: 6
  misc_feature: MA Experiment 20000173 PARAMETER Experiment Name: At_42deg_Heat_P Parameter: Tissue Value: Aerial
  misc_feature: MA Experiment ID: 20000224 Result: Down-regulated in Transcription
  misc_feature: MA Experiment ID: 20000437 Result: Up-regulated in Transcription
  misc_feature: MA Experiment 20000437 PARAMETER Experiment Name: At_Drought_P Parameter: Age (day) Value: 8
  misc_feature: MA Experiment 20000437 PARAMETER Experiment Name: At_Drought_P Parameter: Organism Value: A. thaliana
  misc_feature: MA Experiment 20000437 PARAMETER Experiment Name: At_Drought_P Parameter: Plant Line Value: WS
  misc_feature: MA Experiment 20000437 PARAMETER Experiment Name: At_Drought_P Parameter: Timepoint (hr) Value: 24
  misc_feature: MA Experiment 20000437 PARAMETER Experiment Name: At_Drought_P Parameter: Tissue Value: Whole Plant
  misc_feature: MA Experiment 20000437 PARAMETER Experiment Name: At_Drought_P Parameter: Treatment Value: Drought vs. No Drought
  misc_feature: MA Experiment ID: 20001248 Result: Up-regulated in Transcription
  misc_feature: MA Experiment 20001248 PARAMETER Experiment Name: At_Far-red-induction_P Parameter: Age (day) Value: 7
  misc_feature: MA Experiment 20001248 PARAMETER Experiment Name: At_Far-red-induction_P Parameter: Light Value: Far-red vs. White
  misc_feature: MA Experiment 20001248 PARAMETER Experiment Name: At_Far-red-induction_P Parameter: Organism Value: A. thaliana
  misc_feature: MA Experiment 20001248 PARAMETER Experiment Name: At_Far-red-induction_P Parameter: Plant Line Value: Columbia
  misc_feature: MA Experiment 20001248 PARAMETER Experiment Name: At_Far-red-induction_P Parameter: Timepoint (hr) Value: 4
  misc_feature: MA Experiment 20001248 PARAMETER Experiment Name: At_Far-red-induction_P Parameter: Tissue Value: Whole Plant
caccgtaaatcgtttctgggttcttaagaataacatggcctcgtcatcatcatcatcttatagattccaatctgggtcttaccctctttcgtcaagtccttctcttgggaatttcgtcgaacgcattaaagacgcttgtcatttccttgtctctgctgttttgggtaccattatctccgcgatcttgaccttcttcttcgcactagtgggcacattgctaggggcacttacaggagctttgataggtcaagaaactgagagtggtttcattagaggagcagcaattggagccatttcgggagctgttttctctatcgaggtctttgaatcatctctggatctctggaaatccgatgagtcgggtttcggatgttttctctacttgattgatgtcattgttagtcttctaagcgggagacttgtacgagagcgcattggtcctgcaatgctaagtgcagtgcaaagtcaaatgggagctgtggatacagcttttgatgatcacacaagcctttttgatacaggaggctcaaaaggattgacaggagaccttgttgagaaaatcccaaagatgacaatcactggcaacaataacactgatgcttctgagaacacagactcatgttctgtttgtcttcaggatttccagctcggtgaaacagttagaagcttgcctcattgtcatcacatgtttcacttaccttgcatagacaattggctccttagacacggttcttgcccgatgtgtagacgtgatatttaatctcttcatctctccatcgtccgtctctcataatgcagtttaacctcgcagttcagatatttctacagctcgtacatcaagagtctgctctgctcttcttccctcctccttgagtttcatgtaaattccagttcttttggctgtttacaattacgatacctctcttactctttcagagtcattgtaggactcctagttctctaatgtacaaagaaacacaaaaatagagtttttgttttatct

SEQ ID NO: 104899 - protein, 252 aa, Arabidopsis thaliana
  peptide (1)..(252): Ceres Seq. ID no. 13616004
  misc_feature (207)..(248): Pfam Name: Zinc finger, C3HC4 type (RING finger) Pfam Description: Zinc finger, C3HC4 type (RING finger)
  misc_feature (12)..(252): Homolog of NCBI NO: 7485279 NR Description: hypothetical protein A_TM017A05.9 - Arabidopsis
  misc_feature (12)..(252): Homolog of NCBI NO: 30680091 NR Description: expressed protein [Arabidopsis thaliana]
  misc_feature (12)..(252): Homolog of NCBI NO: 26452210 NR Description: unknown protein [Arabidopsis thaliana]
  misc_feature (12)..(252): Homolog of NCBI NO: 25411815 NR Description: hypothetical protein At2g17730 [imported] -
  misc_feature (18)..(252): Homolog of NCBI NO: 26451101 NR Description: unknown protein [Arabidopsis thaliana]
  misc_feature (18)..(252): Homolog of NCBI NO: 27524902 NR Description: NEP1-interacting protein [Arabidopsis thaliana]
  misc_feature (25)..(252): Homolog of NCBI NO: 15239242 NR Description: zinc finger (C3HC4-type RING finger) protein [Arabidopsis thaliana] >gi|10177122|dbj|BAB10412.1| contains to unknown protein~gb|AAF18680.1~gene_id:K2A18.15 [Arabidopsis
  misc_feature (18)..(222): Homolog of NCBI NO: 15233363 NR Description: expressed protein [Arabidopsis thaliana]
  misc_feature (211)..(252): Homolog of NCBI NO: 15233363 NR Description: expressed protein [Arabidopsis thaliana]
  misc_feature (30)..(252): Homolog of NCBI NO: 37536572 NR Description: hypothetical protein [Oryza sativa (japonica group)] >gi|13357247|gb|AAK20044.1| hypothetical protein [Oryza
TVNRFWVLKNNMASSSSSSYRFQSGSYPLSSSPSLGNFVERIKDACHFLVSAVLGTIISAILTFFFALVGTLLGALTGALIGQETESGFIRGAAIGAISGAVFSIEVFESSLDLWKSDESGFGCFLYLIDVIVSLLSGRLVRERIGPAMLSAVQSQMGAVDTAFDDHTSLFDTGGSKGLTGDLVEKIPKMTITGNNNTDASENTDSCSVCLQDFQLGETVRSLPHCHHMFHLPCIDNWLLRHGSCPMCRRDI

SEQ ID NO: 104900 - protein, 241 aa, Arabidopsis thaliana; identical to SEQ ID NO: 22201
  peptide (1)..(241): Ceres Seq. ID no. 13616005
  misc_feature (196)..(237): Pfam Name: Zinc finger, C3HC4 type (RING finger) Pfam Description: Zinc finger, C3HC4 type (RING finger)
  misc_feature (1)..(241): Homolog of NCBI NO: 7485279 NR Description: hypothetical protein A_TM017A05.9 - Arabidopsis
  misc_feature (1)..(241): Homolog of NCBI NO: 30680091 NR Description: expressed protein [Arabidopsis thaliana]
  misc_feature (1)..(241): Homolog of NCBI NO: 26452210 NR Description: unknown protein [Arabidopsis thaliana]
  misc_feature (1)..(241): Homolog of NCBI NO: 25411815 NR Description: hypothetical protein At2g17730 [imported] -
  misc_feature (7)..(241): Homolog of NCBI NO: 26451101 NR Description: unknown protein [Arabidopsis thaliana]
  misc_feature (7)..(241): Homolog of NCBI NO: 27524902 NR Description: NEP1-interacting protein [Arabidopsis thaliana]
  misc_feature (14)..(241): Homolog of NCBI NO: 15239242 NR Description: zinc finger (C3HC4-type RING finger) protein [Arabidopsis thaliana] >gi|10177122|dbj|BAB10412.1| contains to unknown protein~gb|AAF18680.1~gene_id:K2A18.15 [Arabidopsis
  misc_feature (7)..(211): Homolog of NCBI NO: 15233363 NR Description: expressed protein [Arabidopsis thaliana]
  misc_feature (200)..(241): Homolog of NCBI NO: 15233363 NR Description: expressed protein [Arabidopsis thaliana]
  misc_feature (19)..(241): Homolog of NCBI NO: 37536572 NR Description: hypothetical protein [Oryza sativa (japonica group)] >gi|13357247|gb|AAK20044.1| hypothetical protein [Oryza

SEQ ID NO: 104901 - DNA, 1327 bp, Arabidopsis thaliana
  misc_feature (1)..(1327): Ceres Seq. ID no. 13616018
  misc_feature: MA Experiment ID: 108461 Result: Down-regulated in Transcription
  misc_feature: MA Experiment 108461 PARAMETER Experiment Name: At_Germinating_Seeds_cDNA_P Parameter: Age (day) Value: 1 vs. 0
  misc_feature: MA Experiment 108461 PARAMETER Experiment Name: At_Germinating_Seeds_cDNA_P Parameter: Tissue Value: Germinating Seeds
  misc_feature: MA Experiment ID: 108462 Result: Down-regulated in Transcription
  misc_feature: MA Experiment 108462 PARAMETER Experiment Name: At_Germinating_Seeds_cDNA_P Parameter: Age (day) Value: 2 vs. 0
  misc_feature: MA Experiment 108462 PARAMETER Experiment Name: At_Germinating_Seeds_cDNA_P Parameter: Tissue Value: Germinating Seeds
  misc_feature: MA Experiment ID: 108463 Result: Down-regulated in Transcription
  misc_feature: MA Experiment 108463 PARAMETER Experiment Name: At_Germinating_Seeds_cDNA_P Parameter: Age (day) Value: 3 vs. 0
  misc_feature: MA Experiment 108463 PARAMETER Experiment Name: At_Germinating_Seeds_cDNA_P Parameter: Tissue Value: Germinating Seeds
  misc_feature: MA Experiment ID: 108464 Result: Down-regulated in Transcription
  misc_feature: MA Experiment 108464 PARAMETER Experiment Name: At_Germinating_Seeds_cDNA_P Parameter: Age (day) Value: 4 vs. 0
  misc_feature: MA Experiment 108464 PARAMETER Experiment Name: At_Germinating_Seeds_cDNA_P Parameter: Tissue Value: Germinating Seeds
  misc_feature: MA Experiment ID: 20000112 Result: Up-regulated in Transcription
  misc_feature: MA Experiment 20000112 PARAMETER Experiment Name: At_42deg_Heat_cDNA_P Parameter: Temperature (deg C) Value: 42 vs. 22
  misc_feature: MA Experiment 20000112 PARAMETER Experiment Name: At_42deg_Heat_cDNA_P Parameter: Timepoint (hr) Value: 2
  misc_feature: MA Experiment 20000112 PARAMETER Experiment Name: At_42deg_Heat_cDNA_P Parameter: Tissue Value: Aerial
  misc_feature: MA Experiment ID: 20000180 Result: Down-regulated in Transcription
  misc_feature: MA Experiment 20000180 PARAMETER Experiment Name: At_Germinating_Seeds_P Parameter: Age (hr) Value: 24 vs. 0
  misc_feature: MA Experiment 20000180 PARAMETER Experiment Name: At_Germinating_Seeds_P Parameter: Tissue Value: Germinating Seeds
  misc_feature: MA Experiment ID: 20000224 Result: Down-regulated in Transcription
  misc_feature: MA Experiment ID: 20000495 Result: Down-regulated in Transcription
  misc_feature: MA Experiment 20000495 PARAMETER Experiment Name: At_Guard_Cells_P Parameter: Harvest Date Value: 8/2/2002
  misc_feature: MA Experiment 20000495 PARAMETER Experiment Name: At_Guard_Cells_P Parameter: Organism Value: A. thaliana
  misc_feature: MA Experiment 20000495 PARAMETER Experiment Name: At_Guard_Cells_P Parameter: Tissue Value: Guard Cells vs. Leaves
  misc_feature: MA Experiment ID: 20001557 Result: Up-regulated in Transcription
  misc_feature: MA Experiment 20001557 PARAMETER Experiment Name: At_Drought_Soil_Dry_P Parameter: Age (day) Value: 27
  misc_feature: MA Experiment 20001557 PARAMETER Experiment Name: At_Drought_Soil_Dry_P Parameter: Organism Value: A. thaliana
  misc_feature: MA Experiment 20001557 PARAMETER Experiment Name: At_Drought_Soil_Dry_P Parameter: Plant Line Value: WS
  misc_feature: MA Experiment 20001557 PARAMETER Experiment Name: At_Drought_Soil_Dry_P Parameter: Post Timepoint (hr) Value: 3
  misc_feature: MA Experiment 20001557 PARAMETER Experiment Name: At_Drought_Soil_Dry_P Parameter: Post-Treatment Value: Re-Water vs. No Drought
  misc_feature: MA Experiment 20001557 PARAMETER Experiment Name: At_Drought_Soil_Dry_P Parameter: Timepoint (day) Value: 13
  misc_feature: MA Experiment 20001557 PARAMETER Experiment Name: At_Drought_Soil_Dry_P Parameter: Treatment Value: Drought vs. No Drought
atgggcctgatccaaaatgcacacgtggtaactgccgccgatagagaaggagctgacgtggcgaatttaaggtcaatttgggatctagcaagtagcaatttagggttttcattttacccatttcctctctttgtacgaacaaagtgcttcgagtttttgttaacctttttctctgatctaatggcgatggaagatcaatcggcggcgagatctatcggaaaagttagttggtttagcgatggaaaaggctacggtttcattactcccgatgatggcggcgaagagctttttgttcatcaatcctcaattgtctccgatggattccgtagcttgactcttggtgaatcggttgaatacgaaatcgcgcttggaagcgacggaaagactaaggccattgaagttactgctcccggcggcggttcacttaataagaaggaaaacagctcccgtggatccggaggtaattgttttaattgcggtgaggttggtcatatggctaaggattgtgacggtggaagtggtgggaaaagctttggaggtggtggtggtcgtagatctggcggcgaaggtgaatgttacatgtgtggtgatgtgggacacttcgctagggattgtaggcaaagcggtggtggaaacagcggcggaggaggaggaggtggtcgtccgtgttacagttgcggtgaggttggtcatttggcaaaggattgtcgtggtggttctggtggaaacagatacggaggaggtggtggtcgtggatctggcggtgatggatgctacatgtgtggtggtgtgggacatttcgctagggattgtaggcaaaacggcggtggaaacgttggaggtggtggaagcacttgttatacctgtggcggagttggccacattgcgaaagtttgcaccagcaagataccttctggtggtggtggtggtggtcgtgcttgttacgaatgtggaggaactggccatttggctcgtgactgtgatcggagaggaagtggaagcagcggaggtggcggtggcagtaacaagtgcttcatctgcggcaaggaaggtcactttgcgagggaatgtacttcggttgcttaacaaaaagatgcaaagaagaagagtaatgttcataaacctcttttgttttctattaaaatctacctaatgctcctttttggtgactataatgtgattgctaaagtcgtttaggatgtttaagaatggttgttttgggagtttttgatctctctatattactcttttgactggtttatgcaacctgttcactgcttttgttgatgccataagtttgagatcttgaatgatatgtgtgcttgct

SEQ ID NO: 104902 - protein, 361 aa, Arabidopsis thaliana
  peptide (1)..(361): Ceres Seq. ID no. 13616019
  misc_feature (70)..(137): Pfam Name: 'Cold-shock' DNA-binding domain Pfam Description: 'Cold-shock' DNA-binding domain
  misc_feature (61)..(361): Homolog of NCBI NO: 18398546 NR Description: glycine-rich, zinc-finger DNA-binding protein
  misc_feature (63)..(361): Homolog of NCBI NO: 7442089 NR Description: glycine-rich protein T13L16.11 - Arabidopsis
  misc_feature (61)..(361): Homolog of NCBI NO: 15233440 NR Description: glycine-rich protein [Arabidopsis thaliana]
  misc_feature (73)..(302): Homolog of NCBI NO: 21322752 NR Description: cold shock protein-1 [Triticum aestivum]
  misc_feature (63)..(275): Homolog of NCBI NO: 121631 NR Description: Glycine-rich protein 2 >gi|72323|pir||KNNT2S
  misc_feature (73)..(271): Homolog of NCBI NO: 40363759 NR Description: putative glycine-rich protein [Triticum aestivum]
  misc_feature (61)..(275): Homolog of NCBI NO: 15234010 NR Description: glycine-rich protein 2 (GRP2) [Arabidopsis
  misc_feature (140)..(359): Homolog of NCBI NO: 729704 NR Description: DNA-binding protein HEXBP (Hexamer-binding
  misc_feature (67)..(271): Homolog of NCBI NO: 29467522 NR Description: P0582D05.12 [Oryza sativa (japonica
  misc_feature (146)..(357): Homolog of NCBI NO: 729704 NR Description: DNA-binding protein HEXBP (Hexamer-binding
MGLIQNAHVVTAADREGADVANLRSIWDLASSNLGFSFYPFPLFVRTKCFEFLLTFFSDLMAMEDQSAARSIGKVSWFSDGKGYGFITPDDGGEELFVHQSSIVSDGFRSLTLGESVEYEIALGSDGKTKAIEVTAPGGGSLNKKENSSRGSGGNCFNCGEVGHMAKDCDGGSGGKSFGGGGGRRSGGEGECYMCGDVGHFARDCRQSGGGNSGGGGGGGRPCYSCGEVGHLAKDCRGGSGGNRYGGGGGRGSGGDGCYMCGGVGHFARDCRQNGGGNVGGGGSTCYTCGGVGHIAKVCTSKIPSGGGGGGRACYECGGTGHLARDCDRRGSGSSGGGGGSNKCFICGKEGHFARECTSVA

SEQ ID NO: 104903 - protein, 301 aa, Arabidopsis thaliana; identical to SEQ ID NO: 35707
  peptide (1)..(301): Ceres Seq. ID no. 13616020
  misc_feature (10)..(77): Pfam Name: 'Cold-shock' DNA-binding domain Pfam Description: 'Cold-shock' DNA-binding domain
  misc_feature (1)..(301): Homolog of NCBI NO: 18398546 NR Description: glycine-rich, zinc-finger DNA-binding protein
  misc_feature (3)..(301): Homolog of NCBI NO: 7442089 NR Description: glycine-rich protein T13L16.11 - Arabidopsis
  misc_feature (1)..(301): Homolog of NCBI NO: 15233440 NR Description: glycine-rich protein [Arabidopsis thaliana]
  misc_feature (13)..(242): Homolog of NCBI NO: 21322752 NR Description: cold shock protein-1 [Triticum aestivum]
  misc_feature (3)..(215): Homolog of NCBI NO: 121631 NR Description: Glycine-rich protein 2 >gi|72323|pir||KNNT2S
  misc_feature (13)..(211): Homolog of NCBI NO: 40363759 NR Description: putative glycine-rich protein [Triticum aestivum]
  misc_feature (1)..(215): Homolog of NCBI NO: 15234010 NR Description: glycine-rich protein 2 (GRP2) [Arabidopsis
  misc_feature (80)..(299): Homolog of NCBI NO: 729704 NR Description: DNA-binding protein HEXBP (Hexamer-binding
  misc_feature (7)..(211): Homolog of NCBI NO: 29467522 NR Description: P0582D05.12 [Oryza sativa (japonica
  misc_feature (86)..(297): Homolog of NCBI NO: 729704 NR Description: DNA-binding protein HEXBP (Hexamer-binding

SEQ ID NO: 104904 - protein, 299 aa, Arabidopsis thaliana; identical to SEQ ID NO: 35708
  peptide (1)..(299): Ceres Seq. ID no. 13616021
  misc_feature (8)..(75): Pfam Name: 'Cold-shock' DNA-binding domain Pfam Description: 'Cold-shock' DNA-binding domain
  misc_feature (1)..(299): Homolog of NCBI NO: 18398546 NR Description: glycine-rich, zinc-finger DNA-binding protein
  misc_feature (1)..(299): Homolog of NCBI NO: 7442089 NR Description: glycine-rich protein T13L16.11 - Arabidopsis
  misc_feature (1)..(299): Homolog of NCBI NO: 15233440 NR Description: glycine-rich protein [Arabidopsis thaliana]
  misc_feature (11)..(240): Homolog of NCBI NO: 21322752 NR Description: cold shock protein-1 [Triticum aestivum]
  misc_feature (1)..(213): Homolog of NCBI NO: 121631 NR Description: Glycine-rich protein 2 >gi|72323|pir||KNNT2S
  misc_feature (11)..(209): Homolog of NCBI NO: 40363759 NR Description: putative glycine-rich protein [Triticum aestivum]
  misc_feature (1)..(213): Homolog of NCBI NO: 15234010 NR Description: glycine-rich protein 2 (GRP2) [Arabidopsis
  misc_feature (78)..(297): Homolog of NCBI NO: 729704 NR Description: DNA-binding protein HEXBP (Hexamer-binding
  misc_feature (5)..(209): Homolog of NCBI NO: 29467522 NR Description: P0582D05.12 [Oryza sativa (japonica
  misc_feature (84)..(295): Homolog of NCBI NO: 729704 NR Description: DNA-binding protein HEXBP (Hexamer-binding

SEQ ID NO: 104905 - DNA, 967 bp, Arabidopsis thaliana
  misc_feature (1)..(967): Ceres Seq. ID no. 13616022
  misc_feature: MA Experiment ID: 108462 Result: Up-regulated in Transcription
  misc_feature: MA Experiment 108462 PARAMETER Experiment Name: At_Germinating_Seeds_cDNA_P Parameter: Age (day) Value: 2 vs. 0
  misc_feature: MA Experiment 108462 PARAMETER Experiment Name: At_Germinating_Seeds_cDNA_P Parameter: Tissue Value: Germinating Seeds
  misc_feature: MA Experiment ID: 108463 Result: Up-regulated in Transcription
  misc_feature: MA Experiment 108463 PARAMETER Experiment Name: At_Germinating_Seeds_cDNA_P Parameter: Age (day) Value: 3 vs. 0
  misc_feature: MA Experiment 108463 PARAMETER Experiment Name: At_Germinating_Seeds_cDNA_P Parameter: Tissue Value: Germinating Seeds
  misc_feature: MA Experiment ID: 108464 Result: Up-regulated in Transcription
  misc_feature: MA Experiment 108464 PARAMETER Experiment Name: At_Germinating_Seeds_cDNA_P Parameter: Age (day) Value: 4 vs. 0
  misc_feature: MA Experiment 108464 PARAMETER Experiment Name: At_Germinating_Seeds_cDNA_P Parameter: Tissue Value: Germinating Seeds
  misc_feature: MA Experiment ID: 108501 Result: Down-regulated in Transcription
  misc_feature: MA Experiment 108501 PARAMETER Experiment Name: At_ap2_floral_buds_cDNA_P Parameter: Plant Line Value: ap2 (Ler.)
  misc_feature: MA Experiment 108501 PARAMETER Experiment Name: At_ap2_floral_buds_cDNA_P Parameter: Tissue Value: Closed Flower
  misc_feature: MA Experiment ID: 108574 Result: Down-regulated in Transcription
  misc_feature: MA Experiment 108574 PARAMETER Experiment Name: At_Wounding__cDNA_P Parameter: Timepoint (hr) Value: 1
  misc_feature: MA Experiment 108574 PARAMETER Experiment Name: At_Wounding__cDNA_P Parameter: Tissue Value: Aerial
  misc_feature: MA Experiment 108574 PARAMETER Experiment Name: At_Wounding__cDNA_P Parameter: Treatment Value: Wounding vs. No Wounding
  misc_feature: MA Experiment ID: 108585 Result: Up-regulated in Transcription
  misc_feature: MA Experiment 108585 PARAMETER Experiment Name: At_5mM_NaNP_cDNA_P Parameter: Timepoint (hr) Value: 6
  misc_feature: MA Experiment 108585 PARAMETER Experiment Name: At_5mM_NaNP_cDNA_P Parameter: Tissue Value: Aerial
  misc_feature: MA Experiment 108585 PARAMETER Experiment Name: At_5mM_NaNP_cDNA_P Parameter: Treatment Value: null
  misc_feature: MA Experiment ID: 108594 Result: Up-regulated in Transcription
  misc_feature: MA Experiment 108594 PARAMETER Experiment Name: At_Ler-rhl_Root_cDNA_P Parameter: Plant Line Value: null
  misc_feature: MA Experiment ID: 108595 Result: Down-regulated in Transcription
  misc_feature: MA Experiment 108595 PARAMETER Experiment Name: At_Ler-pi_Ovule_cDNA_P Parameter: Plant Line Value: null
  misc_feature: MA Experiment ID: 20000144 Result: Down-regulated in Transcription
  misc_feature: MA Experiment 20000144 PARAMETER Experiment Name: At_42deg_Heat_cDNA_P Parameter: Temperature (deg C) Value: 42 vs. 22
  misc_feature: MA Experiment 20000144 PARAMETER Experiment Name: At_42deg_Heat_cDNA_P Parameter: Timepoint (hr) Value: 1
  misc_feature: MA Experiment 20000144 PARAMETER Experiment Name: At_42deg_Heat_cDNA_P Parameter: Tissue Value: Aerial
  misc_feature: MA Experiment ID: 20000173 Result: Down-regulated in Transcription
  misc_feature: MA Experiment 20000173 PARAMETER Experiment Name: At_42deg_Heat_P Parameter: Age (day) Value: 14
  misc_feature: MA Experiment 20000173 PARAMETER Experiment Name: At_42deg_Heat_P Parameter: Organism Value: A. thaliana
  misc_feature: MA Experiment 20000173 PARAMETER Experiment Name: At_42deg_Heat_P Parameter: Plant Line Value: WS
  misc_feature: MA Experiment 20000173 PARAMETER Experiment Name: At_42deg_Heat_P Parameter: Temperature (deg C) Value: 42 vs. 22
  misc_feature: MA Experiment 20000173 PARAMETER Experiment Name: At_42deg_Heat_P Parameter: Timepoint (hr) Value: 6
  misc_feature: MA Experiment 20000173 PARAMETER Experiment Name: At_42deg_Heat_P Parameter: Tissue Value: Aerial
  misc_feature: MA Experiment ID: 20000180 Result: Up-regulated in Transcription
  misc_feature: MA Experiment 20000180 PARAMETER Experiment Name: At_Germinating_Seeds_P Parameter: Age (hr) Value: 24 vs. 0
  misc_feature: MA Experiment 20000180 PARAMETER Experiment Name: At_Germinating_Seeds_P Parameter: Tissue Value: Germinating Seeds
  misc_feature: MA Experiment ID: 20000185 Result: Down-regulated in Transcription
  misc_feature: MA Experiment 20000185 PARAMETER Experiment Name: At_Roots__P Parameter: Age (day) Value: 7 vs. 21
  misc_feature: MA Experiment 20000185 PARAMETER Experiment Name: At_Roots__P Parameter: Organism Value: A. thaliana
  misc_feature: MA Experiment 20000185 PARAMETER Experiment Name: At_Roots__P Parameter: Tissue Value: Roots vs. Whole Plant
  misc_feature: MA Experiment ID: 20000213 Result: Down-regulated in Transcription
  misc_feature: MA Experiment 20000213 PARAMETER Experiment Name: At_4deg_Cold_P Parameter: Timepoint (hr) Value: 2
  misc_feature: MA Experiment ID: 20000224 Result: Down-regulated in Transcription
  misc_feature: MA Experiment ID: 20000234 Result: Down-regulated in Transcription
  misc_feature: MA Experiment 20000234 PARAMETER Experiment Name: At_Siliques_P Parameter: Age (day) Value: 21
  misc_feature: MA Experiment 20000234 PARAMETER Experiment Name: At_Siliques_P Parameter: Organism Value: A. thaliana
  misc_feature: MA Experiment 20000234 PARAMETER Experiment Name: At_Siliques_P Parameter: Plant Line Value: WS
  misc_feature: MA Experiment 20000234 PARAMETER Experiment Name: At_Siliques_P Parameter: Tissue Value: Less Than 5mm Siliques vs. Whole Plant
  misc_feature: MA Experiment ID: 20000264 Result: Up-regulated in Transcription
  misc_feature: MA Experiment 20000264 PARAMETER Experiment Name: At_Open_Flower_P Parameter: Age (day) Value: 21
  misc_feature: MA Experiment 20000264 PARAMETER Experiment Name: At_Open_Flower_P Parameter: Plant Line Value: WS
  misc_feature: MA Experiment 20000264 PARAMETER Experiment Name: At_Open_Flower_P Parameter: Tissue Value: Open Flower vs. Whole Plant
  misc_feature: MA Experiment ID: 20000268 Result: Down-regulated in Transcription
  misc_feature: MA Experiment 20000268 PARAMETER Experiment Name: At_100mM_NaCl__P Parameter: Age (day) Value: 14
  misc_feature: MA Experiment 20000268 PARAMETER Experiment Name: At_100mM_NaCl__P Parameter: Organism Value: A. thaliana
  misc_feature: MA Experiment 20000268 PARAMETER Experiment Name: At_100mM_NaCl__P Parameter: Plant Line Value: WS
  misc_feature: MA Experiment 20000268 PARAMETER Experiment Name: At_100mM_NaCl__P Parameter: Timepoint (hr) Value: 6
  misc_feature: MA Experiment 20000268 PARAMETER Experiment Name: At_100mM_NaCl__P Parameter: Tissue Value: Whole Plant
  misc_feature: MA Experiment 20000268 PARAMETER Experiment Name: At_100mM_NaCl__P Parameter: Treatment Value: 100mM NaCl vs. No Treatment
  misc_feature: MA Experiment ID: 20000286 Result: Up-regulated in Transcription
  misc_feature: MA Experiment 20000286 PARAMETER Experiment Name: At_Open_Flower_P Parameter: Age (day) Value: 21
  misc_feature: MA Experiment 20000286 PARAMETER Experiment Name: At_Open_Flower_P Parameter: Plant Line Value: WS
  misc_feature: MA Experiment 20000286 PARAMETER Experiment Name: At_Open_Flower_P Parameter: Tissue Value: Half Open vs. Whole Plant
  misc_feature: MA Experiment ID: 20000308 Result: Down-regulated in Transcription
  misc_feature: MA Experiment 20000308 PARAMETER Experiment Name: At_100mM_NaCl__P Parameter: Age (day) Value: 17
  misc_feature: MA Experiment 20000308 PARAMETER Experiment Name: At_100mM_NaCl__P Parameter: Organism Value: A. thaliana
  misc_feature: MA Experiment 20000308 PARAMETER Experiment Name: At_100mM_NaCl__P Parameter: Plant Line Value: WS
  misc_feature: MA Experiment 20000308 PARAMETER Experiment Name: At_100mM_NaCl__P Parameter: Timepoint (hr) Value: 72
  misc_feature: MA Experiment 20000308 PARAMETER Experiment Name: At_100mM_NaCl__P Parameter: Tissue Value: Whole Plant
  misc_feature: MA Experiment 20000308 PARAMETER Experiment Name: At_100mM_NaCl__P Parameter: Treatment Value: 100mM NaCl vs. No Treatment
  misc_feature: MA Experiment ID: 20000437 Result: Down-regulated in Transcription
  misc_feature: MA Experiment 20000437 PARAMETER Experiment Name: At_Drought_P Parameter: Age (day) Value: 8
  misc_feature: MA Experiment 20000437 PARAMETER Experiment Name: At_Drought_P Parameter: Organism Value: A. thaliana
  misc_feature: MA Experiment 20000437 PARAMETER Experiment Name: At_Drought_P Parameter: Plant Line Value: WS
  misc_feature: MA Experiment 20000437 PARAMETER Experiment Name: At_Drought_P Parameter: Timepoint (hr) Value: 24
  misc_feature: MA Experiment 20000437 PARAMETER Experiment Name: At_Drought_P Parameter: Tissue Value: Whole Plant
  misc_feature: MA Experiment 20000437 PARAMETER Experiment Name: At_Drought_P Parameter: Treatment Value: Drought vs. No Drought
  misc_feature: MA Experiment ID: 20000439 Result: Down-regulated in Transcription
  misc_feature: MA Experiment 20000439 PARAMETER Experiment Name: At_Roots__P Parameter: Age (day) Value: 14 vs. 21
  misc_feature: MA Experiment 20000439 PARAMETER Experiment Name: At_Roots__P Parameter: Organism Value: A. thaliana
  misc_feature: MA Experiment 20000439 PARAMETER Experiment Name: At_Roots__P Parameter: Tissue Value: Roots vs. Whole Plant
  misc_feature: MA Experiment ID: 20000452 Result: Down-regulated in Transcription
  misc_feature: MA Experiment 20000452 PARAMETER Experiment Name: At_CS6879_Shoots-Roots_P Parameter: Age (day) Value: 14
  misc_feature: MA Experiment 20000452 PARAMETER Experiment Name: At_CS6879_Shoots-Roots_P Parameter: Organism Value: A. thaliana
  misc_feature: MA Experiment 20000452 PARAMETER Experiment Name: At_CS6879_Shoots-Roots_P Parameter: Plant Line Value: CS6879 vs. WS
  misc_feature: MA Experiment 20000452 PARAMETER Experiment Name: At_CS6879_Shoots-Roots_P Parameter: Tissue Value: Shoots
  misc_feature: MA Experiment ID: 20000794 Result: Up-regulated in Transcription
  misc_feature: MA Experiment 20000794 PARAMETER Experiment Name: At_Petals_P Parameter: Age (day) Value: 23-25 days
  misc_feature: MA Experiment 20000794 PARAMETER Experiment Name: At_Petals_P Parameter: Plant Line Value: WS
  misc_feature: MA Experiment 20000794 PARAMETER Experiment Name: At_Petals_P Parameter: Tissue Value: Petals vs. Whole plant
  misc_feature: MA Experiment ID: 20001247 Result: Up-regulated in Transcription
  misc_feature: MA Experiment 20001247 PARAMETER Experiment Name: At_Far-red-induction_P Parameter: Age (day) Value: 7
  misc_feature: MA Experiment 20001247 PARAMETER Experiment Name: At_Far-red-induction_P Parameter: Light Value: Far-red vs. White
  misc_feature: MA Experiment 20001247 PARAMETER Experiment Name: At_Far-red-induction_P Parameter: Organism Value: A. thaliana
  misc_feature: MA Experiment 20001247 PARAMETER Experiment Name: At_Far-red-induction_P Parameter: Plant Line Value: Columbia
  misc_feature: MA Experiment 20001247 PARAMETER Experiment Name: At_Far-red-induction_P Parameter: Timepoint (hr) Value: 1
  misc_feature: MA Experiment 20001247 PARAMETER Experiment Name: At_Far-red-induction_P Parameter: Tissue Value: Whole Plant
  misc_feature: MA Experiment ID: 20001248 Result: Up-regulated in Transcription
  misc_feature: MA Experiment 20001248 PARAMETER Experiment Name: At_Far-red-induction_P Parameter: Age (day) Value: 7
  misc_feature: MA Experiment 20001248 PARAMETER Experiment Name: At_Far-red-induction_P Parameter: Light Value: Far-red vs. White
  misc_feature: MA Experiment 20001248 PARAMETER Experiment Name: At_Far-red-induction_P Parameter: Organism Value: A. thaliana
  misc_feature: MA Experiment 20001248 PARAMETER Experiment Name: At_Far-red-induction_P Parameter: Plant Line Value: Columbia
  misc_feature: MA Experiment 20001248 PARAMETER Experiment Name: At_Far-red-induction_P Parameter: Timepoint (hr) Value: 4
  misc_feature: MA Experiment 20001248 PARAMETER Experiment Name: At_Far-red-induction_P Parameter: Tissue Value: Whole Plant
  misc_feature: MA Experiment ID: 20001450 Result: Up-regulated in Transcription
  misc_feature: MA Experiment 20001450 PARAMETER Experiment Name: At_Far-red-induction_P Parameter: Age (day) Value: 7
  misc_feature: MA Experiment 20001450 PARAMETER Experiment Name: At_Far-red-induction_P Parameter: Light Value: Far-red vs. White
  misc_feature: MA Experiment 20001450 PARAMETER Experiment Name: At_Far-red-induction_P Parameter: Organism Value: A. thaliana
  misc_feature: MA Experiment 20001450 PARAMETER Experiment Name: At_Far-red-induction_P Parameter: Plant Line Value: Columbia
  misc_feature: MA Experiment 20001450 PARAMETER Experiment Name: At_Far-red-induction_P Parameter: Timepoint (hr) Value: 8
  misc_feature: MA Experiment 20001450 PARAMETER Experiment Name: At_Far-red-induction_P Parameter: Tissue Value: Whole Plant
  misc_feature: MA Experiment ID: 20001451 Result: Up-regulated in Transcription
  misc_feature: MA Experiment 20001451 PARAMETER Experiment Name: At_Far-red-induction_P Parameter: Age (day) Value: 7
  misc_feature: MA Experiment 20001451 PARAMETER Experiment Name: At_Far-red-induction_P Parameter: Light Value: Far-red vs. White
  misc_feature: MA Experiment 20001451 PARAMETER Experiment Name: At_Far-red-induction_P Parameter: Organism Value: A. thaliana
  misc_feature: MA Experiment 20001451 PARAMETER Experiment Name: At_Far-red-induction_P Parameter: Plant Line Value: Columbia
  misc_feature: MA Experiment 20001451 PARAMETER Experiment Name: At_Far-red-induction_P Parameter: Timepoint (hr) Value: 24
  misc_feature: MA Experiment 20001451 PARAMETER Experiment Name: At_Far-red-induction_P Parameter: Tissue Value: Whole Plant
  misc_feature: MA Experiment ID: 20001554 Result: Down-regulated in Transcription
  misc_feature: MA Experiment 20001554 PARAMETER Experiment Name: At_Drought_Soil_Dry_P Parameter: Age (day) Value: 21
  misc_feature: MA Experiment 20001554 PARAMETER Experiment Name: At_Drought_Soil_Dry_P Parameter: Organism Value: A. thaliana
  misc_feature: MA Experiment 20001554 PARAMETER Experiment Name: At_Drought_Soil_Dry_P Parameter: Plant Line Value: WS
  misc_feature: MA Experiment 20001554 PARAMETER Experiment Name: At_Drought_Soil_Dry_P Parameter: Post Timepoint (hr) Value: None
  misc_feature: MA Experiment 20001554 PARAMETER Experiment Name: At_Drought_Soil_Dry_P Parameter: Post-Treatment Value: None
  misc_feature: MA Experiment 20001554 PARAMETER Experiment Name: At_Drought_Soil_Dry_P Parameter: Timepoint (day) Value: 7
  misc_feature: MA Experiment 20001554 PARAMETER Experiment Name: At_Drought_Soil_Dry_P Parameter: Treatment Value: Drought vs. No Drought
  misc_feature: MA Experiment ID: 20001555 Result: Down-regulated in Transcription
  misc_feature: MA Experiment 20001555 PARAMETER Experiment Name: At_Drought_Soil_Dry_P Parameter: Age (day) Value: 24
  misc_feature: MA Experiment 20001555 PARAMETER Experiment Name: At_Drought_Soil_Dry_P Parameter: Organism Value: A. thaliana
  misc_feature: MA Experiment 20001555 PARAMETER Experiment Name: At_Drought_Soil_Dry_P Parameter: Plant Line Value: WS
  misc_feature: MA Experiment 20001555 PARAMETER Experiment Name: At_Drought_Soil_Dry_P Parameter: Post Timepoint (hr) Value: None
  misc_feature: MA Experiment 20001555 PARAMETER Experiment Name: At_Drought_Soil_Dry_P Parameter: Post-Treatment Value: None
  misc_feature: MA Experiment 20001555 PARAMETER Experiment Name: At_Drought_Soil_Dry_P Parameter: Timepoint (day) Value: 10
  misc_feature: MA Experiment 20001555 PARAMETER Experiment Name: At_Drought_Soil_Dry_P Parameter: Treatment Value: Drought vs. No Drought
  misc_feature: MA Experiment ID: 20001556 Result: Down-regulated in Transcription
  misc_feature: MA Experiment 20001556 PARAMETER Experiment Name: At_Drought_Soil_Dry_P Parameter: Age (day) Value: 26
  misc_feature: MA Experiment 20001556 PARAMETER Experiment Name: At_Drought_Soil_Dry_P Parameter: Organism Value: A. thaliana
  misc_feature: MA Experiment 20001556 PARAMETER Experiment Name: At_Drought_Soil_Dry_P Parameter: Plant Line Value: WS
  misc_feature: MA Experiment 20001556 PARAMETER Experiment Name: At_Drought_Soil_Dry_P Parameter: Post Timepoint (hr) Value: None
  misc_feature: MA Experiment 20001556 PARAMETER Experiment Name: At_Drought_Soil_Dry_P Parameter: Post-Treatment Value: None
  misc_feature: MA Experiment 20001556 PARAMETER Experiment Name: At_Drought_Soil_Dry_P Parameter: Timepoint (day) Value: 12
  misc_feature: MA Experiment 20001556 PARAMETER Experiment Name: At_Drought_Soil_Dry_P Parameter: Treatment Value: Drought vs. No Drought
  misc_feature: MA Experiment ID: 20001557 Result: Down-regulated in Transcription
  misc_feature: MA Experiment 20001557 PARAMETER Experiment Name: At_Drought_Soil_Dry_P Parameter: Age (day) Value: 27
  misc_feature: MA Experiment 20001557 PARAMETER Experiment Name: At_Drought_Soil_Dry_P Parameter: Organism Value: A. thaliana
  misc_feature: MA Experiment 20001557 PARAMETER Experiment Name: At_Drought_Soil_Dry_P Parameter: Plant Line Value: WS
  misc_feature: MA Experiment 20001557 PARAMETER Experiment Name: At_Drought_Soil_Dry_P Parameter: Post Timepoint (hr) Value: 3
  misc_feature: MA Experiment 20001557 PARAMETER Experiment Name: At_Drought_Soil_Dry_P Parameter: Post-Treatment Value: Re-Water vs. No Drought
  misc_feature: MA Experiment 20001557 PARAMETER Experiment Name: At_Drought_Soil_Dry_P Parameter: Timepoint (day) Value: 13
  misc_feature: MA Experiment 20001557 PARAMETER Experiment Name: At_Drought_Soil_Dry_P Parameter: Treatment Value: Drought vs. No Drought
  misc_feature: MA Experiment ID: 20001558 Result: Down-regulated in Transcription
  misc_feature: MA Experiment 20001558 PARAMETER Experiment Name: At_Drought_Soil_Dry_P Parameter: Age (day) Value: 27
  misc_feature: MA Experiment 20001558 PARAMETER Experiment Name: At_Drought_Soil_Dry_P Parameter: Organism Value: A. thaliana
  misc_feature: MA Experiment 20001558 PARAMETER Experiment Name: At_Drought_Soil_Dry_P Parameter: Plant Line Value: WS
  misc_feature: MA Experiment 20001558 PARAMETER Experiment Name: At_Drought_Soil_Dry_P Parameter: Post Timepoint (hr) Value: 6
  misc_feature: MA Experiment 20001558 PARAMETER Experiment Name: At_Drought_Soil_Dry_P Parameter: Post-Treatment Value: Re-Water vs. No Drought
  misc_feature: MA Experiment 20001558 PARAMETER Experiment Name: At_Drought_Soil_Dry_P Parameter: Timepoint (day) Value: 13
  misc_feature: MA Experiment 20001558 PARAMETER Experiment Name: At_Drought_Soil_Dry_P Parameter: Treatment Value: Drought vs. No Drought
  misc_feature: MA Experiment ID: 20001904 Result: Down-regulated in Transcription
  misc_feature: MA Experiment 20001904 PARAMETER Experiment Name: At_Drought_Reproduction_P Parameter: Age (day) Value: 37
  misc_feature: MA Experiment 20001904 PARAMETER Experiment Name: At_Drought_Reproduction_P Parameter: Organism Value: A. thaliana
  misc_feature: MA Experiment 20001904 PARAMETER Experiment Name: At_Drought_Reproduction_P Parameter: Plant Line Value: WS
  misc_feature: MA Experiment 20001904 PARAMETER Experiment Name: At_Drought_Reproduction_P Parameter: Timepoint (day) Value: 7
  misc_feature: MA Experiment 20001904 PARAMETER Experiment Name: At_Drought_Reproduction_P Parameter: Tissue Value: Rosettes
  misc_feature: MA Experiment 20001904 PARAMETER Experiment Name: At_Drought_Reproduction_P Parameter: Treatment Value: Drought vs. No Drought
  misc_feature: MA Experiment ID: 20001906 Result: Down-regulated in Transcription
  misc_feature: MA Experiment 20001906 PARAMETER Experiment Name: At_Drought_Reproduction_P Parameter: Age (day) Value: 35
  misc_feature: MA Experiment 20001906 PARAMETER Experiment Name: At_Drought_Reproduction_P Parameter: Organism Value: A. thaliana
  misc_feature: MA Experiment 20001906 PARAMETER Experiment Name: At_Drought_Reproduction_P Parameter: Plant Line Value: WS
  misc_feature: MA Experiment 20001906 PARAMETER Experiment Name: At_Drought_Reproduction_P Parameter: Timepoint (day) Value: 5
  misc_feature: MA Experiment 20001906 PARAMETER Experiment Name: At_Drought_Reproduction_P Parameter: Tissue Value: Siliques
  misc_feature: MA Experiment 20001906 PARAMETER Experiment Name: At_Drought_Reproduction_P Parameter: Treatment Value: Drought vs. No Drought
  misc_feature: MA Experiment ID: 20001908 Result: Down-regulated in Transcription
  misc_feature: MA Experiment 20001908 PARAMETER Experiment Name: At_Drought_Reproduction_P Parameter: Age (day) Value: 40
  misc_feature: MA Experiment 20001908 PARAMETER Experiment Name: At_Drought_Reproduction_P Parameter: Organism Value: A. thaliana
  misc_feature: MA Experiment 20001908 PARAMETER Experiment Name: At_Drought_Reproduction_P Parameter: Plant Line Value: WS
  misc_feature: MA Experiment 20001908 PARAMETER Experiment Name: At_Drought_Reproduction_P Parameter: Timepoint (day) Value: 10
  misc_feature: MA Experiment 20001908 PARAMETER Experiment Name: At_Drought_Reproduction_P Parameter: Tissue Value: Siliques
  misc_feature: MA Experiment 20001908 PARAMETER Experiment Name: At_Drought_Reproduction_P Parameter: Treatment Value: Drought vs. No Drought
  misc_feature: MA Experiment ID: 20001911 Result: Down-regulated in Transcription
  misc_feature: MA Experiment 20001911 PARAMETER Experiment Name: At_Drought_Reproduction_P Parameter: Age (day) Value: 40
  misc_feature: MA Experiment 20001911 PARAMETER Experiment Name: At_Drought_Reproduction_P Parameter: Organism Value: A. thaliana
  misc_feature: MA Experiment 20001911 PARAMETER Experiment Name: At_Drought_Reproduction_P Parameter: Plant Line Value: WS
  misc_feature: MA Experiment 20001911 PARAMETER Experiment Name: At_Drought_Reproduction_P Parameter: Timepoint (day) Value: 10
  misc_feature: MA Experiment 20001911 PARAMETER Experiment Name: At_Drought_Reproduction_P Parameter: Tissue Value: Flowers
  misc_feature: MA Experiment 20001911 PARAMETER Experiment Name: At_Drought_Reproduction_P Parameter: Treatment Value: Drought vs. No Drought
atttacaactgtggataagccttttagtctgactcagctttctcaagatccgaaaacacactgacccaacccggttcgattttgcttaaccggacaagatacattaatctgcctaatcttcaattatttaaaagctaactaaacgttatacgtactaatcacttcttcccctataaataaacctttctaatttctcatctcaaatcacactgcatcacaaaacccaaatcggaacttaaaccaaaagacaaacaaaaacgccgtcgtttcacgatgctttcttcttccccaaccttcttcgctactccatttctctcttcttcttcttcttcttctccgtcgttctcttctacttcaccaccgtcacgcatttcccggatctcgccgtcgctttctacaaccaccgcgtcctacacctgcgccgaagatctaccgagattacgccaaatcccgcagcgattttcagcaaccgcgtctctctacgagatccttgaaattcccgtcggctcgacgagtcaagagatcaaatcagcttaccggcgactagccaggatctgtcatcccgatgtagcgagaaatagtcgggataactcgtcggcggacgatttcatgaagatccacgcagcgtattgcacgctttcggatcccgagaaacgcgccgtttatgatcggaggactcttcttcggagccggccgttaacggctggatacggcagttacggtggacggaattgggaaaccgatcagtgctggtagcgagttgactcgatgtgtcgagttggtccaaaaccattgaattggttgtaattagagcaaacccagagattctgggtggttgtgccacgtaggatcaacacggtttatcgtgccacgtaggatctgtcgcgtttttagcctttgtatccataagtagtaagtagtctgtatttagtatttaccatctaataaagaaaataaaaatttatgt

SEQ ID NO: 104906 - protein, 160 aa, Arabidopsis thaliana; identical to SEQ ID NO: 35361
  peptide (1)..(160): Ceres Seq. ID no. 13616023
  misc_feature (68)..(135): Pfam Name: DnaJ domain Pfam Description: DnaJ domain
  misc_feature (1)..(160): Homolog of NCBI NO: 15227919 NR Description: J11 protein, putative [Arabidopsis thaliana]
  misc_feature (1)..(160): Homolog of NCBI NO: 15233446 NR Description: DnaJ protein family [Arabidopsis thaliana]
  misc_feature (1)..(160): Homolog of NCBI NO: 9843641 NR Description: J11 protein [Arabidopsis thaliana]
  misc_feature (28)..(160): Homolog of NCBI NO: 7488763 NR Description: DnaJ protein homolog - kidney bean (fragment)
  misc_feature (1)..(160): Homolog of NCBI NO: 15231204 NR Description: DnaJ protein family [Arabidopsis thaliana]
  misc_feature (53)..(160): Homolog of NCBI NO: 34863272 NR Description: similar to hypothetical protein FLJ40417 [Rattus
  misc_feature (17)..(133): Homolog of NCBI NO: 6691127 NR Description: DnaJ-like protein [Arabidopsis thaliana]
  misc_feature (17)..(133): Homolog of NCBI NO: 15236355 NR Description: DnaJ protein family [Arabidopsis thaliana]
  misc_feature (17)..(133): Homolog of NCBI NO: 30682610 NR Description: DnaJ protein family [Arabidopsis thaliana]
  misc_feature (69)..(157): Homolog of NCBI NO: 11061652 NR Description: DNAJ protein [Leishmania major]

SEQ ID NO: 104907 - DNA, 1099 bp, Arabidopsis thaliana
  misc_feature (1)..(1099): Ceres Seq. ID no. 13616036
  misc_feature: MA Experiment ID: 108433 Result: Up-regulated in Transcription
  misc_feature: MA Experiment 108433 PARAMETER Experiment Name: At_rhl_Mutant2_cDNA_P Parameter: Age (day) Value: 7
  misc_feature: MA Experiment 108433 PARAMETER Experiment Name: At_rhl_Mutant2_cDNA_P Parameter: Organism Value: A. thaliana
  misc_feature: MA Experiment 108433 PARAMETER Experiment Name: At_rhl_Mutant2_cDNA_P Parameter: Plant Line Value: rhl Mutant vs. wt landsburg
  misc_feature: MA Experiment 108433 PARAMETER Experiment Name: At_rhl_Mutant2_cDNA_P Parameter: Tissue Value: Roots
  misc_feature: MA Experiment ID: 20000112 Result: Up-regulated in Transcription
  misc_feature: MA Experiment 20000112 PARAMETER Experiment Name: At_42deg_Heat_cDNA_P Parameter: Temperature (deg C) Value: 42 vs. 22
  misc_feature: MA Experiment 20000112 PARAMETER Experiment Name: At_42deg_Heat_cDNA_P Parameter: Timepoint (hr) Value: 2
  misc_feature: MA Experiment 20000112 PARAMETER Experiment Name: At_42deg_Heat_cDNA_P Parameter: Tissue Value: Aerial
ttcgttccctggttcgaaacagcagctagacgaaaactgtgtaatggctatatcactgaagaggaaccgtttcttcattccttatacgaatctcgtcttcttcttcttcttgtgtgtctctctgctcgataaaactgtatccatcaggatttcgaatcagatctcggatactgtcgttgattctcccgatcgtcctttgaaatctgcggttttcgctcttggaagcttctggagatcggaggcggcgtttggttgtatcaatggcgtcgtacgaacctccgccggttacgccggtggaacgaagacgaatccggagtataggaacttaggtgatcacgccgagtccgtacaggttgaatatgatccaaggataattggttatcgtcagctcttagatgtattttggtctagtcatgattctagacaagtgtttggacaaggtcctgatgtgggtaatcaatacagatcctgtattttcactaattctacagaagaattgagactggcttctaccagcaaagaaagggagcaacttaatacaagaagcagtatcgtgaccactcaaattcaacagctaggaacgttttatcgcgcagagcctgatcaccagaagttcgagctgaaacaacatccatttcttattcagctaattggaaacatggtagaagaagagcttgagagatcagctctagccacaaaactaaacggttacgcagccgagctctgcccgcctagaatccagaaacatatcgactctagagttaatgagatcattagaaaaggttggcccgtcttgagagacatctaatatataagccttgtgagatcttcgcgttcttggatttgattgcttagtctcagatgtaagttttggttcattcttttggccaggaatttggtcacaacaatgtttatgtcttactcttgccccttgagtggtgattgttcagcgttttgtcttgtttcttttaagatctctcaaatagtatatgctttttgttttcttgtaagaagattcagttagactttcattgtatcattatggtattgattaccaattcattgatattatatatatatatgatatactttgattgcc

SEQ ID NO: 104908 - protein, 268 aa, Arabidopsis thaliana
  peptide (1)..(268): Ceres Seq. ID no. 13616037
  misc_feature (67)..(219): Pfam Name: Peptide methionine sulfoxide reductase Pfam Description: Peptide methionine sulfoxide reductase
  misc_feature (15)..(268): Homolog of NCBI NO: 15227955 NR Description: peptide methionine sulfoxide reductase -related thaliana] >gi|25411824|pir||D84559 probable peptide methionine
  misc_feature (67)..(239): Homolog of NCBI NO: 33089114 NR Description: methionine sulfoxide reductase [Apis mellifera
  misc_feature (68)..(239): Homolog of NCBI NO: 7937 NR Description: put. Eip 28 (aa 1-255) [Drosophila melanogaster]
  misc_feature (68)..(239): Homolog of NCBI NO: 24664627 NR Description: Ecdysone-induced protein 28/29kD CG7266-PA
  misc_feature (68)..(239): Homolog of NCBI NO: 119251 NR Description: Ecdysone-induced protein 28/29 kDa
  misc_feature (68)..(239): Homolog of NCBI NO: 311724 NR Description: EIP29 [Drosophila melanogaster]
  misc_feature (68)..(239): Homolog of NCBI NO: 28557615 NR Description: RE51574p [Drosophila melanogaster]
  misc_feature (68)..(239): Homolog of NCBI NO: 24664631 NR Description: Ecdysone-induced protein 28/29kD CG7266-PB
  misc_feature (67)..(211): Homolog of NCBI NO: 15678563 NR Description: peptide methionine sulfoxide reductase thermautotrophicus] >gi|12230335|sp|O26635|MSRA_METTH Peptide
  misc_feature (66)..(209): Homolog of NCBI NO: 22968448 NR Description: hypothetical protein [Rhodospirillum rubrum]
SFPGSKQQLDENCVMAISLKRNRFFIPYTNLVFFFFLCVSLLDKTVSIRISNQISDTVVDSPDRPLKSAVFALGSFWRSEAAFGCINGVVRTSAGYAGGTKTNPEYRNLGDHAESVQVEYDPRIIGYRQLLDVFWSSHDSRQVFGQGPDVGNQYRSCIFTNSTEELRLASTSKEREQLNTRSSIVTTQIQQLGTFYRAEPDHQKFELKQHPFLIQLIGNMVEEELERSALATKLNGYAAELCPPRIQKHIDSRVNEIIRKGWPVLRDI

SEQ ID NO: 104909 - protein, 254 aa, Arabidopsis thaliana
  peptide (1)..(254): Ceres Seq. ID no. 13616038
  misc_feature (53)..(205): Pfam Name: Peptide methionine sulfoxide reductase Pfam Description: Peptide methionine sulfoxide reductase
  misc_feature (1)..(254): Homolog of NCBI NO: 15227955 NR Description: peptide methionine sulfoxide reductase -related thaliana] >gi|25411824|pir||D84559 probable peptide methionine
  misc_feature (53)..(225): Homolog of NCBI NO: 33089114 NR Description: methionine sulfoxide reductase [Apis mellifera
  misc_feature (54)..(225): Homolog of NCBI NO: 7937 NR Description: put. Eip 28 (aa 1-255) [Drosophila melanogaster]
  misc_feature (54)..(225): Homolog of NCBI NO: 24664627 NR Description: Ecdysone-induced protein 28/29kD CG7266-PA
  misc_feature (54)..(225): Homolog of NCBI NO: 119251 NR Description: Ecdysone-induced protein 28/29 kDa
  misc_feature (54)..(225): Homolog of NCBI NO: 311724 NR Description: EIP29 [Drosophila melanogaster]
  misc_feature (54)..(225): Homolog of NCBI NO: 24664631 NR Description: Ecdysone-induced protein 28/29kD CG7266-PB
  misc_feature (54)..(225): Homolog of NCBI NO: 28557615 NR Description: RE51574p [Drosophila melanogaster]
  misc_feature (53)..(197): Homolog of NCBI NO: 15678563 NR Description: peptide methionine sulfoxide reductase thermautotrophicus] >gi|12230335|sp|O26635|MSRA_METTH Peptide
  misc_feature (52)..(195): Homolog of NCBI NO: 22968448 NR Description: hypothetical protein [Rhodospirillum rubrum]
MAISLKRNRFFIPYTNLVFFFFLCVSLLDKTVSIRISNQISDTVVDSPDRPLKSAVFALGSFWRSEAAFGCINGVVRTSAGYAGGTKTNPEYRNLGDHAESVQVEYDPRIIGYRQLLDVFWSSHDSRQVFGQGPDVGNQYRSCIFTNSTEELRLASTSKEREQLNTRSSIVTTQIQQLGTFYRAEPDHQKFELKQHPFLIQLIGNMVEEELERSALATKLNGYAAELCPPRIQKHIDSRVNEIIRKGWPVLRDI

SEQ ID NO: 104910 - DNA, 1697 bp, Arabidopsis thaliana
  misc_feature (1)..(1697): Ceres Seq. ID no. 13616041
  misc_feature: MA Experiment ID: 20000179 Result: Down-regulated in Transcription
  misc_feature: MA Experiment 20000179 PARAMETER Experiment Name: At_Germinating_Seeds_P Parameter: Age (hr) Value: 6 vs. 0
  misc_feature: MA Experiment 20000179 PARAMETER Experiment Name: At_Germinating_Seeds_P Parameter: Tissue Value: Germinating Seeds
  misc_feature: MA Experiment ID: 20000182 Result: Up-regulated in Transcription
  misc_feature: MA Experiment 20000182 PARAMETER Experiment Name: At_2mM_SA_P Parameter: Age (day) Value: 14
  misc_feature: MA Experiment 20000182 PARAMETER Experiment Name: At_2mM_SA_P Parameter: Organism Value: A. thaliana
  misc_feature: MA Experiment 20000182 PARAMETER Experiment Name: At_2mM_SA_P Parameter: Plant Line Value: WS
  misc_feature: MA Experiment 20000182 PARAMETER Experiment Name: At_2mM_SA_P Parameter: Timepoint (hr) Value: 6
  misc_feature: MA Experiment 20000182 PARAMETER Experiment Name: At_2mM_SA_P Parameter: Tissue Value: Aerial
  misc_feature: MA Experiment 20000182 PARAMETER Experiment Name: At_2mM_SA_P Parameter: Treatment Value: 2mM SA vs. No Treatment
  misc_feature: MA Experiment ID: 20000184 Result: Down-regulated in Transcription
  misc_feature: MA Experiment 20000184 PARAMETER Experiment Name: At_Shoots__P Parameter: Age (day) Value: 7
  misc_feature: MA Experiment 20000184 PARAMETER Experiment Name: At_Shoots__P Parameter: Tissue Value: Shoots vs. Whole Plant
  misc_feature: MA Experiment ID: 20000185 Result: Up-regulated in Transcription
  misc_feature: MA Experiment 20000185 PARAMETER Experiment Name: At_Roots__P Parameter: Age (day) Value: 7 vs. 21
  misc_feature: MA Experiment 20000185 PARAMETER Experiment Name: At_Roots__P Parameter: Organism Value: A. thaliana
  misc_feature: MA Experiment 20000185 PARAMETER Experiment Name: At_Roots__P Parameter: Tissue Value: Roots vs. Whole Plant
  misc_feature: MA Experiment ID: 20000227 Result: Up-regulated in Transcription
  misc_feature: MA Experiment 20000227 PARAMETER Experiment Name: At_Root-Tips-vs-Tops_P Parameter: Tissue Value: Root Tips vs. Root Tops
  misc_feature: MA Experiment ID: 20000264 Result: Down-regulated in Transcription
  misc_feature: MA Experiment 20000264 PARAMETER Experiment Name: At_Open_Flower_P Parameter: Age (day) Value: 21
  misc_feature: MA Experiment 20000264 PARAMETER Experiment Name: At_Open_Flower_P Parameter: Plant Line Value: WS
  misc_feature: MA Experiment 20000264 PARAMETER Experiment Name: At_Open_Flower_P Parameter: Tissue Value: Open Flower vs. Whole Plant
  misc_feature: MA Experiment ID: 20000267 Result: Down-regulated in Transcription
  misc_feature: MA Experiment 20000267 PARAMETER Experiment Name: At_Drought_P Parameter: Age (day) Value: 7
  misc_feature: MA Experiment 20000267 PARAMETER Experiment Name: At_Drought_P Parameter: Organism Value: A. thaliana
  misc_feature: MA Experiment 20000267 PARAMETER Experiment Name: At_Drought_P Parameter: Plant Line Value: WS
  misc_feature: MA Experiment 20000267 PARAMETER Experiment Name: At_Drought_P Parameter: Timepoint (hr) Value: 6
  misc_feature: MA Experiment 20000267 PARAMETER Experiment Name: At_Drought_P Parameter: Tissue Value: Whole Plant
  misc_feature: MA Experiment 20000267 PARAMETER Experiment Name: At_Drought_P Parameter: Treatment Value: Drought vs. No Drought
  misc_feature: MA Experiment ID: 20000308 Result: Up-regulated in Transcription
  misc_feature: MA Experiment 20000308 PARAMETER Experiment Name: At_100mM_NaCl__P Parameter: Age (day) Value: 17
  misc_feature: MA Experiment 20000308 PARAMETER Experiment Name: At_100mM_NaCl__P Parameter: Organism Value: A. thaliana
  misc_feature: MA Experiment 20000308 PARAMETER Experiment Name: At_100mM_NaCl__P Parameter: Plant Line Value: WS
  misc_feature: MA Experiment 20000308 PARAMETER Experiment Name: At_100mM_NaCl__P Parameter: Timepoint (hr) Value: 72
  misc_feature: MA Experiment 20000308 PARAMETER Experiment Name: At_100mM_NaCl__P Parameter: Tissue Value: Whole Plant
  misc_feature: MA Experiment 20000308 PARAMETER Experiment Name: At_100mM_NaCl__P Parameter: Treatment Value: 100mM NaCl vs. No Treatment
  misc_feature: MA Experiment ID: 20000438 Result: Down-regulated in Transcription
  misc_feature: MA Experiment 20000438 PARAMETER Experiment Name: At_Shoots__P Parameter: Age (day) Value: 14
  misc_feature: MA Experiment 20000438 PARAMETER Experiment Name: At_Shoots__P Parameter: Tissue Value: Shoots vs. Whole Plant
  misc_feature: MA Experiment ID: 20000439 Result: Up-regulated in Transcription
  misc_feature: MA Experiment 20000439 PARAMETER Experiment Name: At_Roots__P Parameter: Age (day) Value: 14 vs. 21
  misc_feature: MA Experiment 20000439 PARAMETER Experiment Name: At_Roots__P Parameter: Organism Value: A. thaliana
  misc_feature: MA Experiment 20000439 PARAMETER Experiment Name: At_Roots__P Parameter: Tissue Value: Roots vs. Whole Plant
  misc_feature: MA Experiment ID: 20000456 Result: Up-regulated in Transcription
  misc_feature: MA Experiment 20000456 PARAMETER Experiment Name: At_100uM_BA_P Parameter: Age (day) Value: 14
  misc_feature: MA Experiment 20000456 PARAMETER Experiment Name: At_100uM_BA_P Parameter: Organism Value: A. thaliana
  misc_feature: MA Experiment 20000456 PARAMETER Experiment Name: At_100uM_BA_P Parameter: Plant Line Value: WS
  misc_feature: MA Experiment 20000456 PARAMETER Experiment Name: At_100uM_BA_P Parameter: Timepoint (hr) Value: 6
  misc_feature: MA Experiment 20000456 PARAMETER Experiment Name: At_100uM_BA_P Parameter: Tissue Value: Aerial
  misc_feature: MA Experiment 20000456 PARAMETER Experiment Name: At_100uM_BA_P Parameter: Treatment Value: 100uM BA vs. No Treatment
  misc_feature: MA Experiment ID: 20000709 Result: Up-regulated in Transcription
  misc_feature: MA Experiment 20000709 PARAMETER Experiment Name: At_15mM_NH4NO3_L-to-H_P Parameter: Age (hr) Value: 14
  misc_feature: MA Experiment 20000709 PARAMETER Experiment Name: At_15mM_NH4NO3_L-to-H_P Parameter: Organism Value: A. thaliana
  misc_feature: MA Experiment 20000709 PARAMETER Experiment Name: At_15mM_NH4NO3_L-to-H_P Parameter: Plant Line Value: WS
  misc_feature: MA Experiment 20000709 PARAMETER Experiment Name: At_15mM_NH4NO3_L-to-H_P Parameter: Timepoint (hr) Value: 4
  misc_feature: MA Experiment 20000709 PARAMETER Experiment Name: At_15mM_NH4NO3_L-to-H_P Parameter: Tissue Value: Aerial
  misc_feature: MA Experiment 20000709 PARAMETER Experiment Name: At_15mM_NH4NO3_L-to-H_P Parameter: Treatment Value: 15mM NH4NO3 vs. 30mM Mannitol
  misc_feature: MA Experiment ID: 20001451 Result: Down-regulated in Transcription
  misc_feature: MA Experiment 20001451 PARAMETER Experiment Name: At_Far-red-induction_P Parameter: Age (day) Value: 7
  misc_feature: MA Experiment 20001451 PARAMETER Experiment Name: At_Far-red-induction_P Parameter: Light Value: Far-red vs. White
  misc_feature: MA Experiment 20001451 PARAMETER Experiment Name: At_Far-red-induction_P Parameter: Organism Value: A. thaliana
  misc_feature: MA Experiment 20001451 PARAMETER Experiment Name: At_Far-red-induction_P Parameter: Plant Line Value: Columbia
  misc_feature: MA Experiment 20001451 PARAMETER Experiment Name: At_Far-red-induction_P Parameter: Timepoint (hr) Value: 24
  misc_feature: MA Experiment 20001451 PARAMETER Experiment Name: At_Far-red-induction_P Parameter: Tissue Value: Whole Plant
  misc_feature: MA Experiment ID: 20001504 Result: Down-regulated in Transcription
  misc_feature: MA Experiment 20001504 PARAMETER Experiment Name: At_Far-red-enriched_P Parameter: Age (day) Value: 10
  misc_feature: MA Experiment 20001504 PARAMETER Experiment Name: At_Far-red-enriched_P Parameter: Light Value: Far-red enriched vs. White
  misc_feature: MA Experiment 20001504 PARAMETER Experiment Name: At_Far-red-enriched_P Parameter: Organism Value: A. thaliana
  misc_feature: MA Experiment 20001504 PARAMETER Experiment Name: At_Far-red-enriched_P Parameter: Plant Line Value: Columbia
  misc_feature: MA Experiment 20001504 PARAMETER Experiment Name: At_Far-red-enriched_P Parameter: Timepoint (day) Value: 6
  misc_feature: MA Experiment 20001504 PARAMETER Experiment Name: At_Far-red-enriched_P Parameter: Tissue Value: Whole Plant
atcacttctaaaaccttttctcaaatctctctcactctctttcaccggaataaaattctctaggtcatcggaaattttttacttcagccgacaatgtttccttcatcagatttctctttctcaccgtcgtcgctgttctcagcgtacgcatctttaaccggattcttgatgctctttagatcgatgctccatgatttcgtaccggagaagcttcgatcttacttctccagcttactcgaccggtttttcactccgaaatcaaagtatctcactgtgatcatcgacgagaacttcggattgaaccggaatcaagtcttcgacgcggcggagatgtatctcaggagcaagatcggaccggaaacagagcggttgcgagttggtaagatcccaaaacagaagcatttcacaatctctatcgaaagaggcgaagagatcctcgatactttcgaggagtcggaggtgaaatggagttatgttcaatcggagaacgagaaaggagataaagtgaaacgttactacgagctcacattcgagaagaagcttagagacaaagtcttgaactcttatttaacccacgttgtagccgaatccgaggagatcaagaggaatctgagagtggtgaagctttatagcagagatgtgtatgctagtgatgatgatgatggaatggctggtgggaattggggatgtatcaatctcgagcatccgtctacgttcgatacgttggcgatggatccgaatgcgaagaagaagatcatcgatgatttggagaggtttttgaagaggaaggagttttacaaaagagttggtaaagcttggaaacgaggttacttgttgtatgggccaccaggaactggtaaatctagtttgattgctgcgatggcgaattatcttaagtttgatgtgtttgatcttgagcttagtagtatttatgacaatggtgagttgaagagggttttgttatctacgacgaatcgttcgattttggttattgaggatattgattgtaatgctgaagtgagagatagggaagctgagaatcaagaagatgaacaaattaagggaaaggtgactctatcagggattctgaatttcattgatggtttatggtcgagtttcggagatgagagaatcattgtgttcacgacgaatcacaaagaacggcttgatcctgctctgctacgtcctggaagaatggatgtgcatatcaacatgtcttattgtacaggtttaggatttaggacattggtctctaactaccttggtttagatggcttaaaccatcctctttgcgaggaaatcgaggcgctggtcgattctactgaagttactccagctgagttagctgaagagctgatgcaagacgatgatactgacgttgttcttcgtggagtaataagctttgttgagaagaggaaggttgagagaagcaagactaagaaggaggtttctatttgtaaagcaactgatgatgacgaaaaacagaatggttctttgggttgtgtaaagaagaagaagaaagggggtaaacagaaaggtaaagggaaaggtaaaggaaaggccaaaacttatttgatataagagataaccttgaacaatatgatctgttgtgttgtgttgtgtaacatggtaaatcaaacctgtgttcaacattatgccaaataaataaagctttgtatggttctaaacattctact

SEQ ID NO: 104911 - protein, 495 aa, Arabidopsis thaliana
  peptide (1)..(495): Ceres Seq. ID no. 13616042
  misc_feature (245)..(372): Pfam Name: ATPase family associated with various cellular Pfam Description: ATPase family associated with various cellular
  misc_feature (1)..(495): Homolog of NCBI NO: 30680274 NR Description: AAA-type ATPase family [Arabidopsis thaliana]
  misc_feature (1)..(489): Homolog of NCBI NO: 25411838 NR Description: probable AAA-type ATPase [imported] - Arabidopsis
  misc_feature (1)..(484): Homolog of NCBI NO: 25411838 NR Description: probable AAA-type ATPase [imported] - Arabidopsis
  misc_feature (1)..(484): Homolog of NCBI NO: 30680264 NR Description: AAA-type ATPase family [Arabidopsis thaliana]
  misc_feature (1)..(452): Homolog of NCBI NO: 30686502 NR Description: BCS1 - like protein [Arabidopsis thaliana]
  misc_feature (1)..(447): Homolog of NCBI NO: 30693380 NR Description: AAA-type ATPase family [Arabidopsis thaliana]
  misc_feature (1)..(447): Homolog of NCBI NO: 39104562 NR Description: putative BCS1 protein [Arabidopsis thaliana]
  misc_feature (1)..(322): Homolog of NCBI NO: 7485704 NR Description: hypothetical protein F18B3.220 - Arabidopsis >gi|4835245|emb|CAB42923.1| putative mitochondrial protein
  misc_feature (325)..(447): Homolog of NCBI NO: 7485704 NR Description: hypothetical protein F18B3.220 - Arabidopsis >gi|4835245|emb|CAB42923.1| putative mitochondrial protein
  misc_feature (4)..(474): Homolog of NCBI NO: 7485703 NR Description: hypothetical protein F18B3.210 - Arabidopsis >gi|4835244|emb|CAB42922.1| putative mitochondrial protein thaliana] >gi|13877697|gb|AAK43926.1|AF370607_1 putative
MFPSSDFSFSPSSLFSAYASLTGFLMLFRSMLHDFVPEKLRSYFSSLLDRFFTPKSKYLTVIIDENFGLNRNQVFDAAEMYLRSKIGPETERLRVGKIPKQKHFTISIERGEEILDTFEESEVKWSYVQSENEKGDKVKRYYELTFEKKLRDKVLNSYLTHVVAESEEIKRNLRVVKLYSRDVYASDDDDGMAGGNWGCINLEHPSTFDTLAMDPNAKKKIIDDLERFLKRKEFYKRVGKAWKRGYLLYGPPGTGKSSLIAAMANYLKFDVFDLELSSIYDNGELKRVLLSTTNRSILVIEDIDCNAEVRDREAENQEDEQIKGKVTLSGILNFIDGLWSSFGDERIIVFTTNHKERLDPALLRPGRMDVHINMSYCTGLGFRTLVSNYLGLDGLNHPLCEEIEALVDSTEVTPAELAEELMQDDDTDVVLRGVISFVEKRKVERSKTKKEVSICKATDDDEKQNGSLGCVKKKKKGGKQKGKGKGKGKAKTYLI

SEQ ID NO: 104912 - protein, 470 aa, Arabidopsis thaliana
  peptide (1)..(470): Ceres Seq. ID no. 13616043
  misc_feature (220)..(347): Pfam Name: ATPase family associated with various cellular Pfam Description: ATPase family associated with various cellular
  misc_feature (1)..(470): Homolog of NCBI NO: 30680274 NR Description: AAA-type ATPase family [Arabidopsis thaliana]
  misc_feature (1)..(464): Homolog of NCBI NO: 25411838 NR Description: probable AAA-type ATPase [imported] - Arabidopsis
  misc_feature (1)..(459): Homolog of NCBI NO: 25411838 NR Description: probable AAA-type ATPase [imported] - Arabidopsis
  misc_feature (1)..(459): Homolog of NCBI NO: 30680264 NR Description: AAA-type ATPase family [Arabidopsis thaliana]
  misc_feature (1)..(427): Homolog of NCBI NO: 30686502 NR Description: BCS1 - like protein [Arabidopsis thaliana]
  misc_feature (1)..(422): Homolog of NCBI NO: 30693380 NR Description: AAA-type ATPase family [Arabidopsis thaliana]
  misc_feature (1)..(422): Homolog of NCBI NO: 39104562 NR Description: putative BCS1 protein [Arabidopsis thaliana]
  misc_feature (1)..(297): Homolog of NCBI NO: 7485704 NR Description: hypothetical protein F18B3.220 - Arabidopsis >gi|4835245|emb|CAB42923.1| putative mitochondrial protein
  misc_feature (300)..(422): Homolog of NCBI NO: 7485704 NR Description: hypothetical protein F18B3.220 - Arabidopsis >gi|4835245|emb|CAB42923.1| putative mitochondrial protein
  misc_feature (1)..(449): Homolog of NCBI NO: 7485703 NR Description: hypothetical protein F18B3.210 - Arabidopsis >gi|4835244|emb|CAB42922.1| putative mitochondrial protein thaliana] >gi|13877697|gb|AAK43926.1|AF370607_1 putative
MLFRSMLHDFVPEKLRSYFSSLLDRFFTPKSKYLTVIIDENFGLNRNQVFDAAEMYLRSKIGPETERLRVGKIPKQKHFTISIERGEEILDTFEESEVKWSYVQSENEKGDKVKRYYELTFEKKLRDKVLNSYLTHVVAESEEIKRNLRVVKLYSRDVYASDDDDGMAGGNWGCINLEHPSTFDTLAMDPNAKKKIIDDLERFLKRKEFYKRVGKAWKRGYLLYGPPGTGKSSLIAAMANYLKFDVFDLELSSIYDNGELKRVLLSTTNRSILVIEDIDCNAEVRDREAENQEDEQIKGKVTLSGILNFIDGLWSSFGDERIIVFTTNHKERLDPALLRPGRMDVHINMSYCTGLGFRTLVSNYLGLDGLNHPLCEEIEALVDSTEVTPAELAEELMQDDDTDVVLRGVISFVEKRKVERSKTKKEVSICKATDDDEKQNGSLGCVKKKKKGGKQKGKGKGKGKAKTYLI

SEQ ID NO: 104913 - protein, 465 aa, Arabidopsis thaliana
  peptide (1)..(465): Ceres Seq. ID no. 13616044
  misc_feature (215)..(342): Pfam Name: ATPase family associated with various cellular Pfam Description: ATPase family associated with various cellular
  misc_feature (1)..(465): Homolog of NCBI NO: 30680274 NR Description: AAA-type ATPase family [Arabidopsis thaliana]
  misc_feature (1)..(459): Homolog of NCBI NO: 25411838 NR Description: probable AAA-type ATPase [imported] - Arabidopsis
  misc_feature (1)..(454): Homolog of NCBI NO: 25411838 NR Description: probable AAA-type ATPase [imported] - Arabidopsis
  misc_feature (1)..(454): Homolog of NCBI NO: 30680264 NR Description: AAA-type ATPase family [Arabidopsis thaliana]
  misc_feature (1)..(422): Homolog of NCBI NO: 30686502 NR Description: BCS1 - like protein [Arabidopsis thaliana]
  misc_feature (1)..(417): Homolog of NCBI NO: 30693380 NR Description: AAA-type ATPase family [Arabidopsis thaliana]
  misc_feature (1)..(417): Homolog of NCBI NO: 39104562 NR Description: putative BCS1 protein [Arabidopsis thaliana]
  misc_feature (1)..(292): Homolog of NCBI NO: 7485704 NR Description: hypothetical protein F18B3.220 - Arabidopsis >gi|4835245|emb|CAB42923.1| putative mitochondrial protein
  misc_feature (295)..(417): Homolog of NCBI NO: 7485704 NR Description: hypothetical protein F18B3.220 - Arabidopsis >gi|4835245|emb|CAB42923.1| putative mitochondrial protein
  misc_feature (1)..(444): Homolog of NCBI NO: 7485703 NR Description: hypothetical protein F18B3.210 - Arabidopsis >gi|4835244|emb|CAB42922.1| putative mitochondrial protein thaliana] >gi|13877697|gb|AAK43926.1|AF370607_1 putative
MLHDFVPEKLRSYFSSLLDRFFTPKSKYLTVIIDENFGLNRNQVFDAAEMYLRSKIGPETERLRVGKIPKQKHFTISIERGEEILDTFEESEVKWSYVQSENEKGDKVKRYYELTFEKKLRDKVLNSYLTHVVAESEEIKRNLRVVKLYSRDVYASDDDDGMAGGNWGCINLEHPSTFDTLAMDPNAKKKIIDDLERFLKRKEFYKRVGKAWKRGYLLYGPPGTGKSSLIAAMANYLKFDVFDLELSSIYDNGELKRVLLSTTNRSILVIEDIDCNAEVRDREAENQEDEQIKGKVTLSGILNFIDGLWSSFGDERIIVFTTNHKERLDPALLRPGRMDVHINMSYCTGLGFRTLVSNYLGLDGLNHPLCEEIEALVDSTEVTPAELAEELMQDDDTDVVLRGVISFVEKRKVERSKTKKEVSICKATDDDEKQNGSLGCVKKKKKGGKQKGKGKGKGKAKTYLI

SEQ ID NO: 104914 - DNA, 1484 bp, Arabidopsis thaliana
  misc_feature (1)..(1484): Ceres Seq. ID no. 13616045
  misc_feature: MA Experiment ID: 108434 Result: Up-regulated in Transcription
  misc_feature: MA Experiment 108434 PARAMETER Experiment Name: At_Root_Tips_cDNA_P Parameter: Tissue Value: Root Tips
  misc_feature: MA Experiment ID: 108576 Result: Up-regulated in Transcription
  misc_feature: MA Experiment 108576 PARAMETER Experiment Name: At_42deg_Heat_cDNA_P Parameter: Temperature (deg C) Value: 42 vs. 22
  misc_feature: MA Experiment 108576 PARAMETER Experiment Name: At_42deg_Heat_cDNA_P Parameter: Timepoint (hr) Value: 1
  misc_feature: MA Experiment 108576 PARAMETER Experiment Name: At_42deg_Heat_cDNA_P Parameter: Tissue Value: Aerial
  misc_feature: MA Experiment ID: 20000112 Result: Up-regulated in Transcription
  misc_feature: MA Experiment 20000112 PARAMETER Experiment Name: At_42deg_Heat_cDNA_P Parameter: Temperature (deg C) Value: 42 vs. 22
  misc_feature: MA Experiment 20000112 PARAMETER Experiment Name: At_42deg_Heat_cDNA_P Parameter: Timepoint (hr) Value: 2
  misc_feature: MA Experiment 20000112 PARAMETER Experiment Name: At_42deg_Heat_cDNA_P Parameter: Tissue Value: Aerial
  misc_feature: MA Experiment ID: 20000144 Result: Up-regulated in Transcription
  misc_feature: MA Experiment 20000144 PARAMETER Experiment Name: At_42deg_Heat_cDNA_P Parameter: Temperature (deg C) Value: 42 vs. 22
  misc_feature: MA Experiment 20000144 PARAMETER Experiment Name: At_42deg_Heat_cDNA_P Parameter: Timepoint (hr) Value: 1
  misc_feature: MA Experiment 20000144 PARAMETER Experiment Name: At_42deg_Heat_cDNA_P Parameter: Tissue Value: Aerial
atttattcatcacttatcagcgatttgacgagaagagctttttggtttctgcgaatcatccaaaatccgccatggaagcaactacaagaatcttgagtacttcttctgctctcaatcgtcttcttcttctcagtaagctcaatctaaaatcagatccccgtaatatcaattccacaaatcagctactacacaatgccgttacccgaaaatcctctatctccgccgctcgtatacggtgctcttcgctccctgcgaatgcgaatctcttcagatcactcttcttcctaacgtcaacgtttcgtctcgagaacaccgccgttcacgctaatccattccgatccgaacctaacgacggcgtcgccgtctggaacagagctccacggatcgtgaacggaggtggaaacgcggcgatattcggcgggaacgaggggaaagagacgacggtggttctccttggttggctaggagcgaaagctaaacatctaaggagatacgttgagtggtacaactccaggggaattaacgccgttactttcactgttgacgttagggatttgctccggttagatcttggtcggcggcttgaacgaaggatagctgaatttgggaatgaattggttaattgggtatcggagaaagaagatgatggtagagagaaatgcttggtgtttcacagtttcagtaacactggttggcttgtatatggtgccttgctagagagcttcattggtagacaagatttagtagaaaggattaagggttgtatcattgactcgggaggagcagatcctcttgatactaagatttgggcagcggggtttaccgcggctatactgaagaagcgtagctccaccataaccacagaaccaaacagtcccataaaagaagaggatgcttcaacaccacaaaagaaggaacctttaggaatcgaaaacataatgctatcatctctggagaaactcttccccatcttcttaaaccacccagacgtcaatacgaggctaacaaaaatcattcaaaaactatatgagaaccatcctccatgtcctcagctctatctttacagctccggggacaaagttgttccatctcattccgttgagctccgcatccgagaacaacagaagattggaagaaagatacattctttcaatttcaagtcctctcctcacgtggatcattaccggaactttcctgacttgtattcctcacagcttcaaaacttcttgcaagaatgcttcacaccaacaaaacaacaagctctgtgactttggaacatctttttttgcagaatatttgtagccttggtttgtttgtttgttttctcctcaaaagttgtttattattgatgatagaacaagataatccgaaggagacagaaactccaaactgtgtcgacgagctactgagcagagatagtttctgaaactcttagattgttgttgctagtttggcttcatatgtgaaacttgaccgatgctcgg

SEQ ID NO: 104915 - protein, 421 aa, Arabidopsis thaliana
  peptide (1)..(421): Ceres Seq. ID no. 13616046
  misc_feature (144)..(412): Pfam Name: Eukaryotic protein of unknown function (DUF829) Pfam Description: Eukaryotic protein of unknown function (DUF829)
  misc_feature (24)..(421): Homolog of NCBI NO: 18398681 NR Description: expressed protein [Arabidopsis thaliana]
  misc_feature (24)..(421): Homolog of NCBI NO: 21536700 NR Description: unknown [Arabidopsis thaliana]
  misc_feature (1)..(268): Homolog of NCBI NO: 25411844 NR Description: probable integral membrane protein [imported] -
  misc_feature (126)..(409): Homolog of NCBI NO: 18402437 NR Description: expressed protein [Arabidopsis thaliana] gene_id:MZE19.2~unknown protein [Arabidopsis thaliana]
  misc_feature (139)..(285): Homolog of NCBI NO: 13375774 NR Description: hypothetical protein FLJ22353 [Homo sapiens]
  misc_feature (312)..(412): Homolog of NCBI NO: 13375774 NR Description: hypothetical protein FLJ22353 [Homo sapiens]
  misc_feature (139)..(285): Homolog of NCBI NO: 40555886 NR Description: Hypothetical protein FLJ22353 [Homo sapiens]
  misc_feature (335)..(412): Homolog of NCBI NO: 40555886 NR Description: Hypothetical protein FLJ22353 [Homo sapiens]
  misc_feature (97)..(258): Homolog of NCBI NO: 19528521 NR Description: RE54285p [Drosophila melanogaster]
  misc_feature (349)..(421): Homolog of NCBI NO: 19528521 NR Description: RE54285p [Drosophila melanogaster]
LFITYQRFDEKSFLVSANHPKSAMEATTRILSTSSALNRLLLLSKLNLKSDPRNINSTNQLLHNAVTRKSSISAARIRCSSLPANANLFRSLFFLTSTFRLENTAVHANPFRSEPNDGVAVWNRAPRIVNGGGNAAIFGGNEGKETTVVLLGWLGAKAKHLRRYVEWYNSRGINAVTFTVDVRDLLRLDLGRRLERRIAEFGNELVNWVSEKEDDGREKCLVFHSFSNTGWLVYGALLESFIGRQDLVERIKGCIIDSGGADPLDTKIWAAGFTAAILKKRSSTITTEPNSPIKEEDASTPQKKEPLGIENIMLSSLEKLFPIFLNHPDVNTRLTKIIQKLYENHPPCPQLYLYSSGDKVVPSHSVELRIREQQKIGRKIHSFNFKSSPHVDHYRNFPDLYSSQLQNFLQECFTPTKQQAL

SEQ ID NO: 104916 - protein, 398 aa, Arabidopsis thaliana
  peptide (1)..(398): Ceres Seq. ID no. 13616047
  misc_feature (121)..(389): Pfam Name: Eukaryotic protein of unknown function (DUF829) Pfam Description: Eukaryotic protein of unknown function (DUF829)
  misc_feature (1)..(398): Homolog of NCBI NO: 18398681 NR Description: expressed protein [Arabidopsis thaliana]
  misc_feature (1)..(398): Homolog of NCBI NO: 21536700 NR Description: unknown [Arabidopsis thaliana]
  misc_feature (1)..(245): Homolog of NCBI NO: 25411844 NR Description: probable integral membrane protein [imported] -
  misc_feature (103)..(386): Homolog of NCBI NO: 18402437 NR Description: expressed protein [Arabidopsis thaliana] gene_id:MZE19.2~unknown protein [Arabidopsis thaliana]
  misc_feature (116)..(262): Homolog of NCBI NO: 13375774 NR Description: hypothetical protein FLJ22353 [Homo sapiens]
  misc_feature (289)..(389): Homolog of NCBI NO: 13375774 NR Description: hypothetical protein FLJ22353 [Homo sapiens]
  misc_feature (116)..(262): Homolog of NCBI NO: 40555886 NR Description: Hypothetical protein FLJ22353 [Homo sapiens]
  misc_feature (312)..(389): Homolog of NCBI NO: 40555886 NR Description: Hypothetical protein FLJ22353 [Homo sapiens]
  misc_feature (74)..(235): Homolog of NCBI NO: 19528521 NR Description: RE54285p [Drosophila melanogaster]
  misc_feature (326)..(398): Homolog of NCBI NO: 19528521 NR Description: RE54285p [Drosophila melanogaster]
MEATTRILSTSSALNRLLLLSKLNLKSDPRNINSTNQLLHNAVTRKSSISAARIRCSSLPANANLFRSLFFLTSTFRLENTAVHANPFRSEPNDGVAVWNRAPRIVNGGGNAAIFGGNEGKETTVVLLGWLGAKAKHLRRYVEWYNSRGINAVTFTVDVRDLLRLDLGRRLERRIAEFGNELVNWVSEKEDDGREKCLVFHSFSNTGWLVYGALLESFIGRQDLVERIKGCIIDSGGADPLDTKIWAAGFTAAILKKRSSTITTEPNSPIKEEDASTPQKKEPLGIENIMLSSLEKLFPIFLNHPDVNTRLTKIIQKLYENHPPCPQLYLYSSGDKVVPSHSVELRIREQQKIGRKIHSFNFKSSPHVDHYRNFPDLYSSQLQNFLQECFTPTKQQAL

SEQ ID NO: 104917 - DNA, 822 bp, Arabidopsis thaliana
  misc_feature (1)..(822): Ceres Seq. ID no. 13616048
  misc_feature: MA Experiment ID: 108462 Result: Down-regulated in Transcription
  misc_feature: MA Experiment 108462 PARAMETER Experiment Name: At_Germinating_Seeds_cDNA_P Parameter: Age (day) Value: 2 vs. 0
  misc_feature: MA Experiment 108462 PARAMETER Experiment Name: At_Germinating_Seeds_cDNA_P Parameter: Tissue Value: Germinating Seeds
  misc_feature: MA Experiment ID: 108573 Result: Down-regulated in Transcription
  misc_feature: MA Experiment 108573 PARAMETER Experiment Name: At_Drought_cDNA_P Parameter: Timepoint (hr) Value: 6
  misc_feature: MA Experiment 108573 PARAMETER Experiment Name: At_Drought_cDNA_P Parameter: Tissue Value: Aerial
  misc_feature: MA Experiment 108573 PARAMETER Experiment Name: At_Drought_cDNA_P Parameter: Treatment Value: Drought vs. No Drought
  misc_feature: MA Experiment ID: 108585 Result: Down-regulated in Transcription
  misc_feature: MA Experiment 108585 PARAMETER Experiment Name: At_5mM_NaNP_cDNA_P Parameter: Timepoint (hr) Value: 6
  misc_feature: MA Experiment 108585 PARAMETER Experiment Name: At_5mM_NaNP_cDNA_P Parameter: Tissue Value: Aerial
  misc_feature: MA Experiment 108585 PARAMETER Experiment Name: At_5mM_NaNP_cDNA_P Parameter: Treatment Value: null
  misc_feature: MA Experiment ID: 108595 Result: Down-regulated in Transcription
  misc_feature: MA Experiment 108595 PARAMETER Experiment Name: At_Ler-pi_Ovule_cDNA_P Parameter: Plant Line Value: null
  misc_feature: MA Experiment ID: 108607 Result: Down-regulated in Transcription
  misc_feature: MA Experiment 108607 PARAMETER Experiment Name: At_100uM_ABA_cDNA_P Parameter: Timepoint (hr) Value: 4
  misc_feature: MA Experiment 108607 PARAMETER Experiment Name: At_100uM_ABA_cDNA_P Parameter: Tissue Value: Aerial
  misc_feature: MA Experiment 108607 PARAMETER Experiment Name: At_100uM_ABA_cDNA_P Parameter: Treatment Value: 100uM ABA vs. No Treatment
  misc_feature: MA Experiment ID: 20000184 Result: Down-regulated in Transcription
  misc_feature: MA Experiment 20000184 PARAMETER Experiment Name: At_Shoots__P Parameter: Age (day) Value: 7
  misc_feature: MA Experiment 20000184 PARAMETER Experiment Name: At_Shoots__P Parameter: Tissue Value: Shoots vs. Whole Plant
  misc_feature: MA Experiment ID: 20000185 Result: Down-regulated in Transcription
  misc_feature: MA Experiment 20000185 PARAMETER Experiment Name: At_Roots__P Parameter: Age (day) Value: 7 vs. 21
  misc_feature: MA Experiment 20000185 PARAMETER Experiment Name: At_Roots__P Parameter: Organism Value: A. thaliana
  misc_feature: MA Experiment 20000185 PARAMETER Experiment Name: At_Roots__P Parameter: Tissue Value: Roots vs. Whole Plant
  misc_feature: MA Experiment ID: 20000436 Result: Down-regulated in Transcription
  misc_feature: MA Experiment 20000436 PARAMETER Experiment Name: At_Drought_P Parameter: Age (day) Value: 7
  misc_feature: MA Experiment 20000436 PARAMETER Experiment Name: At_Drought_P Parameter: Organism Value: A. thaliana
  misc_feature: MA Experiment 20000436 PARAMETER Experiment Name: At_Drought_P Parameter: Plant Line Value: WS
  misc_feature: MA Experiment 20000436 PARAMETER Experiment Name: At_Drought_P Parameter: Timepoint (hr) Value: 12
  misc_feature: MA Experiment 20000436 PARAMETER Experiment Name: At_Drought_P Parameter: Tissue Value: Whole Plant
  misc_feature: MA Experiment 20000436 PARAMETER Experiment Name: At_Drought_P Parameter: Treatment Value: Drought vs. No Drought
  misc_feature: MA Experiment ID: 20000437 Result: Down-regulated in Transcription
  misc_feature: MA Experiment 20000437 PARAMETER Experiment Name: At_Drought_P Parameter: Age (day) Value: 8
  misc_feature: MA Experiment 20000437 PARAMETER Experiment Name: At_Drought_P Parameter: Organism Value: A. thaliana
  misc_feature: MA Experiment 20000437 PARAMETER Experiment Name: At_Drought_P Parameter: Plant Line Value: WS
  misc_feature: MA Experiment 20000437 PARAMETER Experiment Name: At_Drought_P Parameter: Timepoint (hr) Value: 24
  misc_feature: MA Experiment 20000437 PARAMETER Experiment Name: At_Drought_P Parameter: Tissue Value: Whole Plant
  misc_feature: MA Experiment 20000437 PARAMETER Experiment Name: At_Drought_P Parameter: Treatment Value: Drought vs. No Drought
  misc_feature: MA Experiment ID: 20000794 Result: Down-regulated in Transcription
  misc_feature: MA Experiment 20000794 PARAMETER Experiment Name: At_Petals_P Parameter: Age (day) Value: 23-25 days
  misc_feature: MA Experiment 20000794 PARAMETER Experiment Name: At_Petals_P Parameter: Plant Line Value: WS
  misc_feature: MA Experiment 20000794 PARAMETER Experiment Name: At_Petals_P Parameter: Tissue Value: Petals vs. Whole plant
  misc_feature: MA Experiment ID: 20001757 Result: Up-regulated in Transcription
  misc_feature: MA Experiment 20001757 PARAMETER Experiment Name: At_50mM_NH4NO3_L-to-H_P Parameter: Timepoint (hr) Value: 6
  misc_feature: MA Experiment 20001757 PARAMETER Experiment Name: At_50mM_NH4NO3_L-to-H_P Parameter: Tissue Value: Leaf
  misc_feature: MA Experiment 20001757 PARAMETER Experiment Name: At_50mM_NH4NO3_L-to-H_P Parameter: Treatment Value: 50mM NH4NO3 vs 100mM Mannitol
aaagaaacaaattgttggaatctcaattctcgaatctgacatctcggagaagagatatggcgacagagtcatcggaatcggaagaagaaggaaagattagtggaggaaactataagctaatcatagacgacgatctaagagagatgggtaaaaacgcagcttggagcgttagctcttgtaagcccggcaatggcgtcaccactctccgcgacgacaatctcgagacttattggcaatcagatgggttacaaccacatttgattaacattcaattccagaagaaagtgaaactgcagttagtggttttgtacgttgactttaagcttgatgagagctatacaccaagtaaaatctctattcgagctggtgatggttttcataacttaaaggagattaaaagtgtggagcttgttaaaccaactggttgggtttgcttatctttgtctggaaccgatccacgggaaacttttgtcaatacatttatgttacaaatagccattttgtcaaatcacctcaacgggagagatactcatatccgccagatcaaagtttacggccctagaccaaatcctattccgcaccaaccttttcagtttacatcgatggagtttctcacttattcaacactgagatgagaaatttgagcaggagaagtttgaagaacatggactatgaaagatactgatgttgataccacatgaagagtctataatcagattagttattgttgttgtgcaatggcttttgtttatatattacattggatataacaatcataacttcagtaagcttatcaaccaagacctccataaaacatttgac

SEQ ID NO: 104918 - protein, 210 aa, Arabidopsis thaliana
  peptide (1)..(210): Ceres Seq. ID no. 13616049
  misc_feature (20)..(210): Pfam Name: Anaphase-promoting complex, subunit 10 (APC10) Pfam Description: Anaphase-promoting complex, subunit 10 (APC10)
  misc_feature (19)..(210): Homolog of NCBI NO: 18398701 NR Description: expressed protein [Arabidopsis thaliana]
  misc_feature (19)..(210): Homolog of NCBI NO: 21592739 NR Description: unknown [Arabidopsis thaliana]
  misc_feature (30)..(210): Homolog of NCBI NO: 5091606 NR Description: ESTs dbj|D15316 and dbj|C98044 come from this
  misc_feature (45)..(210): Homolog of NCBI NO: 7657035 NR Description: anaphase-promoting complex subunit 10; complex 10 [Homo sapiens] >gi|7512765|pir||T12476 hypothetical
  misc_feature (45)..(210): Homolog of NCBI NO: 4836700 NR Description: anaphase promoting complex subunit 10 [Homo
  misc_feature (45)..(210): Homolog of NCBI NO: 34395509 NR Description: Anaphase promoting complex subunit 10 (APC10) subunit 10) >gi|6463666|dbj|BAA86953.1| APC10 [Homo sapiens]
  misc_feature (45)..(186): Homolog of NCBI NO: 16975123 NR Description: Chain A, Crystal Structure Of The Apc10DOC1
  misc_feature (45)..(210): Homolog of NCBI NO: 31240605 NR Description: ENSANGP00000020276 [Anopheles gambiae]
  misc_feature (45)..(210): Homolog of NCBI NO: 28573741 NR Description: CG11419-PA [Drosophila melanogaster]
  misc_feature (45)..(191): Homolog of NCBI NO: 32420809 NR Description: hypothetical protein ( (AL513409) related to promoting complex subunit 10 [Neurospora crassa] ) related to anaphase promoting complex subunit 10 [Neurospora
RNKLLESQFSNLTSRRRDMATESSESEEEGKISGGNYKLIIDDDLREMGKNAAWSVSSCKPGNGVTTLRDDNLETYWQSDGLQPHLINIQFQKKVKLQLVVLYVDFKLDESYTPSKISIRAGDGFHNLKEIKSVELVKPTGWVCLSLSGTDPRETFVNTFMLQIAILSNHLNGRDTHIRQIKVYGPRPNPIPHQPFQFTSMEFLTYSTLR

SEQ ID NO: 104919 - protein, 192 aa, Arabidopsis thaliana
  peptide (1)..(192): Ceres Seq. ID no. 13616050
  misc_feature (2)..(192): Pfam Name: Anaphase-promoting complex, subunit 10 (APC10) Pfam Description: Anaphase-promoting complex, subunit 10 (APC10)
  misc_feature (1)..(192): Homolog of NCBI NO: 18398701 NR Description: expressed protein [Arabidopsis thaliana]
  misc_feature (1)..(192): Homolog of NCBI NO: 21592739 NR Description: unknown [Arabidopsis thaliana]
  misc_feature (12)..(192): Homolog of NCBI NO: 5091606 NR Description: ESTs dbj|D15316 and dbj|C98044 come from this
  misc_feature (27)..(192): Homolog of NCBI NO: 7657035 NR Description: anaphase-promoting complex subunit 10; complex 10 [Homo sapiens] >gi|7512765|pir||T12476 hypothetical
  misc_feature (27)..(192): Homolog of NCBI NO: 4836700 NR Description: anaphase promoting complex subunit 10 [Homo
  misc_feature (27)..(192): Homolog of NCBI NO: 34395509 NR Description: Anaphase promoting complex subunit 10 (APC10) subunit 10) >gi|6463666|dbj|BAA86953.1| APC10 [Homo sapiens]
  misc_feature (27)..(168): Homolog of NCBI NO: 16975123 NR Description: Chain A, Crystal Structure Of The Apc10DOC1
  misc_feature (27)..(192): Homolog of NCBI NO: 31240605 NR Description: ENSANGP00000020276 [Anopheles gambiae]
  misc_feature (27)..(192): Homolog of NCBI NO: 28573741 NR Description: CG11419-PA [Drosophila melanogaster]
  misc_feature (27)..(173): Homolog of NCBI NO: 32420809 NR Description: hypothetical protein ( (AL513409) related to promoting complex subunit 10 [Neurospora crassa] ) related to anaphase promoting complex subunit 10 [Neurospora
MATESSESEEEGKISGGNYKLIIDDDLREMGKNAAWSVSSCKPGNGVTTLRDDNLETYWQSDGLQPHLINIQFQKKVKLQLVVLYVDFKLDESYTPSKISIRAGDGFHNLKEIKSVELVKPTGWVCLSLSGTDPRETFVNTFMLQIAILSNHLNGRDTHIRQIKVYGPRPNPIPHQPFQFTSMEFLTYSTLR

SEQ ID NO: 104920 - protein, 163 aa, Arabidopsis thaliana
  peptide (1)..(163): Ceres Seq. ID no. 13616051
  misc_feature (1)..(163): Pfam Name: Anaphase-promoting complex, subunit 10 (APC10) Pfam Description: Anaphase-promoting complex, subunit 10 (APC10)
  misc_feature (1)..(163): Homolog of NCBI NO: 18398701 NR Description: expressed protein [Arabidopsis thaliana]
  misc_feature (1)..(163): Homolog of NCBI NO: 21592739 NR Description: unknown [Arabidopsis thaliana]
  misc_feature (1)..(163): Homolog of NCBI NO: 5091606 NR Description: ESTs dbj|D15316 and dbj|C98044 come from this
  misc_feature (1)..(163): Homolog of NCBI NO: 7657035 NR Description: anaphase-promoting complex subunit 10; complex 10 [Homo sapiens] >gi|7512765|pir||T12476 hypothetical
  misc_feature (1)..(163): Homolog of NCBI NO: 4836700 NR Description: anaphase promoting complex subunit 10 [Homo
  misc_feature (1)..(163): Homolog of NCBI NO: 34395509 NR Description: Anaphase promoting complex subunit 10 (APC10) subunit 10) >gi|6463666|dbj|BAA86953.1| APC10 [Homo sapiens]
  misc_feature (1)..(139): Homolog of NCBI NO: 16975123 NR Description: Chain A, Crystal Structure Of The Apc10DOC1
  misc_feature (1)..(163): Homolog of NCBI NO: 31240605 NR Description: ENSANGP00000020276 [Anopheles gambiae]
  misc_feature (1)..(163): Homolog of NCBI NO: 28573741 NR Description: CG11419-PA [Drosophila melanogaster]
  misc_feature (1)..(144): Homolog of NCBI NO: 32420809 NR Description: hypothetical protein ( (AL513409) related to promoting complex subunit 10 [Neurospora crassa] ) related to anaphase promoting complex subunit 10 [Neurospora
MGKNAAWSVSSCKPGNGVTTLRDDNLETYWQSDGLQPHLINIQFQKKVKLQLVVLYVDFKLDESYTPSKISIRAGDGFHNLKEIKSVELVKPTGWVCLSLSGTDPRETFVNTFMLQIAILSNHLNGRDTHIRQIKVYGPRPNPIPHQPFQFTSMEFLTYSTLR

SEQ ID NO: 104921 - DNA, 1488 bp, Arabidopsis thaliana
  misc_feature (1)..(1488): Ceres Seq. ID no. 13616052
  misc_feature: MA Experiment ID: 108462 Result: Up-regulated in Transcription
  misc_feature: MA Experiment 108462 PARAMETER Experiment Name: At_Germinating_Seeds_cDNA_P Parameter: Age (day) Value: 2 vs. 0
  misc_feature: MA Experiment 108462 PARAMETER Experiment Name: At_Germinating_Seeds_cDNA_P Parameter: Tissue Value: Germinating Seeds
  misc_feature: MA Experiment ID: 108463 Result: Up-regulated in Transcription
  misc_feature: MA Experiment 108463 PARAMETER Experiment Name: At_Germinating_Seeds_cDNA_P Parameter: Age (day) Value: 3 vs. 0
  misc_feature: MA Experiment 108463 PARAMETER Experiment Name: At_Germinating_Seeds_cDNA_P Parameter: Tissue Value: Germinating Seeds
  misc_feature: MA Experiment ID: 108464 Result: Up-regulated in Transcription
  misc_feature: MA Experiment 108464 PARAMETER Experiment Name: At_Germinating_Seeds_cDNA_P Parameter: Age (day) Value: 4 vs. 0
  misc_feature: MA Experiment 108464 PARAMETER Experiment Name: At_Germinating_Seeds_cDNA_P Parameter: Tissue Value: Germinating Seeds
  misc_feature: MA Experiment ID: 108561 Result: Down-regulated in Transcription
  misc_feature: MA Experiment 108561 PARAMETER Experiment Name: At_100uM_ABA_cDNA_P Parameter: Timepoint (hr) Value: 6
  misc_feature: MA Experiment 108561 PARAMETER Experiment Name: At_100uM_ABA_cDNA_P Parameter: Tissue Value: Aerial
  misc_feature: MA Experiment 108561 PARAMETER Experiment Name: At_100uM_ABA_cDNA_P Parameter: Treatment Value: 100uM ABA vs. No Treatment
  misc_feature: MA Experiment ID: 108573 Result: Down-regulated in Transcription
  misc_feature: MA Experiment 108573 PARAMETER Experiment Name: At_Drought_cDNA_P Parameter: Timepoint (hr) Value: 6
  misc_feature: MA Experiment 108573 PARAMETER Experiment Name: At_Drought_cDNA_P Parameter: Tissue Value: Aerial
  misc_feature: MA Experiment 108573 PARAMETER Experiment Name: At_Drought_cDNA_P Parameter: Treatment Value: Drought vs. No Drought
  misc_feature: MA Experiment ID: 108576 Result: Down-regulated in Transcription
  misc_feature: MA Experiment 108576 PARAMETER Experiment Name: At_42deg_Heat_cDNA_P Parameter: Temperature (deg C) Value: 42 vs. 22
  misc_feature: MA Experiment 108576 PARAMETER Experiment Name: At_42deg_Heat_cDNA_P Parameter: Timepoint (hr) Value: 1
  misc_feature: MA Experiment 108576 PARAMETER Experiment Name: At_42deg_Heat_cDNA_P Parameter: Tissue Value: Aerial
  misc_feature: MA Experiment ID: 108585 Result: Down-regulated in Transcription
  misc_feature: MA Experiment 108585 PARAMETER Experiment Name: At_5mM_NaNP_cDNA_P Parameter: Timepoint (hr) Value: 6
  misc_feature: MA Experiment 108585 PARAMETER Experiment Name: At_5mM_NaNP_cDNA_P Parameter: Tissue Value: Aerial
  misc_feature: MA Experiment 108585 PARAMETER Experiment Name: At_5mM_NaNP_cDNA_P Parameter: Treatment Value: null
  misc_feature: MA Experiment ID: 108595 Result: Down-regulated in Transcription
  misc_feature: MA Experiment 108595 PARAMETER Experiment Name: At_Ler-pi_Ovule_cDNA_P Parameter: Plant Line Value: null
  misc_feature: MA Experiment ID: 108607 Result: Down-regulated in Transcription
  misc_feature: MA Experiment 108607 PARAMETER Experiment Name: At_100uM_ABA_cDNA_P Parameter: Timepoint (hr) Value: 4
  misc_feature: MA Experiment 108607 PARAMETER Experiment Name: At_100uM_ABA_cDNA_P Parameter: Tissue Value: Aerial
  misc_feature: MA Experiment 108607 PARAMETER Experiment Name: At_100uM_ABA_cDNA_P Parameter: Treatment Value: 100uM ABA vs. No Treatment
  misc_feature: MA Experiment ID: 108608 Result: Down-regulated in Transcription
  misc_feature: MA Experiment 108608 PARAMETER Experiment Name: At_100uM_ABA_cDNA_P Parameter: Timepoint (hr) Value: 1
  misc_feature: MA Experiment 108608 PARAMETER Experiment Name: At_100uM_ABA_cDNA_P Parameter: Tissue Value: Aerial
  misc_feature: MA Experiment 108608 PARAMETER Experiment Name: At_100uM_ABA_cDNA_P Parameter: Treatment Value: 100uM ABA vs. No Treatment
  misc_feature: MA Experiment ID: 108609 Result: Down-regulated in Transcription
  misc_feature: MA Experiment 108609 PARAMETER Experiment Name: At_100uM_ABA_cDNA_P Parameter: Timepoint (hr) Value: 24
  misc_feature: MA Experiment 108609 PARAMETER Experiment Name: At_100uM_ABA_cDNA_P Parameter: Tissue Value: Aerial
  misc_feature: MA Experiment 108609 PARAMETER Experiment Name: At_100uM_ABA_cDNA_P Parameter: Treatment Value: 100uM ABA vs. No Treatment
  misc_feature: MA Experiment ID: 108667 Result: Down-regulated in Transcription
  misc_feature: MA Experiment 108667 PARAMETER Experiment Name: At_2mM_SA_cDNA_P Parameter: Plant Line Value: WS
  misc_feature: MA Experiment 108667 PARAMETER Experiment Name: At_2mM_SA_cDNA_P Parameter: Timepoint (hr) Value: 1
  misc_feature: MA Experiment 108667 PARAMETER Experiment Name: At_2mM_SA_cDNA_P Parameter: Treatment Value: 2mM SA vs. No Treatment
  misc_feature: MA Experiment ID: 20000069 Result: Down-regulated in Transcription
  misc_feature: MA Experiment 20000069 PARAMETER Experiment Name: At_100uM_ABA_Mutants_cDNA_P Parameter: Plant Line Value: CS23
  misc_feature: MA Experiment 20000069 PARAMETER Experiment Name: At_100uM_ABA_Mutants_cDNA_P Parameter: Timepoint (hr) Value: 6
  misc_feature: MA Experiment 20000069 PARAMETER Experiment Name: At_100uM_ABA_Mutants_cDNA_P Parameter: Tissue Value: Aerial
  misc_feature: MA Experiment 20000069 PARAMETER Experiment Name: At_100uM_ABA_Mutants_cDNA_P Parameter: Treatment Value: 100uM ABA vs. No Treatment
  misc_feature: MA Experiment ID: 20000070 Result: Down-regulated in Transcription
  misc_feature: MA Experiment 20000070 PARAMETER Experiment Name: At_100uM_ABA_Mutants_cDNA_P Parameter: Plant Line Value: CS24
  misc_feature: MA Experiment 20000070 PARAMETER Experiment Name: At_100uM_ABA_Mutants_cDNA_P Parameter: Timepoint (hr) Value: 6
  misc_feature: MA Experiment 20000070 PARAMETER Experiment Name: At_100uM_ABA_Mutants_cDNA_P Parameter: Tissue Value: Aerial
  misc_feature: MA Experiment 20000070 PARAMETER Experiment Name: At_100uM_ABA_Mutants_cDNA_P Parameter: Treatment Value: 100uM ABA vs. No Treatment
  misc_feature: MA Experiment ID: 20000071 Result: Down-regulated in Transcription
  misc_feature: MA Experiment 20000071 PARAMETER Experiment Name: At_100uM_ABA_Mutants_cDNA_P Parameter: Plant Line Value: CS8104
  misc_feature: MA Experiment 20000071 PARAMETER Experiment Name: At_100uM_ABA_Mutants_cDNA_P Parameter: Timepoint (hr) Value: 6
  misc_feature: MA Experiment 20000071 PARAMETER Experiment Name: At_100uM_ABA_Mutants_cDNA_P Parameter: Tissue Value: Aerial
  misc_feature: MA Experiment 20000071 PARAMETER Experiment Name: At_100uM_ABA_Mutants_cDNA_P Parameter: Treatment Value: 100uM ABA vs. No Treatment
  misc_feature: MA Experiment ID: 20000072 Result: Down-regulated in Transcription
  misc_feature: MA Experiment 20000072 PARAMETER Experiment Name: At_100uM_ABA_Mutants_cDNA_P Parameter: Plant Line Value: CS8105
  misc_feature: MA Experiment 20000072 PARAMETER Experiment Name: At_100uM_ABA_Mutants_cDNA_P Parameter: Timepoint (hr) Value: 6
  misc_feature: MA Experiment 20000072 PARAMETER Experiment Name: At_100uM_ABA_Mutants_cDNA_P Parameter: Tissue Value: Aerial
  misc_feature: MA Experiment 20000072 PARAMETER Experiment Name: At_100uM_ABA_Mutants_cDNA_P Parameter: Treatment Value: 100uM ABA vs. No Treatment
  misc_feature: MA Experiment ID: 20000086 Result: Down-regulated in Transcription
  misc_feature: MA Experiment 20000086 PARAMETER Experiment Name: At_100uM_ABA_Mutants_cDNA_P Parameter: Plant Line Value: CS22
  misc_feature: MA Experiment 20000086 PARAMETER Experiment Name: At_100uM_ABA_Mutants_cDNA_P Parameter: Timepoint (hr) Value: 6
  misc_feature: MA Experiment 20000086 PARAMETER Experiment Name: At_100uM_ABA_Mutants_cDNA_P Parameter: Tissue Value: Aerial
  misc_feature: MA Experiment 20000086 PARAMETER Experiment Name: At_100uM_ABA_Mutants_cDNA_P Parameter: Treatment Value: 100uM ABA vs. No Treatment
  misc_feature: MA Experiment ID: 20000087 Result: Down-regulated in Transcription
  misc_feature: MA Experiment 20000087 PARAMETER Experiment Name: At_100uM_ABA_Mutants_cDNA_P Parameter: Plant Line Value: WS
  misc_feature: MA Experiment 20000087 PARAMETER Experiment Name: At_100uM_ABA_Mutants_cDNA_P Parameter: Timepoint (hr) Value: 6
  misc_feature: MA Experiment 20000087 PARAMETER Experiment Name: At_100uM_ABA_Mutants_cDNA_P Parameter: Tissue Value: Aerial
  misc_feature: MA Experiment 20000087 PARAMETER Experiment Name: At_100uM_ABA_Mutants_cDNA_P Parameter: Treatment Value: 100uM ABA vs. No Treatment
  misc_feature: MA Experiment ID: 20000111 Result: Down-regulated in Transcription
  misc_feature: MA Experiment 20000111 PARAMETER Experiment Name: At_42deg_Heat_cDNA_P Parameter: Temperature (deg C) Value: 42 vs. 22
  misc_feature: MA Experiment 20000111 PARAMETER Experiment Name: At_42deg_Heat_cDNA_P Parameter: Timepoint (hr) Value: 6
  misc_feature: MA Experiment 20000111 PARAMETER Experiment Name: At_42deg_Heat_cDNA_P Parameter: Tissue Value: Aerial
  misc_feature: MA Experiment ID: 20000113 Result: Down-regulated in Transcription
  misc_feature: MA Experiment 20000113 PARAMETER Experiment Name: At_42deg_Heat_cDNA_P Parameter: Temperature (deg C) Value: 42 vs. 22
  misc_feature: MA Experiment 20000113 PARAMETER Experiment Name: At_42deg_Heat_cDNA_P Parameter: Timepoint (hr) Value: 8
  misc_feature: MA Experiment 20000113 PARAMETER Experiment Name: At_42deg_Heat_cDNA_P Parameter: Tissue Value: Aerial
  misc_feature: MA Experiment ID: 20000117 Result: Down-regulated in Transcription
  misc_feature: MA Experiment 20000117 PARAMETER Experiment Name: At_100uM_ABA_Mutants_cDNA_P Parameter: Plant Line Value: Columbia
  misc_feature: MA Experiment 20000117 PARAMETER Experiment Name: At_100uM_ABA_Mutants_cDNA_P Parameter: Timepoint (hr) Value: 6
  misc_feature: MA Experiment 20000117 PARAMETER Experiment Name: At_100uM_ABA_Mutants_cDNA_P Parameter: Tissue Value: Aerial
  misc_feature: MA Experiment 20000117 PARAMETER Experiment Name: At_100uM_ABA_Mutants_cDNA_P Parameter: Treatment Value: 100uM ABA vs. No Treatment
  misc_feature: MA Experiment ID: 20000144 Result: Down-regulated in Transcription
  misc_feature: MA Experiment 20000144 PARAMETER Experiment Name: At_42deg_Heat_cDNA_P Parameter: Temperature (deg C) Value: 42 vs. 22
  misc_feature: MA Experiment 20000144 PARAMETER Experiment Name: At_42deg_Heat_cDNA_P Parameter: Timepoint (hr) Value: 1
  misc_feature: MA Experiment 20000144 PARAMETER Experiment Name: At_42deg_Heat_cDNA_P Parameter: Tissue Value: Aerial
  misc_feature: MA Experiment ID: 20000166 Result: Down-regulated in Transcription
  misc_feature: MA Experiment 20000166 PARAMETER Experiment Name: At_100uM_ABA_P Parameter: Age (day) Value: 14
  misc_feature: MA Experiment 20000166 PARAMETER Experiment Name: At_100uM_ABA_P Parameter: Organism Value: A. thaliana
  misc_feature: MA Experiment 20000166 PARAMETER Experiment Name: At_100uM_ABA_P Parameter: Plant Line Value: WS
  misc_feature: MA Experiment 20000166 PARAMETER Experiment Name: At_100uM_ABA_P Parameter: Timepoint (hr) Value: 1
  misc_feature: MA Experiment 20000166 PARAMETER Experiment Name: At_100uM_ABA_P Parameter: Tissue Value: Aerial
  misc_feature: MA Experiment 20000166 PARAMETER Experiment Name: At_100uM_ABA_P Parameter: Treatment Value: 100uM ABA vs. No Treatment
  misc_feature: MA Experiment ID: 20000169 Result: Down-regulated in Transcription
  misc_feature: MA Experiment 20000169 PARAMETER Experiment Name: At_100uM_ABA_P Parameter: Age (day) Value: 14
  misc_feature: MA Experiment 20000169 PARAMETER Experiment Name: At_100uM_ABA_P Parameter: Organism Value: A. thaliana
  misc_feature: MA Experiment 20000169 PARAMETER Experiment Name: At_100uM_ABA_P Parameter: Plant Line Value: WS
  misc_feature: MA Experiment 20000169 PARAMETER Experiment Name: At_100uM_ABA_P Parameter: Timepoint (hr) Value: 6
  misc_feature: MA Experiment 20000169 PARAMETER Experiment Name: At_100uM_ABA_P Parameter: Tissue Value: Aerial
  misc_feature: MA Experiment 20000169 PARAMETER Experiment Name: At_100uM_ABA_P Parameter: Treatment Value: 100uM ABA vs. No Treatment
  misc_feature: MA Experiment ID: 20000171 Result: Down-regulated in Transcription
  misc_feature: MA Experiment 20000171 PARAMETER Experiment Name: At_42deg_Heat_P Parameter: Age (day) Value: 14
  misc_feature: MA Experiment 20000171 PARAMETER Experiment Name: At_42deg_Heat_P Parameter: Organism Value: A. thaliana
  misc_feature: MA Experiment 20000171 PARAMETER Experiment Name: At_42deg_Heat_P Parameter: Plant Line Value: WS
  misc_feature: MA Experiment 20000171 PARAMETER Experiment Name: At_42deg_Heat_P Parameter: Temperature (deg C) Value: 42 vs. 22
  misc_feature: MA Experiment 20000171 PARAMETER Experiment Name: At_42deg_Heat_P Parameter: Timepoint (hr) Value: 1
  misc_feature: MA Experiment 20000171 PARAMETER Experiment Name: At_42deg_Heat_P Parameter: Tissue Value: Aerial
  misc_feature: MA Experiment ID: 20000173 Result: Down-regulated in Transcription
  misc_feature: MA Experiment 20000173 PARAMETER Experiment Name: At_42deg_Heat_P Parameter: Age (day) Value: 14
  misc_feature: MA Experiment 20000173 PARAMETER Experiment Name: At_42deg_Heat_P Parameter: Organism Value: A. thaliana
  misc_feature: MA Experiment 20000173 PARAMETER Experiment Name: At_42deg_Heat_P Parameter: Plant Line Value: WS
  misc_feature: MA Experiment 20000173 PARAMETER Experiment Name: At_42deg_Heat_P Parameter: Temperature (deg C) Value: 42 vs. 22
  misc_feature: MA Experiment 20000173 PARAMETER Experiment Name: At_42deg_Heat_P Parameter: Timepoint (hr) Value: 6
  misc_feature: MA Experiment 20000173 PARAMETER Experiment Name: At_42deg_Heat_P Parameter: Tissue Value: Aerial
  misc_feature: MA Experiment ID: 20000185 Result: Down-regulated in Transcription
  misc_feature: MA Experiment 20000185 PARAMETER Experiment Name: At_Roots__P Parameter: Age (day) Value: 7 vs. 21
  misc_feature: MA Experiment 20000185 PARAMETER Experiment Name: At_Roots__P Parameter: Organism Value: A. thaliana
  misc_feature: MA Experiment 20000185 PARAMETER Experiment Name: At_Roots__P Parameter: Tissue Value: Roots vs. Whole Plant
  misc_feature: MA Experiment ID: 20000224 Result: Up-regulated in Transcription
  misc_feature: MA Experiment ID: 20000234 Result: Down-regulated in Transcription
  misc_feature: MA Experiment 20000234 PARAMETER Experiment Name: At_Siliques_P Parameter: Age (day) Value: 21
  misc_feature: MA Experiment 20000234 PARAMETER Experiment Name: At_Siliques_P Parameter: Organism Value: A. thaliana
  misc_feature: MA Experiment 20000234 PARAMETER Experiment Name: At_Siliques_P Parameter: Plant Line Value: WS
  misc_feature: MA Experiment 20000234 PARAMETER Experiment Name: At_Siliques_P Parameter: Tissue Value: Less Than 5mm Siliques vs. Whole Plant
  misc_feature: MA Experiment ID: 20000235 Result: Down-regulated in Transcription
  misc_feature: MA Experiment 20000235 PARAMETER Experiment Name: At_Siliques_P Parameter: Age (day) Value: 21
  misc_feature: MA Experiment 20000235 PARAMETER Experiment Name: At_Siliques_P Parameter: Organism Value: A. thaliana
  misc_feature: MA Experiment 20000235 PARAMETER Experiment Name: At_Siliques_P Parameter: Plant Line Value: WS
  misc_feature: MA Experiment 20000235 PARAMETER Experiment Name: At_Siliques_P Parameter: Tissue Value: 5-10mm Siliques vs. Whole Plant
  misc_feature: MA Experiment ID: 20000264 Result: Down-regulated in Transcription
  misc_feature: MA Experiment 20000264 PARAMETER Experiment Name: At_Open_Flower_P Parameter: Age (day) Value: 21
  misc_feature: MA Experiment 20000264 PARAMETER Experiment Name: At_Open_Flower_P Parameter: Plant Line Value: WS
  misc_feature: MA Experiment 20000264 PARAMETER Experiment Name: At_Open_Flower_P Parameter: Tissue Value: Open Flower vs. Whole Plant
  misc_feature: MA Experiment ID: 20000265 Result: Down-regulated in Transcription
  misc_feature: MA Experiment 20000265 PARAMETER Experiment Name: At_Open_Flower_P Parameter: Age (day) Value: 21
  misc_feature: MA Experiment 20000265 PARAMETER Experiment Name: At_Open_Flower_P Parameter: Plant Line Value: WS
  misc_feature: MA Experiment 20000265 PARAMETER Experiment Name: At_Open_Flower_P Parameter: Tissue Value: Closed Flower vs. Whole Plant
  misc_feature: MA Experiment ID: 20000267 Result: Down-regulated in Transcription
  misc_feature: MA Experiment 20000267 PARAMETER Experiment Name: At_Drought_P Parameter: Age (day) Value: 7
  misc_feature: MA Experiment 20000267 PARAMETER Experiment Name: At_Drought_P Parameter: Organism Value: A. thaliana
  misc_feature: MA Experiment 20000267 PARAMETER Experiment Name: At_Drought_P Parameter: Plant Line Value: WS
  misc_feature: MA Experiment 20000267 PARAMETER Experiment Name: At_Drought_P Parameter: Timepoint (hr) Value: 6
  misc_feature: MA Experiment 20000267 PARAMETER Experiment Name: At_Drought_P Parameter: Tissue Value: Whole Plant
  misc_feature: MA Experiment 20000267 PARAMETER Experiment Name: At_Drought_P Parameter: Treatment Value: Drought vs. No Drought
  misc_feature: MA Experiment ID: 20000268 Result: Down-regulated in Transcription
  misc_feature: MA Experiment 20000268 PARAMETER Experiment Name: At_100mM_NaCl__P Parameter: Age (day) Value: 14
  misc_feature: MA Experiment 20000268 PARAMETER Experiment Name: At_100mM_NaCl__P Parameter: Organism Value: A. thaliana
  misc_feature: MA Experiment 20000268 PARAMETER Experiment Name: At_100mM_NaCl__P Parameter: Plant Line Value: WS
  misc_feature: MA Experiment 20000268 PARAMETER Experiment Name: At_100mM_NaCl__P Parameter: Timepoint (hr) Value: 6
  misc_feature: MA Experiment 20000268 PARAMETER Experiment Name: At_100mM_NaCl__P Parameter: Tissue Value: Whole Plant
  misc_feature: MA Experiment 20000268 PARAMETER Experiment Name: At_100mM_NaCl__P Parameter: Treatment Value: 100mM NaCl vs. No Treatment
  misc_feature: MA Experiment ID: 20000286 Result: Down-regulated in Transcription
  misc_feature: MA Experiment 20000286 PARAMETER Experiment Name: At_Open_Flower_P Parameter: Age (day) Value: 21
  misc_feature: MA Experiment 20000286 PARAMETER Experiment Name: At_Open_Flower_P Parameter: Plant Line Value: WS
  misc_feature: MA Experiment 20000286 PARAMETER Experiment Name: At_Open_Flower_P Parameter: Tissue Value: Half Open vs. Whole Plant
  misc_feature: MA Experiment ID: 20000436 Result: Down-regulated in Transcription
  misc_feature: MA Experiment 20000436 PARAMETER Experiment Name: At_Drought_P Parameter: Age (day) Value: 7
  misc_feature: MA Experiment 20000436 PARAMETER Experiment Name: At_Drought_P Parameter: Organism Value: A. thaliana
  misc_feature: MA Experiment 20000436 PARAMETER Experiment Name: At_Drought_P Parameter: Plant Line Value: WS
  misc_feature: MA Experiment 20000436 PARAMETER Experiment Name: At_Drought_P Parameter: Timepoint (hr) Value: 12
  misc_feature: MA Experiment 20000436 PARAMETER Experiment Name: At_Drought_P Parameter: Tissue Value: Whole Plant
  misc_feature: MA Experiment 20000436 PARAMETER Experiment Name: At_Drought_P Parameter: Treatment Value: Drought vs. No Drought
  misc_feature: MA Experiment ID: 20000437 Result: Down-regulated in Transcription
  misc_feature: MA Experiment 20000437 PARAMETER Experiment Name: At_Drought_P Parameter: Age (day) Value: 8
  misc_feature: MA Experiment 20000437 PARAMETER Experiment Name: At_Drought_P Parameter: Organism Value: A. thaliana
  misc_feature: MA Experiment 20000437 PARAMETER Experiment Name: At_Drought_P Parameter: Plant Line Value: WS
  misc_feature: MA Experiment 20000437 PARAMETER Experiment Name: At_Drought_P Parameter: Timepoint (hr) Value: 24
  misc_feature: MA Experiment 20000437 PARAMETER Experiment Name: At_Drought_P Parameter: Tissue Value: Whole Plant
  misc_feature: MA Experiment 20000437 PARAMETER Experiment Name: At_Drought_P Parameter: Treatment Value: Drought vs. No Drought
  misc_feature: MA Experiment ID: 20000439 Result: Down-regulated in Transcription
  misc_feature: MA Experiment 20000439 PARAMETER Experiment Name: At_Roots__P Parameter: Age (day) Value: 14 vs. 21
  misc_feature: MA Experiment 20000439 PARAMETER Experiment Name: At_Roots__P Parameter: Organism Value: A. thaliana
  misc_feature: MA Experiment 20000439 PARAMETER Experiment Name: At_Roots__P Parameter: Tissue Value: Roots vs. Whole Plant
  misc_feature: MA Experiment ID: 20000441 Result: Up-regulated in Transcription
  misc_feature: MA Experiment 20000441 PARAMETER Experiment Name: At_1uM_BR-BRZ__P Parameter: Tissue Value: Shoot Apices
  misc_feature: MA Experiment 20000441 PARAMETER Experiment Name: At_1uM_BR-BRZ__P Parameter: Treatment Value: 1uM BR vs. No Treatment
  misc_feature: MA Experiment ID: 20000453 Result: Down-regulated in Transcription
  misc_feature: MA Experiment 20000453 PARAMETER Experiment Name: At_100uM_ABA_P Parameter: Age (day) Value: 15
  misc_feature: MA Experiment 20000453 PARAMETER Experiment Name: At_100uM_ABA_P Parameter: Organism Value: A. thaliana
  misc_feature: MA Experiment 20000453 PARAMETER Experiment Name: At_100uM_ABA_P Parameter: Plant Line Value: WS
  misc_feature: MA Experiment 20000453 PARAMETER Experiment Name: At_100uM_ABA_P Parameter: Timepoint (hr) Value: 24
  misc_feature: MA Experiment 20000453 PARAMETER Experiment Name: At_100uM_ABA_P Parameter: Tissue Value: Aerial
  misc_feature: MA Experiment 20000453 PARAMETER Experiment Name: At_100uM_ABA_P Parameter: Treatment Value: 100uM ABA vs. No Treatment
  misc_feature: MA Experiment ID: 20000495 Result: Down-regulated in Transcription
  misc_feature: MA Experiment 20000495 PARAMETER Experiment Name: At_Guard_Cells_P Parameter: Harvest Date Value: 8/2/2002
  misc_feature: MA Experiment 20000495 PARAMETER Experiment Name: At_Guard_Cells_P Parameter: Organism Value: A. thaliana
  misc_feature: MA Experiment 20000495 PARAMETER Experiment Name: At_Guard_Cells_P Parameter: Tissue Value: Guard Cells vs. Leaves
  misc_feature: MA Experiment ID: 20000496 Result: Down-regulated in Transcription
  misc_feature: MA Experiment 20000496 PARAMETER Experiment Name: At_Guard_Cells_P Parameter: Harvest Date Value: 7/19/2002
  misc_feature: MA Experiment 20000496 PARAMETER Experiment Name: At_Guard_Cells_P Parameter: Organism Value: Canola
  misc_feature: MA Experiment 20000496 PARAMETER Experiment Name: At_Guard_Cells_P Parameter: Tissue Value: Guard Cells vs. Leaves
  misc_feature: MA Experiment ID: 20000709 Result: Up-regulated in Transcription
  misc_feature: MA Experiment 20000709 PARAMETER Experiment Name: At_15mM_NH4NO3_L-to-H_P Parameter: Age (hr) Value: 14
  misc_feature: MA Experiment 20000709 PARAMETER Experiment Name: At_15mM_NH4NO3_L-to-H_P Parameter: Organism Value: A. thaliana
  misc_feature: MA Experiment 20000709 PARAMETER Experiment Name: At_15mM_NH4NO3_L-to-H_P Parameter: Plant Line Value: WS
  misc_feature: MA Experiment 20000709 PARAMETER Experiment Name: At_15mM_NH4NO3_L-to-H_P Parameter: Timepoint (hr) Value: 4
  misc_feature: MA Experiment 20000709 PARAMETER Experiment Name: At_15mM_NH4NO3_L-to-H_P Parameter: Tissue Value: Aerial
  misc_feature: MA Experiment 20000709 PARAMETER Experiment Name: At_15mM_NH4NO3_L-to-H_P Parameter: Treatment Value: 15mM NH4NO3 vs. 30mM Mannitol
  misc_feature: MA Experiment ID: 20000794 Result: Down-regulated in Transcription
  misc_feature: MA Experiment 20000794 PARAMETER Experiment Name: At_Petals_P Parameter: Age (day) Value: 23-25 days
  misc_feature: MA Experiment 20000794 PARAMETER Experiment Name: At_Petals_P Parameter: Plant Line Value: WS
  misc_feature: MA Experiment 20000794 PARAMETER Experiment Name: At_Petals_P Parameter: Tissue Value: Petals vs. Whole plant
  misc_feature: MA Experiment ID: 20001554 Result: Down-regulated in Transcription
  misc_feature: MA Experiment 20001554 PARAMETER Experiment Name: At_Drought_Soil_Dry_P Parameter: Age (day) Value: 21
  misc_feature: MA Experiment 20001554 PARAMETER Experiment Name: At_Drought_Soil_Dry_P Parameter: Organism Value: A. thaliana
  misc_feature: MA Experiment 20001554 PARAMETER Experiment Name: At_Drought_Soil_Dry_P Parameter: Plant Line Value: WS
  misc_feature: MA Experiment 20001554 PARAMETER Experiment Name: At_Drought_Soil_Dry_P Parameter: Post Timepoint (hr) Value: None
  misc_feature: MA Experiment 20001554 PARAMETER Experiment Name: At_Drought_Soil_Dry_P Parameter: Post-Treatment Value: None
  misc_feature: MA Experiment 20001554 PARAMETER Experiment Name: At_Drought_Soil_Dry_P Parameter: Timepoint (day) Value: 7
  misc_feature: MA Experiment 20001554 PARAMETER Experiment Name: At_Drought_Soil_Dry_P Parameter: Treatment Value: Drought vs. No Drought
  misc_feature: MA Experiment ID: 20001555 Result: Down-regulated in Transcription
  misc_feature: MA Experiment 20001555 PARAMETER Experiment Name: At_Drought_Soil_Dry_P Parameter: Age (day) Value: 24
  misc_feature: MA Experiment 20001555 PARAMETER Experiment Name: At_Drought_Soil_Dry_P Parameter: Organism Value: A. thaliana
  misc_feature: MA Experiment 20001555 PARAMETER Experiment Name: At_Drought_Soil_Dry_P Parameter: Plant Line Value: WS
  misc_feature: MA Experiment 20001555 PARAMETER Experiment Name: At_Drought_Soil_Dry_P Parameter: Post Timepoint (hr) Value: None
  misc_feature: MA Experiment 20001555 PARAMETER Experiment Name: At_Drought_Soil_Dry_P Parameter: Post-Treatment Value: None
  misc_feature: MA Experiment 20001555 PARAMETER Experiment Name: At_Drought_Soil_Dry_P Parameter: Timepoint (day) Value: 10
  misc_feature: MA Experiment 20001555 PARAMETER Experiment Name: At_Drought_Soil_Dry_P Parameter: Treatment Value: Drought vs. No Drought
  misc_feature: MA Experiment ID: 20001556 Result: Down-regulated in Transcription
  misc_feature: MA Experiment 20001556 PARAMETER Experiment Name: At_Drought_Soil_Dry_P Parameter: Age (day) Value: 26
  misc_feature: MA Experiment 20001556 PARAMETER Experiment Name: At_Drought_Soil_Dry_P Parameter: Organism Value: A. thaliana
  misc_feature: MA Experiment 20001556 PARAMETER Experiment Name: At_Drought_Soil_Dry_P Parameter: Plant Line Value: WS
  misc_feature: MA Experiment 20001556 PARAMETER Experiment Name: At_Drought_Soil_Dry_P Parameter: Post Timepoint (hr) Value: None
  misc_feature: MA Experiment 20001556 PARAMETER Experiment Name: At_Drought_Soil_Dry_P Parameter: Post-Treatment Value: None
  misc_feature: MA Experiment 20001556 PARAMETER Experiment Name: At_Drought_Soil_Dry_P Parameter: Timepoint (day) Value: 12
  misc_feature: MA Experiment 20001556 PARAMETER Experiment Name: At_Drought_Soil_Dry_P Parameter: Treatment Value: Drought vs. No Drought
  misc_feature: MA Experiment ID: 20001560 Result: Down-regulated in Transcription
  misc_feature: MA Experiment 20001560 PARAMETER Experiment Name: At_Drought_Soil_Dry_P Parameter: Age (day) Value: 28
  misc_feature: MA Experiment 20001560 PARAMETER Experiment Name: At_Drought_Soil_Dry_P Parameter: Organism Value: A. thaliana
  misc_feature: MA Experiment 20001560 PARAMETER Experiment Name: At_Drought_Soil_Dry_P Parameter: Plant Line Value: WS
  misc_feature: MA Experiment 20001560 PARAMETER Experiment Name: At_Drought_Soil_Dry_P Parameter: Post Timepoint (hr) Value: None
  misc_feature: MA Experiment 20001560 PARAMETER Experiment Name: At_Drought_Soil_Dry_P Parameter: Post-Treatment Value: None
  misc_feature: MA Experiment 20001560 PARAMETER Experiment Name: At_Drought_Soil_Dry_P Parameter: Timepoint (day) Value: 14
  misc_feature: MA Experiment 20001560 PARAMETER Experiment Name: At_Drought_Soil_Dry_P Parameter: Treatment Value: Drought vs. No Drought
  misc_feature: MA Experiment ID: 20001755 Result: Up-regulated in Transcription
  misc_feature: MA Experiment 20001755 PARAMETER Experiment Name: At_50mM_NH4NO3_L-to-H_P Parameter: Timepoint (hr) Value: 2
  misc_feature: MA Experiment 20001755 PARAMETER Experiment Name: At_50mM_NH4NO3_L-to-H_P Parameter: Tissue Value: Leaf
  misc_feature: MA Experiment 20001755 PARAMETER Experiment Name: At_50mM_NH4NO3_L-to-H_P Parameter: Treatment Value: 50mM NH4NO3 vs 100mM Mannitol
  misc_feature: MA Experiment ID: 20001904 Result: Down-regulated in Transcription
  misc_feature: MA Experiment 20001904 PARAMETER Experiment Name: At_Drought_Reproduction_P Parameter: Age (day) Value: 37
  misc_feature: MA Experiment 20001904 PARAMETER Experiment Name: At_Drought_Reproduction_P Parameter: Organism Value: A. thaliana
  misc_feature: MA Experiment 20001904 PARAMETER Experiment Name: At_Drought_Reproduction_P Parameter: Plant Line Value: WS
  misc_feature: MA Experiment 20001904 PARAMETER Experiment Name: At_Drought_Reproduction_P Parameter: Timepoint (day) Value: 7
  misc_feature: MA Experiment 20001904 PARAMETER Experiment Name: At_Drought_Reproduction_P Parameter: Tissue Value: Rosettes
  misc_feature: MA Experiment 20001904 PARAMETER Experiment Name: At_Drought_Reproduction_P Parameter: Treatment Value: Drought vs. No Drought
tatagcaaatcctcttttgctttaaacccaccaaataactcagagcttttttgcattttttcccattctctattttgttttgtacttttggtctcactttaaaagatcataagttgaaagatttctgcagagaacaatatgttggaaggtcttgtctctcaagaaagcttgtccttaaactctatggacatgtctgtacttgaaaggcttaaatgggtacaacagcaacaacagcaactgcaacaagttgtgtcccatagcagtaataattcacctgaacttcttcagatacttcagttccatggaagcaacaatgatgagttgttggagagtagtttcagccaatttcaaatgcttggatctggttttggaccaaactataacatgggttttggtcctccacatgaatccatttcaagaacaagtagctgccatatggaacctgtggatacaatggaggttttgttgaagaccggtgaagaaaccagagccgttgccttgaagaacaagagaaaaccagaggttaagacaagggaagagcaaaagacagagaagaagatcaaagtagaggctgagacagagtcaagcatgaaaggaaaatcaaacatgggaaacactgaagcatcttcagacacttcaaaggagacatcgaaaggagcttcagagaatcagaaattagattatatccacgtgagagctcgtcgaggccaagccactgacagacacagcttagcagaaagggcgagaagagaaaagatcagcaagaaaatgaaatatctgcaagatattgtgcctggatgcaataaggtcacaggaaaagctggtatgcttgatgagatcatcaattatgttcaatgtctccaaagacaagtcgagttcctgtcgatgaaacttgctgtcttgaacccggaactagagcttgccgtggaagatgtatccgtaaaacaggcttactttacaaatgtagttgcttcaaagcaatcaataatggttgatgtgccattgtttccgttagaccagcaaggatctctagatttgtctgcgataaacccgaaccaaacgacatctatcgaagctccatctggaagctgggaaactcaatcacagagtctctacaacacatctagcctcggttttcattactaagcaagattcattgaaacaacatggttgacatcaatcaatcatcaaaatcagaagcaaattctattacatttgctcatcaaagtagtaatttcgaaatttggttaatgcattatcctttgatccttgttttctgatatttaaaccagaagaactggagatagcaatccaatgatcttgtcaccatcaatctttgtgtatagattatatagagagatagataaatatgttttagaggagttatagatatatatcatatttgtagaagaaagagagaaaactcttgtggtaattacaattcttgtttgtttttttggatatataaatatctaagaaaattataaa

SEQ ID NO: 104922 - protein, 335 aa, Arabidopsis thaliana
  peptide (1)..(335): Ceres Seq. ID no. 13616053
  misc_feature (192)..(242): Pfam Name: Helix-loop-helix DNA-binding domain Pfam Description: Helix-loop-helix DNA-binding domain
  misc_feature (1)..(335): Homolog of NCBI NO: 18398703 NR Description: bHLH064 putative bHLH transcription factor thaliana] >gi|15724318|gb|AAL06552.1|AF412099_1 [Arabidopsis thaliana] >gi|18700242|gb|AAL77731.1|
  misc_feature (1)..(335): Homolog of NCBI NO: 30680338 NR Description: bHLH064 putative bHLH transcription factor
  misc_feature (18)..(335): Homolog of NCBI NO: 20127068 NR Description: putative bHLH transcription factor [Arabidopsis
  misc_feature (18)..(321): Homolog of NCBI NO: 25411856 NR Description: hypothetical protein At2g18300 [imported] -
  misc_feature (85)..(328): Homolog of NCBI NO: 30690689 NR Description: expressed protein [Arabidopsis thaliana]
  misc_feature (85)..(328): Homolog of NCBI NO: 15234436 NR Description: expressed protein [Arabidopsis thaliana] unknown protein [Arabidopsis thaliana]
  misc_feature (85)..(328): Homolog of NCBI NO: 25407737 NR Description: hypothetical protein AT4g36540 [imported] - thaliana >gi|4006909|emb|CAB16839.1| putative protein thaliana] >gi|7270602|emb|CAB80320.1| putative protein
  misc_feature (85)..(328): Homolog of NCBI NO: 15451016 NR Description: Unknown protein [Arabidopsis thaliana]
  misc_feature (85)..(328): Homolog of NCBI NO: 34391435 NR Description: putative bHLH transcription factor [Arabidopsis
  misc_feature (85)..(328): Homolog of NCBI NO: 20127056 NR Description: putative bHLH transcription factor [Arabidopsis
MLEGLVSQESLSLNSMDMSVLERLKWVQQQQQQLQQVVSHSSNNSPELLQILQFHGSNNDELLESSFSQFQMLGSGFGPNYNMGFGPPHESISRTSSCHMEPVDTMEVLLKTGEETRAVALKNKRKPEVKTREEQKTEKKIKVEAETESSMKGKSNMGNTEASSDTSKETSKGASENQKLDYIHVRARRGQATDRHSLAERARREKISKKMKYLQDIVPGCNKVTGKAGMLDEIINYVQCLQRQVEFLSMKLAVLNPELELAVEDVSVKQAYFTNVVASKQSIMVDVPLFPLDQQGSLDLSAINPNQTTSIEAPSGSWETQSQSLYNTSSLGFHY

SEQ ID NO: 104923 - protein, 320 aa, Arabidopsis thaliana
  peptide (1)..(320): Ceres Seq. ID no. 13616054
  misc_feature (177)..(227): Pfam Name: Helix-loop-helix DNA-binding domain Pfam Description: Helix-loop-helix DNA-binding domain
  misc_feature (1)..(320): Homolog of NCBI NO: 18398703 NR Description: bHLH064 putative bHLH transcription factor thaliana] >gi|15724318|gb|AAL06552.1|AF412099_1 [Arabidopsis thaliana] >gi|18700242|gb|AAL77731.1|
  misc_feature (1)..(320): Homolog of NCBI NO: 30680338 NR Description: bHLH064 putative bHLH transcription factor
  misc_feature (3)..(320): Homolog of NCBI NO: 20127068 NR Description: putative bHLH transcription factor [Arabidopsis
  misc_feature (3)..(306): Homolog of NCBI NO: 25411856 NR Description: hypothetical protein At2g18300 [imported] -
  misc_feature (70)..(313): Homolog of NCBI NO: 30690689 NR Description: expressed protein [Arabidopsis thaliana]
  misc_feature (70)..(313): Homolog of NCBI NO: 15234436 NR Description: expressed protein [Arabidopsis thaliana] unknown protein [Arabidopsis thaliana]
  misc_feature (70)..(313): Homolog of NCBI NO: 15451016 NR Description: Unknown protein [Arabidopsis thaliana]
  misc_feature (70)..(313): Homolog of NCBI NO: 25407737 NR Description: hypothetical protein AT4g36540 [imported] - thaliana >gi|4006909|emb|CAB16839.1| putative protein thaliana] >gi|7270602|emb|CAB80320.1| putative protein
  misc_feature (70)..(313): Homolog of NCBI NO: 34391435 NR Description: putative bHLH transcription factor [Arabidopsis
  misc_feature (70)..(313): Homolog of NCBI NO: 20127056 NR Description: putative bHLH transcription factor [Arabidopsis
MDMSVLERLKWVQQQQQQLQQVVSHSSNNSPELLQILQFHGSNNDELLESSFSQFQMLGSGFGPNYNMGFGPPHESISRTSSCHMEPVDTMEVLLKTGEETRAVALKNKRKPEVKTREEQKTEKKIKVEAETESSMKGKSNMGNTEASSDTSKETSKGASENQKLDYIHVRARRGQATDRHSLAERARREKISKKMKYLQDIVPGCNKVTGKAGMLDEIINYVQCLQRQVEFLSMKLAVLNPELELAVEDVSVKQAYFTNVVASKQSIMVDVPLFPLDQQGSLDLSAINPNQTTSIEAPSGSWETQSQSLYNTSSLGFHY

SEQ ID NO: 104924 - protein, 318 aa, Arabidopsis thaliana
  peptide (1)..(318): Ceres Seq. ID no. 13616055
  misc_feature (175)..(225): Pfam Name: Helix-loop-helix DNA-binding domain Pfam Description: Helix-loop-helix DNA-binding domain
  misc_feature (1)..(318): Homolog of NCBI NO: 18398703 NR Description: bHLH064 putative bHLH transcription factor thaliana] >gi|15724318|gb|AAL06552.1|AF412099_1 [Arabidopsis thaliana] >gi|18700242|gb|AAL77731.1|
  misc_feature (1)..(318): Homolog of NCBI NO: 30680338 NR Description: bHLH064 putative bHLH transcription factor
  misc_feature (1)..(318): Homolog of NCBI NO: 20127068 NR Description: putative bHLH transcription factor [Arabidopsis
  misc_feature (1)..(304): Homolog of NCBI NO: 25411856 NR Description: hypothetical protein At2g18300 [imported] -
  misc_feature (68)..(311): Homolog of NCBI NO: 30690689 NR Description: expressed protein [Arabidopsis thaliana]
  misc_feature (68)..(311): Homolog of NCBI NO: 15234436 NR Description: expressed protein [Arabidopsis thaliana] unknown protein [Arabidopsis thaliana]
  misc_feature (68)..(311): Homolog of NCBI NO: 15451016 NR Description: Unknown protein [Arabidopsis thaliana]
  misc_feature (68)..(311): Homolog of NCBI NO: 25407737 NR Description: hypothetical protein AT4g36540 [imported] - thaliana >gi|4006909|emb|CAB16839.1| putative protein thaliana] >gi|7270602|emb|CAB80320.1| putative protein
  misc_feature (68)..(311): Homolog of NCBI NO: 34391435 NR Description: putative bHLH transcription factor [Arabidopsis
  misc_feature (68)..(311): Homolog of NCBI NO: 20127056 NR Description: putative bHLH transcription factor [Arabidopsis
MSVLERLKWVQQQQQQLQQVVSHSSNNSPELLQILQFHGSNNDELLESSFSQFQMLGSGFGPNYNMGFGPPHESISRTSSCHMEPVDTMEVLLKTGEETRAVALKNKRKPEVKTREEQKTEKKIKVEAETESSMKGKSNMGNTEASSDTSKETSKGASENQKLDYIHVRARRGQATDRHSLAERARREKISKKMKYLQDIVPGCNKVTGKAGMLDEIINYVQCLQRQVEFLSMKLAVLNPELELAVEDVSVKQAYFTNVVASKQSIMVDVPLFPLDQQGSLDLSAINPNQTTSIEAPSGSWETQSQSLYNTSSLGFHY

SEQ ID NO: 104925 - DNA, 1063 bp, Arabidopsis thaliana
  misc_feature (1)..(1063): Ceres Seq. ID no. 13616056
  misc_feature: MA Experiment ID: 20000069 Result: Up-regulated in Transcription
  misc_feature: MA Experiment 20000069 PARAMETER Experiment Name: At_100uM_ABA_Mutants_cDNA_P Parameter: Plant Line Value: CS23
  misc_feature: MA Experiment 20000069 PARAMETER Experiment Name: At_100uM_ABA_Mutants_cDNA_P Parameter: Timepoint (hr) Value: 6
  misc_feature: MA Experiment 20000069 PARAMETER Experiment Name: At_100uM_ABA_Mutants_cDNA_P Parameter: Tissue Value: Aerial
  misc_feature: MA Experiment 20000069 PARAMETER Experiment Name: At_100uM_ABA_Mutants_cDNA_P Parameter: Treatment Value: 100uM ABA vs. No Treatment
  misc_feature: MA Experiment ID: 20000070 Result: Up-regulated in Transcription
  misc_feature: MA Experiment 20000070 PARAMETER Experiment Name: At_100uM_ABA_Mutants_cDNA_P Parameter: Plant Line Value: CS24
  misc_feature: MA Experiment 20000070 PARAMETER Experiment Name: At_100uM_ABA_Mutants_cDNA_P Parameter: Timepoint (hr) Value: 6
  misc_feature: MA Experiment 20000070 PARAMETER Experiment Name: At_100uM_ABA_Mutants_cDNA_P Parameter: Tissue Value: Aerial
  misc_feature: MA Experiment 20000070 PARAMETER Experiment Name: At_100uM_ABA_Mutants_cDNA_P Parameter: Treatment Value: 100uM ABA vs. No Treatment
  misc_feature: MA Experiment ID: 20000088 Result: Up-regulated in Transcription
  misc_feature: MA Experiment 20000088 PARAMETER Experiment Name: At_100uM_ABA_Mutants_cDNA_P Parameter: Plant Line Value: Landsberg
  misc_feature: MA Experiment 20000088 PARAMETER Experiment Name: At_100uM_ABA_Mutants_cDNA_P Parameter: Timepoint (hr) Value: 6
  misc_feature: MA Experiment 20000088 PARAMETER Experiment Name: At_100uM_ABA_Mutants_cDNA_P Parameter: Tissue Value: Aerial
  misc_feature: MA Experiment 20000088 PARAMETER Experiment Name: At_100uM_ABA_Mutants_cDNA_P Parameter: Treatment Value: 100uM ABA vs. No Treatment
  misc_feature: MA Experiment ID: 20000180 Result: Up-regulated in Transcription
  misc_feature: MA Experiment 20000180 PARAMETER Experiment Name: At_Germinating_Seeds_P Parameter: Age (hr) Value: 24 vs. 0
  misc_feature: MA Experiment 20000180 PARAMETER Experiment Name: At_Germinating_Seeds_P Parameter: Tissue Value: Germinating Seeds
  misc_feature: MA Experiment ID: 20000184 Result: Down-regulated in Transcription
  misc_feature: MA Experiment 20000184 PARAMETER Experiment Name: At_Shoots__P Parameter: Age (day) Value: 7
  misc_feature: MA Experiment 20000184 PARAMETER Experiment Name: At_Shoots__P Parameter: Tissue Value: Shoots vs. Whole Plant
  misc_feature: MA Experiment ID: 20000213 Result: Up-regulated in Transcription
  misc_feature: MA Experiment 20000213 PARAMETER Experiment Name: At_4deg_Cold_P Parameter: Timepoint (hr) Value: 2
  misc_feature: MA Experiment ID: 20000234 Result: Down-regulated in Transcription
  misc_feature: MA Experiment 20000234 PARAMETER Experiment Name: At_Siliques_P Parameter: Age (day) Value: 21
  misc_feature: MA Experiment 20000234 PARAMETER Experiment Name: At_Siliques_P Parameter: Organism Value: A. thaliana
  misc_feature: MA Experiment 20000234 PARAMETER Experiment Name: At_Siliques_P Parameter: Plant Line Value: WS
  misc_feature: MA Experiment 20000234 PARAMETER Experiment Name: At_Siliques_P Parameter: Tissue Value: Less Than 5mm Siliques vs. Whole Plant
  misc_feature: MA Experiment ID: 20000235 Result: Down-regulated in Transcription
  misc_feature: MA Experiment 20000235 PARAMETER Experiment Name: At_Siliques_P Parameter: Age (day) Value: 21
  misc_feature: MA Experiment 20000235 PARAMETER Experiment Name: At_Siliques_P Parameter: Organism Value: A. thaliana
  misc_feature: MA Experiment 20000235 PARAMETER Experiment Name: At_Siliques_P Parameter: Plant Line Value: WS
  misc_feature: MA Experiment 20000235 PARAMETER Experiment Name: At_Siliques_P Parameter: Tissue Value: 5-10mm Siliques vs. Whole Plant
  misc_feature: MA Experiment ID: 20000437 Result: Up-regulated in Transcription
  misc_feature: MA Experiment 20000437 PARAMETER Experiment Name: At_Drought_P Parameter: Age (day) Value: 8
  misc_feature: MA Experiment 20000437 PARAMETER Experiment Name: At_Drought_P Parameter: Organism Value: A. thaliana
  misc_feature: MA Experiment 20000437 PARAMETER Experiment Name: At_Drought_P Parameter: Plant Line Value: WS
  misc_feature: MA Experiment 20000437 PARAMETER Experiment Name: At_Drought_P Parameter: Timepoint (hr) Value: 24
  misc_feature: MA Experiment 20000437 PARAMETER Experiment Name: At_Drought_P Parameter: Tissue Value: Whole Plant
  misc_feature: MA Experiment 20000437 PARAMETER Experiment Name: At_Drought_P Parameter: Treatment Value: Drought vs. No Drought
atcatcttcattttctctataggtttatgagaagctaaagctatgatgatttctttaatcaaaatagcttagggttttggagagagattactaagaaagttttaatgtttgtttaagagaaaagttatatattagggttttctttattcagaagcttcaagatcagaaaagatggaagttagagagaagaaagatgagaaaatggagatgacaagaagaaaatcatcagctctagatcatcatcgtcttcctccgtacacttactcccaaaccgccaacaaagagaaacccaccaccaaaagaaacgggtcggacccggatccggatccggatcttgatactaacccaatttctatatctcatgctccaagatcatacgctaggcctcaaactacttctccggggaaggcaaggtatagagaatgccaaaagaatcacgcggcgagctccggtggacacgttgtcgacggttgcggcgagtttatgtcttccggggaagaaggcacggtggagtctcttctttgtgcagcttgtgattgccaccggagcttccatagaaaagagatcgatggtttgtttgttgtcaatttcaatagctttggccattcacagagaccactcggaagccgccacgtgtctccgataatgatgagttttggtggtggtggtggttgtgcggcggagtcatcgacggaggatctaaacaagtttcatcaatcttttagtggttatggagtggatcagtttcatcattatcaacccaagaaacggtttaggacaaagtttaatgaagaacagaaggagaagatgatggagtttgctgagaagattggttggagaatgacaaaactagaagatgatgaagtgaatcggttttgtcgtgagattaaagttaaaagacaagtgtttaaagtttggatgcacaacaataaacaagcagcaaagaagaaggatttgtaagagatttctatatatatatatatactatttttacttctctttgttcaacattgctttaacttaaagactttgtgtttattgtataacaaattgattttagagc

SEQ ID NO: 104926 - protein, 262 aa, Arabidopsis thaliana; identical to SEQ ID NO: 26991
  peptide (1)..(262): Ceres Seq. ID no. 13616057
  misc_feature (77)..(136): Pfam Name: ZF-HD protein dimerisation region Pfam Description: ZF-HD protein dimerisation region
  misc_feature (1)..(262): Homolog of NCBI NO: 18398714 NR Description: expressed protein [Arabidopsis thaliana]
  misc_feature (47)..(261): Homolog of NCBI NO: 21554149 NR Description: unknown [Arabidopsis thaliana]
  misc_feature (47)..(261): Homolog of NCBI NO: 15230335 NR Description: expressed protein [Arabidopsis thaliana]
  misc_feature (143)..(260): Homolog of NCBI NO: 15226993 NR Description: expressed protein [Arabidopsis thaliana]
  misc_feature (143)..(260): Homolog of NCBI NO: 20148768 NR Description: hypothetical protein At2g02540/T822.16
  misc_feature (77)..(149): Homolog of NCBI NO: 15226993 NR Description: expressed protein [Arabidopsis thaliana]
  misc_feature (77)..(149): Homolog of NCBI NO: 20148768 NR Description: hypothetical protein At2g02540/T822.16
  misc_feature (78)..(260): Homolog of NCBI NO: 13374061 NR Description: ZF-HD homeobox protein [Flaveria bidentis]
  misc_feature (27)..(139): Homolog of NCBI NO: 13277220 NR Description: ZF-HD homeobox protein [Flaveria bidentis]
  misc_feature (198)..(261): Homolog of NCBI NO: 13277220 NR Description: ZF-HD homeobox protein [Flaveria bidentis]

SEQ ID NO: 104927 - protein, 252 aa, Arabidopsis thaliana; identical to SEQ ID NO: 26992
  peptide (1)..(252): Ceres Seq. ID no. 13616058
  misc_feature (67)..(126): Pfam Name: ZF-HD protein dimerisation region Pfam Description: ZF-HD protein dimerisation region
  misc_feature (1)..(252): Homolog of NCBI NO: 18398714 NR Description: expressed protein [Arabidopsis thaliana]
  misc_feature (37)..(251): Homolog of NCBI NO: 21554149 NR Description: unknown [Arabidopsis thaliana]
  misc_feature (37)..(251): Homolog of NCBI NO: 15230335 NR Description: expressed protein [Arabidopsis thaliana]
  misc_feature (133)..(250): Homolog of NCBI NO: 15226993 NR Description: expressed protein [Arabidopsis thaliana]
  misc_feature (133)..(250): Homolog of NCBI NO: 20148768 NR Description: hypothetical protein At2g02540/T822.16
  misc_feature (67)..(139): Homolog of NCBI NO: 15226993 NR Description: expressed protein [Arabidopsis thaliana]
  misc_feature (67)..(139): Homolog of NCBI NO: 20148768 NR Description: hypothetical protein At2g02540/T822.16
  misc_feature (68)..(250): Homolog of NCBI NO: 13374061 NR Description: ZF-HD homeobox protein [Flaveria bidentis]
  misc_feature (17)..(129): Homolog of NCBI NO: 13277220 NR Description: ZF-HD homeobox protein [Flaveria bidentis]
  misc_feature (188)..(251): Homolog of NCBI NO: 13277220 NR Description: ZF-HD homeobox protein [Flaveria bidentis]

SEQ ID NO: 104928 - protein, 250 aa, Arabidopsis thaliana; identical to SEQ ID NO: 26993
  peptide (1)..(250): Ceres Seq. ID no. 13616059
  misc_feature (65)..(124): Pfam Name: ZF-HD protein dimerisation region Pfam Description: ZF-HD protein dimerisation region
  misc_feature (1)..(250): Homolog of NCBI NO: 18398714 NR Description: expressed protein [Arabidopsis thaliana]
  misc_feature (35)..(249): Homolog of NCBI NO: 21554149 NR Description: unknown [Arabidopsis thaliana]
  misc_feature (35)..(249): Homolog of NCBI NO: 15230335 NR Description: expressed protein [Arabidopsis thaliana]
  misc_feature (131)..(248): Homolog of NCBI NO: 15226993 NR Description: expressed protein [Arabidopsis thaliana]
  misc_feature (131)..(248): Homolog of NCBI NO: 20148768 NR Description: hypothetical protein At2g02540/T822.16
  misc_feature (65)..(137): Homolog of NCBI NO: 15226993 NR Description: expressed protein [Arabidopsis thaliana]
  misc_feature (65)..(137): Homolog of NCBI NO: 20148768 NR Description: hypothetical protein At2g02540/T822.16
  misc_feature (66)..(248): Homolog of NCBI NO: 13374061 NR Description: ZF-HD homeobox protein [Flaveria bidentis]
  misc_feature (15)..(127): Homolog of NCBI NO: 13277220 NR Description: ZF-HD homeobox protein [Flaveria bidentis]
  misc_feature (186)..(249): Homolog of NCBI NO: 13277220 NR Description: ZF-HD homeobox protein [Flaveria bidentis]

SEQ ID NO: 104929 - DNA, 1139 bp, Arabidopsis thaliana
  misc_feature (1)..(1139): Ceres Seq. ID no. 13616064
  misc_feature: MA Experiment ID: 108434 Result: Down-regulated in Transcription
  misc_feature: MA Experiment 108434 PARAMETER Experiment Name: At_Root_Tips_cDNA_P Parameter: Tissue Value: Root Tips
  misc_feature: MA Experiment ID: 108462 Result: Down-regulated in Transcription
  misc_feature: MA Experiment 108462 PARAMETER Experiment Name: At_Germinating_Seeds_cDNA_P Parameter: Age (day) Value: 2 vs. 0
  misc_feature: MA Experiment 108462 PARAMETER Experiment Name: At_Germinating_Seeds_cDNA_P Parameter: Tissue Value: Germinating Seeds
  misc_feature: MA Experiment ID: 108464 Result: Down-regulated in Transcription
  misc_feature: MA Experiment 108464 PARAMETER Experiment Name: At_Germinating_Seeds_cDNA_P Parameter: Age (day) Value: 4 vs. 0
  misc_feature: MA Experiment 108464 PARAMETER Experiment Name: At_Germinating_Seeds_cDNA_P Parameter: Tissue Value: Germinating Seeds
  misc_feature: MA Experiment ID: 108488 Result: Down-regulated in Transcription
  misc_feature: MA Experiment ID: 108569 Result: Down-regulated in Transcription
  misc_feature: MA Experiment 108569 PARAMETER Experiment Name: At_0.001%_MeJA__cDNA_P Parameter: Timepoint (hr) Value: 6
  misc_feature: MA Experiment 108569 PARAMETER Experiment Name: At_0.001%_MeJA__cDNA_P Parameter: Tissue Value: Aerial
  misc_feature: MA Experiment 108569 PARAMETER Experiment Name: At_0.001%_MeJA__cDNA_P Parameter: Treatment Value: 0.001% MeJA vs. No Treatment
  misc_feature: MA Experiment ID: 108594 Result: Up-regulated in Transcription
  misc_feature: MA Experiment 108594 PARAMETER Experiment Name: At_Ler-rhl_Root_cDNA_P Parameter: Plant Line Value: null
  misc_feature: MA Experiment ID: 20000087 Result: Up-regulated in Transcription
  misc_feature: MA Experiment 20000087 PARAMETER Experiment Name: At_100uM_ABA_Mutants_cDNA_P Parameter: Plant Line Value: WS
  misc_feature: MA Experiment 20000087 PARAMETER Experiment Name: At_100uM_ABA_Mutants_cDNA_P Parameter: Timepoint (hr) Value: 6
  misc_feature: MA Experiment 20000087 PARAMETER Experiment Name: At_100uM_ABA_Mutants_cDNA_P Parameter: Tissue Value: Aerial
  misc_feature: MA Experiment 20000087 PARAMETER Experiment Name: At_100uM_ABA_Mutants_cDNA_P Parameter: Treatment Value: 100uM ABA vs. No Treatment
  misc_feature: MA Experiment ID: 20000089 Result: Up-regulated in Transcription
  misc_feature: MA Experiment ID: 20000090 Result: Up-regulated in Transcription
  misc_feature: MA Experiment ID: 20000179 Result: Up-regulated in Transcription
  misc_feature: MA Experiment 20000179 PARAMETER Experiment Name: At_Germinating_Seeds_P Parameter: Age (hr) Value: 6 vs. 0
  misc_feature: MA Experiment 20000179 PARAMETER Experiment Name: At_Germinating_Seeds_P Parameter: Tissue Value: Germinating Seeds
  misc_feature: MA Experiment ID: 20000184 Result: Down-regulated in Transcription
  misc_feature: MA Experiment 20000184 PARAMETER Experiment Name: At_Shoots__P Parameter: Age (day) Value: 7
  misc_feature: MA Experiment 20000184 PARAMETER Experiment Name: At_Shoots__P Parameter: Tissue Value: Shoots vs. Whole Plant
  misc_feature: MA Experiment ID: 20000185 Result: Down-regulated in Transcription
  misc_feature: MA Experiment 20000185 PARAMETER Experiment Name: At_Roots__P Parameter: Age (day) Value: 7 vs. 21
  misc_feature: MA Experiment 20000185 PARAMETER Experiment Name: At_Roots__P Parameter: Organism Value: A. thaliana
  misc_feature: MA Experiment 20000185 PARAMETER Experiment Name: At_Roots__P Parameter: Tissue Value: Roots vs. Whole Plant
  misc_feature: MA Experiment ID: 20000224 Result: Down-regulated in Transcription
  misc_feature: MA Experiment ID: 20000234 Result: Down-regulated in Transcription
  misc_feature: MA Experiment 20000234 PARAMETER Experiment Name: At_Siliques_P Parameter: Age (day) Value: 21
  misc_feature: MA Experiment 20000234 PARAMETER Experiment Name: At_Siliques_P Parameter: Organism Value: A. thaliana
  misc_feature: MA Experiment 20000234 PARAMETER Experiment Name: At_Siliques_P Parameter: Plant Line Value: WS
  misc_feature: MA Experiment 20000234 PARAMETER Experiment Name: At_Siliques_P Parameter: Tissue Value: Less Than 5mm Siliques vs. Whole Plant
  misc_feature: MA Experiment ID: 20000265 Result: Down-regulated in Transcription
  misc_feature: MA Experiment 20000265 PARAMETER Experiment Name: At_Open_Flower_P Parameter: Age (day) Value: 21
  misc_feature: MA Experiment 20000265 PARAMETER Experiment Name: At_Open_Flower_P Parameter: Plant Line Value: WS
  misc_feature: MA Experiment 20000265 PARAMETER Experiment Name: At_Open_Flower_P Parameter: Tissue Value: Closed Flower vs. Whole Plant
  misc_feature: MA Experiment ID: 20000286 Result: Down-regulated in Transcription
  misc_feature: MA Experiment 20000286 PARAMETER Experiment Name: At_Open_Flower_P Parameter: Age (day) Value: 21
  misc_feature: MA Experiment 20000286 PARAMETER Experiment Name: At_Open_Flower_P Parameter: Plant Line Value: WS
  misc_feature: MA Experiment 20000286 PARAMETER Experiment Name: At_Open_Flower_P Parameter: Tissue Value: Half Open vs. Whole Plant
  misc_feature: MA Experiment ID: 20000438 Result: Down-regulated in Transcription
  misc_feature: MA Experiment 20000438 PARAMETER Experiment Name: At_Shoots__P Parameter: Age (day) Value: 14
  misc_feature: MA Experiment 20000438 PARAMETER Experiment Name: At_Shoots__P Parameter: Tissue Value: Shoots vs. Whole Plant
  misc_feature: MA Experiment ID: 20000439 Result: Down-regulated in Transcription
  misc_feature: MA Experiment 20000439 PARAMETER Experiment Name: At_Roots__P Parameter: Age (day) Value: 14 vs. 21
  misc_feature: MA Experiment 20000439 PARAMETER Experiment Name: At_Roots__P Parameter: Organism Value: A. thaliana
  misc_feature: MA Experiment 20000439 PARAMETER Experiment Name: At_Roots__P Parameter: Tissue Value: Roots vs. Whole Plant
  misc_feature: MA Experiment ID: 20001451 Result: Up-regulated in Transcription
  misc_feature: MA Experiment 20001451 PARAMETER Experiment Name: At_Far-red-induction_P Parameter: Age (day) Value: 7
  misc_feature: MA Experiment 20001451 PARAMETER Experiment Name: At_Far-red-induction_P Parameter: Light Value: Far-red vs. White
  misc_feature: MA Experiment 20001451 PARAMETER Experiment Name: At_Far-red-induction_P Parameter: Organism Value: A. thaliana
  misc_feature: MA Experiment 20001451 PARAMETER Experiment Name: At_Far-red-induction_P Parameter: Plant Line Value: Columbia
  misc_feature: MA Experiment 20001451 PARAMETER Experiment Name: At_Far-red-induction_P Parameter: Timepoint (hr) Value: 24
  misc_feature: MA Experiment 20001451 PARAMETER Experiment Name: At_Far-red-induction_P Parameter: Tissue Value: Whole Plant
  misc_feature: MA Experiment ID: 20001560 Result: Down-regulated in Transcription
  misc_feature: MA Experiment 20001560 PARAMETER Experiment Name: At_Drought_Soil_Dry_P Parameter: Age (day) Value: 28
  misc_feature: MA Experiment 20001560 PARAMETER Experiment Name: At_Drought_Soil_Dry_P Parameter: Organism Value: A. thaliana
  misc_feature: MA Experiment 20001560 PARAMETER Experiment Name: At_Drought_Soil_Dry_P Parameter: Plant Line Value: WS
  misc_feature: MA Experiment 20001560 PARAMETER Experiment Name: At_Drought_Soil_Dry_P Parameter: Post Timepoint (hr) Value: None
  misc_feature: MA Experiment 20001560 PARAMETER Experiment Name: At_Drought_Soil_Dry_P Parameter: Post-Treatment Value: None
  misc_feature: MA Experiment 20001560 PARAMETER Experiment Name: At_Drought_Soil_Dry_P Parameter: Timepoint (day) Value: 14
  misc_feature: MA Experiment 20001560 PARAMETER Experiment Name: At_Drought_Soil_Dry_P Parameter: Treatment Value: Drought vs. No Drought
aaacgttactgtcactaaatgaaatctatttttctttcttaaattttgctctgacaaatatttttgattgcgtcattttctactttggaaatgtctttgatttagcatttcagttcgctcaaaacatcaaatcttaccttctttagctttcacattagattctggtaattattagcacaaaaaaaagataagccagaatacgaaacaaccaaaaaaagaggagaattcttttttttttttttctttccgatgcctccgaccaataattaccgaatctccggcgaaccaccgtctactacgccgtctcatccaccgccaaaaccgaaaacaaggattctctctctattcctcgttggtgtaatcatgttttcaatcttctttctcttcctcgttcttatcggtatcgcctctgttcttatcctccctctcctcctctcttctctccatcgtcaccaccgacgtcgtcgtcgtaatcgccgacaagaatcctcagatgggttatcttcaagattcgtgaaaaagcttcctcaattcaaattctccgaacctagcacatacacacggtacgagagcgattgtgtggtttgttttgatggattcagacaaggacaatggtgtcggaatcttcctggttgtggacacgtgtttcatcgaaagtgtgtggacacttggttgctcaaagcctcgacgtgtcctatttgcagagctagggttagattgtgggaggaagatccacaagaaggagaattatggagatgttttggtcatagaagaagtagtttgctagatttgtaatattgtgtggttatgtagacgtggactcagtctaatggatgataagaatctccaaaactgaagctacgaagaggtacaatacaagccaaggactctttcctccatagagaagtagcgggtcgatcttatggtaatatataagcactaagcagatgggcgtttgatcatataaaccctcactaccattaccaaaaagcaatagccaagagctttttttttcattttctttttgaaagccatggatcggttttcgttcttgaatgttataatggaggttgcgggtattctaaatgaatcccgcaaactctcctcaagaacaaaaagttgatgttctcagtcttggt

SEQ ID NO: 104930 - protein, 181 aa, Arabidopsis thaliana; identical to SEQ ID NO: 43079
  peptide (1)..(181): Ceres Seq. ID no. 13616065
  misc_feature (110)..(151): Pfam Name: Zinc finger, C3HC4 type (RING finger) Pfam Description: Zinc finger, C3HC4 type (RING finger)
  misc_feature (1)..(181): Homolog of NCBI NO: 15224210 NR Description: zinc finger (C3HC4-type RING finger) protein [Arabidopsis thaliana] >gi|25411891|pir||B84567 probable RING
  misc_feature (1)..(181): Homolog of NCBI NO: 21617980 NR Description: putative RING zinc finger protein [Arabidopsis
  misc_feature (9)..(169): Homolog of NCBI NO: 15234713 NR Description: zinc finger (C3HC4-type RING finger) protein [Arabidopsis thaliana] >gi|25407631|pir||B85355 hypothetical
  misc_feature (9)..(161): Homolog of NCBI NO: 15226289 NR Description: zinc finger (C3HC4-type RING finger) protein [Arabidopsis thaliana] >gi|25407935|pir||G84678 probable RING
  misc_feature (1)..(161): Homolog of NCBI NO: 15235482 NR Description: zinc finger (C3HC4-type RING finger) protein
  misc_feature (36)..(155): Homolog of NCBI NO: 15238323 NR Description: zinc finger (C3HC4-type RING finger) protein [Arabidopsis thaliana] >gi|9757965|dbj|BAB08453.1| to unknown protein [Arabidopsis thaliana]
  misc_feature (36)..(155): Homolog of NCBI NO: 21593762 NR Description: unknown [Arabidopsis thaliana]
  misc_feature (47)..(165): Homolog of NCBI NO: 15227929 NR Description: RING zinc finger protein -related [Arabidopsis
  misc_feature (50)..(155): Homolog of NCBI NO: 34903920 NR Description: OSJNBa0038J17.5 [Oryza sativa (japonica
  misc_feature (8)..(162): Homolog of NCBI NO: 15228395 NR Description: RING zinc finger protein -related [Arabidopsis >gi|6630539|gb|AAF19558.1|AC011708_1 putative RING zinc finger [Arabidopsis thaliana] >gi|28466857|gb|AAO44037.1| At3g10910

SEQ ID NO: 104931 - protein, 143 aa, Arabidopsis thaliana; identical to SEQ ID NO: 43080
  peptide (1)..(143): Ceres Seq. ID no. 13616066
  misc_feature (72)..(113): Pfam Name: Zinc finger, C3HC4 type (RING finger) Pfam Description: Zinc finger, C3HC4 type (RING finger)
  misc_feature (1)..(143): Homolog of NCBI NO: 15224210 NR Description: zinc finger (C3HC4-type RING finger) protein [Arabidopsis thaliana] >gi|25411891|pir||B84567 probable RING
  misc_feature (1)..(143): Homolog of NCBI NO: 21617980 NR Description: putative RING zinc finger protein [Arabidopsis
  misc_feature (1)..(131): Homolog of NCBI NO: 15234713 NR Description: zinc finger (C3HC4-type RING finger) protein [Arabidopsis thaliana] >gi|25407631|pir||B85355 hypothetical
  misc_feature (1)..(123): Homolog of NCBI NO: 15226289 NR Description: zinc finger (C3HC4-type RING finger) protein [Arabidopsis thaliana] >gi|25407935|pir||G84678 probable RING
  misc_feature (1)..(123): Homolog of NCBI NO: 15235482 NR Description: zinc finger (C3HC4-type RING finger) protein
  misc_feature (1)..(117): Homolog of NCBI NO: 15238323 NR Description: zinc finger (C3HC4-type RING finger) protein [Arabidopsis thaliana] >gi|9757965|dbj|BAB08453.1| to unknown protein [Arabidopsis thaliana]
  misc_feature (1)..(117): Homolog of NCBI NO: 21593762 NR Description: unknown [Arabidopsis thaliana]
  misc_feature (9)..(127): Homolog of NCBI NO: 15227929 NR Description: RING zinc finger protein -related [Arabidopsis
  misc_feature (12)..(117): Homolog of NCBI NO: 34903920 NR Description: OSJNBa0038J17.5 [Oryza sativa (japonica
  misc_feature (1)..(124): Homolog of NCBI NO: 15228395 NR Description: RING zinc finger protein -related [Arabidopsis >gi|6630539|gb|AAF19558.1|AC011708_1 putative RING zinc finger [Arabidopsis thaliana] >gi|28466857|gb|AAO44037.1| At3g10910

SEQ ID NO: 104932 - DNA, 1249 bp, Arabidopsis thaliana
  misc_feature (1)..(1249): Ceres Seq. ID no. 13616076
  misc_feature: MA Experiment ID: 108434 Result: Down-regulated in Transcription
  misc_feature: MA Experiment 108434 PARAMETER Experiment Name: At_Root_Tips_cDNA_P Parameter: Tissue Value: Root Tips
  misc_feature: MA Experiment ID: 108461 Result: Down-regulated in Transcription
  misc_feature: MA Experiment 108461 PARAMETER Experiment Name: At_Germinating_Seeds_cDNA_P Parameter: Age (day) Value: 1 vs. 0
  misc_feature: MA Experiment 108461 PARAMETER Experiment Name: At_Germinating_Seeds_cDNA_P Parameter: Tissue Value: Germinating Seeds
  misc_feature: MA Experiment ID: 108595 Result: Down-regulated in Transcription
  misc_feature: MA Experiment 108595 PARAMETER Experiment Name: At_Ler-pi_Ovule_cDNA_P Parameter: Plant Line Value: null
  misc_feature: MA Experiment ID: 20000111 Result: Down-regulated in Transcription
  misc_feature: MA Experiment 20000111 PARAMETER Experiment Name: At_42deg_Heat_cDNA_P Parameter: Temperature (deg C) Value: 42 vs. 22
  misc_feature: MA Experiment 20000111 PARAMETER Experiment Name: At_42deg_Heat_cDNA_P Parameter: Timepoint (hr) Value: 6
  misc_feature: MA Experiment 20000111 PARAMETER Experiment Name: At_42deg_Heat_cDNA_P Parameter: Tissue Value: Aerial
  misc_feature: MA Experiment ID: 20000113 Result: Down-regulated in Transcription
  misc_feature: MA Experiment 20000113 PARAMETER Experiment Name: At_42deg_Heat_cDNA_P Parameter: Temperature (deg C) Value: 42 vs. 22
  misc_feature: MA Experiment 20000113 PARAMETER Experiment Name: At_42deg_Heat_cDNA_P Parameter: Timepoint (hr) Value: 8
  misc_feature: MA Experiment 20000113 PARAMETER Experiment Name: At_42deg_Heat_cDNA_P Parameter: Tissue Value: Aerial
  misc_feature: MA Experiment ID: 20000171 Result: Down-regulated in Transcription
  misc_feature: MA Experiment 20000171 PARAMETER Experiment Name: At_42deg_Heat_P Parameter: Age (day) Value: 14
  misc_feature: MA Experiment 20000171 PARAMETER Experiment Name: At_42deg_Heat_P Parameter: Organism Value: A. thaliana
  misc_feature: MA Experiment 20000171 PARAMETER Experiment Name: At_42deg_Heat_P Parameter: Plant Line Value: WS
  misc_feature: MA Experiment 20000171 PARAMETER Experiment Name: At_42deg_Heat_P Parameter: Temperature (deg C) Value: 42 vs. 22
  misc_feature: MA Experiment 20000171 PARAMETER Experiment Name: At_42deg_Heat_P Parameter: Timepoint (hr) Value: 1
  misc_feature: MA Experiment 20000171 PARAMETER Experiment Name: At_42deg_Heat_P Parameter: Tissue Value: Aerial
  misc_feature: MA Experiment ID: 20000173 Result: Down-regulated in Transcription
  misc_feature: MA Experiment 20000173 PARAMETER Experiment Name: At_42deg_Heat_P Parameter: Age (day) Value: 14
  misc_feature: MA Experiment 20000173 PARAMETER Experiment Name: At_42deg_Heat_P Parameter: Organism Value: A. thaliana
  misc_feature: MA Experiment 20000173 PARAMETER Experiment Name: At_42deg_Heat_P Parameter: Plant Line Value: WS
  misc_feature: MA Experiment 20000173 PARAMETER Experiment Name: At_42deg_Heat_P Parameter: Temperature (deg C) Value: 42 vs. 22
  misc_feature: MA Experiment 20000173 PARAMETER Experiment Name: At_42deg_Heat_P Parameter: Timepoint (hr) Value: 6
  misc_feature: MA Experiment 20000173 PARAMETER Experiment Name: At_42deg_Heat_P Parameter: Tissue Value: Aerial
  misc_feature: MA Experiment ID: 20000184 Result: Down-regulated in Transcription
  misc_feature: MA Experiment 20000184 PARAMETER Experiment Name: At_Shoots__P Parameter: Age (day) Value: 7
  misc_feature: MA Experiment 20000184 PARAMETER Experiment Name: At_Shoots__P Parameter: Tissue Value: Shoots vs. Whole Plant
  misc_feature: MA Experiment ID: 20000234 Result: Down-regulated in Transcription
  misc_feature: MA Experiment 20000234 PARAMETER Experiment Name: At_Siliques_P Parameter: Age (day) Value: 21
  misc_feature: MA Experiment 20000234 PARAMETER Experiment Name: At_Siliques_P Parameter: Organism Value: A. thaliana
  misc_feature: MA Experiment 20000234 PARAMETER Experiment Name: At_Siliques_P Parameter: Plant Line Value: WS
  misc_feature: MA Experiment 20000234 PARAMETER Experiment Name: At_Siliques_P Parameter: Tissue Value: Less Than 5mm Siliques vs. Whole Plant
  misc_feature: MA Experiment ID: 20001247 Result: Up-regulated in Transcription
  misc_feature: MA Experiment 20001247 PARAMETER Experiment Name: At_Far-red-induction_P Parameter: Age (day) Value: 7
  misc_feature: MA Experiment 20001247 PARAMETER Experiment Name: At_Far-red-induction_P Parameter: Light Value: Far-red vs. White
  misc_feature: MA Experiment 20001247 PARAMETER Experiment Name: At_Far-red-induction_P Parameter: Organism Value: A. thaliana
  misc_feature: MA Experiment 20001247 PARAMETER Experiment Name: At_Far-red-induction_P Parameter: Plant Line Value: Columbia
  misc_feature: MA Experiment 20001247 PARAMETER Experiment Name: At_Far-red-induction_P Parameter: Timepoint (hr) Value: 1
  misc_feature: MA Experiment 20001247 PARAMETER Experiment Name: At_Far-red-induction_P Parameter: Tissue Value: Whole Plant
  misc_feature: MA Experiment ID: 20001557 Result: Up-regulated in Transcription
  misc_feature: MA Experiment 20001557 PARAMETER Experiment Name: At_Drought_Soil_Dry_P Parameter: Age (day) Value: 27
  misc_feature: MA Experiment 20001557 PARAMETER Experiment Name: At_Drought_Soil_Dry_P Parameter: Organism Value: A. thaliana
  misc_feature: MA Experiment 20001557 PARAMETER Experiment Name: At_Drought_Soil_Dry_P Parameter: Plant Line Value: WS
  misc_feature: MA Experiment 20001557 PARAMETER Experiment Name: At_Drought_Soil_Dry_P Parameter: Post Timepoint (hr) Value: 3
  misc_feature: MA Experiment 20001557 PARAMETER Experiment Name: At_Drought_Soil_Dry_P Parameter: Post-Treatment Value: Re-Water vs. No Drought
  misc_feature: MA Experiment 20001557 PARAMETER Experiment Name: At_Drought_Soil_Dry_P Parameter: Timepoint (day) Value: 13
  misc_feature: MA Experiment 20001557 PARAMETER Experiment Name: At_Drought_Soil_Dry_P Parameter: Treatment Value: Drought vs. No Drought
  misc_feature: MA Experiment ID: 20001558 Result: Up-regulated in Transcription
  misc_feature: MA Experiment 20001558 PARAMETER Experiment Name: At_Drought_Soil_Dry_P Parameter: Age (day) Value: 27
  misc_feature: MA Experiment 20001558 PARAMETER Experiment Name: At_Drought_Soil_Dry_P Parameter: Organism Value: A. thaliana
  misc_feature: MA Experiment 20001558 PARAMETER Experiment Name: At_Drought_Soil_Dry_P Parameter: Plant Line Value: WS
  misc_feature: MA Experiment 20001558 PARAMETER Experiment Name: At_Drought_Soil_Dry_P Parameter: Post Timepoint (hr) Value: 6
  misc_feature: MA Experiment 20001558 PARAMETER Experiment Name: At_Drought_Soil_Dry_P Parameter: Post-Treatment Value: Re-Water vs. No Drought
  misc_feature: MA Experiment 20001558 PARAMETER Experiment Name: At_Drought_Soil_Dry_P Parameter: Timepoint (day) Value: 13
  misc_feature: MA Experiment 20001558 PARAMETER Experiment Name: At_Drought_Soil_Dry_P Parameter: Treatment Value: Drought vs. No Drought
acacaaaaaaaaagctgaaacaaagagttcgagaaaaatttcgattctcttgctcgtaaaagcttcttttgattctctttgactctgttttgtggatagctcctgaagaagaagaagatgatggtagtgaacagctttgatctatggcaaaaagatgttttcttctctgcagctgaagaggttcaaaaatctacagatataatggagtctgcttatagattgtggattagagagaagaaagatgagatttgtaaggaacttcaagcagctttaggtacagctaaatggcagttggaggagtttgagaaggcagtgagattgagtcataaacggtgtggggataatgattcttcatccacacggcataaacagtttgttaccgctattgaaaaccagattcatcgcgtagaaacttctctgcaagaagcttatagtgaaaatgggaaaaagcctctccgttgggttgatcttaatgaagaagagcgtgatgacttagcaatgtttctctctggatcttctcgaacttcacagagttttagtggtgagagcagcatcaagtcgagagagtctactaatagttctctagttgaaaacgttatggaagtttcagctaaagtaacattcaagaaagctaaagtttatggtgatggctctgagtgtgtcatagacattgaagaaagagtgacacctggccaagcagagaaatcagttgggctgagaagaatatggagttcaccaaatttcaattctttgagaattatagttcctggtggtgataatgaagaagaaaaggagacattggtggcacaaatagaagcgacgcctaaagttaaaggaactaagtctgtattgtggatgcagagacttcctgatcataatcagctctttgacaagaccggttgctttcaaaatccgatacgcttaccgtttaatcacccgatcaagtttattgtttccttattgctaatggtgtttctactattacccttcgtagtgtatttgtcttgagaattttaccacggttcgaaactgtcaagaagctgctaaagagatcagctttcgcgtctaatggttaggattcataatcccacaagaacaaacagagattaaaaagctttacatatgttacttttaacttgttgctttggttcttcagggaacgtatagaaacattgaaacgtgtaagattaagtaaagggattagagtttatattacggctttggctaccgttgataaagatgtaaatgc

SEQ ID NO: 104933 - protein, 296 aa, Arabidopsis thaliana
  peptide (1)..(296): Ceres Seq. ID no. 13616077
  misc_feature (1)..(296): Homolog of NCBI NO: 30680486 NR Description: expressed protein [Arabidopsis thaliana]
  misc_feature (1)..(256): Homolog of NCBI NO: 7485788 NR Description: hypothetical protein At2g18860 [imported] - thaliana >gi|4185152|gb|AAD08955.1| unknown protein [Arabidopsis >gi|20197038|gb|AAM14887.1| unknown protein [Arabidopsis
  misc_feature (1)..(293): Homolog of NCBI NO: 18417554 NR Description: expressed protein [Arabidopsis thaliana] AT4g30240/F9N11_90 [Arabidopsis thaliana]
  misc_feature (1)..(291): Homolog of NCBI NO: 7486766 NR Description: hypothetical protein F9N11.90 - Arabidopsis >gi|5730134|emb|CAB52468.1| putative protein [Arabidopsis >gi|7269924|emb|CAB81017.1| putative protein [Arabidopsis
  misc_feature (1)..(138): Homolog of NCBI NO: 40253501 NR Description: clathrin-coat assembly protein-like [Oryza sativa
  misc_feature (3)..(139): Homolog of NCBI NO: 18396454 NR Description: clathrin-coat assembly protein -related thaliana] >gi|15450633|gb|AAK96588.1| At1g27700/T22C5_14 thaliana] >gi|20466097|gb|AAM19970.1| At1g27700/T22C5_14
  misc_feature (3)..(139): Homolog of NCBI NO: 25403328 NR Description: protein T22C5.15 [imported] - Arabidopsis >gi|6693035|gb|AAF24961.1|AC012375_24 T22C5.15 [Arabidopsis
  misc_feature (43)..(134): Homolog of NCBI NO: 26006490 NR Description: Hypothetical protein [Oryza sativa (japonica
  misc_feature (3)..(55): Homolog of NCBI NO: 26006490 NR Description: Hypothetical protein [Oryza sativa (japonica
  misc_feature (44)..(261): Homolog of NCBI NO: 37533116 NR Description: unknown protein [Oryza sativa (japonica
MMVVNSFDLWQKDVFFSAAEEVQKSTDIMESAYRLWIREKKDEICKELQAALGTAKWQLEEFEKAVRLSHKRCGDNDSSSTRHKQFVTAIENQIHRVETSLQEAYSENGKKPLRWVDLNEEERDDLAMFLSGSSRTSQSFSGESSIKSRESTNSSLVENVMEVSAKVTFKKAKVYGDGSECVIDIEERVTPGQAEKSVGLRRIWSSPNFNSLRIIVPGGDNEEEKETLVAQIEATPKVKGTKSVLWMQRLPDHNQLFDKTGCFQNPIRLPFNHPIKFIVSLLLMVFLLLPFVVYLS

SEQ ID NO: 104934 - protein, 295 aa, Arabidopsis thaliana
  peptide (1)..(295): Ceres Seq. ID no. 13616078
  misc_feature (1)..(295): Homolog of NCBI NO: 30680486 NR Description: expressed protein [Arabidopsis thaliana]
  misc_feature (1)..(255): Homolog of NCBI NO: 7485788 NR Description: hypothetical protein At2g18860 [imported] - thaliana >gi|4185152|gb|AAD08955.1| unknown protein [Arabidopsis >gi|20197038|gb|AAM14887.1| unknown protein [Arabidopsis
  misc_feature (1)..(292): Homolog of NCBI NO: 18417554 NR Description: expressed protein [Arabidopsis thaliana] AT4g30240/F9N11_90 [Arabidopsis thaliana]
  misc_feature (1)..(290): Homolog of NCBI NO: 7486766 NR Description: hypothetical protein F9N11.90 - Arabidopsis >gi|5730134|emb|CAB52468.1| putative protein [Arabidopsis >gi|7269924|emb|CAB81017.1| putative protein [Arabidopsis
  misc_feature (1)..(137): Homolog of NCBI NO: 40253501 NR Description: clathrin-coat assembly protein-like [Oryza sativa
  misc_feature (2)..(138): Homolog of NCBI NO: 18396454 NR Description: clathrin-coat assembly protein -related thaliana] >gi|15450633|gb|AAK96588.1| At1g27700/T22C5_14 thaliana] >gi|20466097|gb|AAM19970.1| At1g27700/T22C5_14
  misc_feature (2)..(138): Homolog of NCBI NO: 25403328 NR Description: protein T22C5.15 [imported] - Arabidopsis >gi|6693035|gb|AAF24961.1|AC012375_24 T22C5.15 [Arabidopsis
  misc_feature (42)..(133): Homolog of NCBI NO: 26006490 NR Description: Hypothetical protein [Oryza sativa (japonica
  misc_feature (2)..(54): Homolog of NCBI NO: 26006490 NR Description: Hypothetical protein [Oryza sativa (japonica
  misc_feature (43)..(260): Homolog of NCBI NO: 37533116 NR Description: unknown protein [Oryza sativa (japonica
MVVNSFDLWQKDVFFSAAEEVQKSTDIMESAYRLWIREKKDEICKELQAALGTAKWQLEEFEKAVRLSHKRCGDNDSSSTRHKQFVTAIENQIHRVETSLQEAYSENGKKPLRWVDLNEEERDDLAMFLSGSSRTSQSFSGESSIKSRESTNSSLVENVMEVSAKVTFKKAKVYGDGSECVIDIEERVTPGQAEKSVGLRRIWSSPNFNSLRIIVPGGDNEEEKETLVAQIEATPKVKGTKSVLWMQRLPDHNQLFDKTGCFQNPIRLPFNHPIKFIVSLLLMVFLLLPFVVYLS

SEQ ID NO: 104935 - protein, 268 aa, Arabidopsis thaliana; identical to SEQ ID NO: 73466
  peptide (1)..(268): Ceres Seq. ID no. 13616079
  misc_feature (1)..(268): Homolog of NCBI NO: 30680486 NR Description: expressed protein [Arabidopsis thaliana]
  misc_feature (1)..(228): Homolog of NCBI NO: 7485788 NR Description: hypothetical protein At2g18860 [imported] - thaliana >gi|4185152|gb|AAD08955.1| unknown protein [Arabidopsis >gi|20197038|gb|AAM14887.1| unknown protein [Arabidopsis
  misc_feature (1)..(265): Homolog of NCBI NO: 18417554 NR Description: expressed protein [Arabidopsis thaliana] AT4g30240/F9N11_90 [Arabidopsis thaliana]
  misc_feature (1)..(263): Homolog of NCBI NO: 7486766 NR Description: hypothetical protein F9N11.90 - Arabidopsis >gi|5730134|emb|CAB52468.1| putative protein [Arabidopsis >gi|7269924|emb|CAB81017.1| putative protein [Arabidopsis
  misc_feature (1)..(110): Homolog of NCBI NO: 40253501 NR Description: clathrin-coat assembly protein-like [Oryza sativa
  misc_feature (1)..(111): Homolog of NCBI NO: 18396454 NR Description: clathrin-coat assembly protein -related thaliana] >gi|15450633|gb|AAK96588.1| At1g27700/T22C5_14 thaliana] >gi|20466097|gb|AAM19970.1| At1g27700/T22C5_14
  misc_feature (1)..(111): Homolog of NCBI NO: 25403328 NR Description: protein T22C5.15 [imported] - Arabidopsis >gi|6693035|gb|AAF24961.1|AC012375_24 T22C5.15 [Arabidopsis
  misc_feature (15)..(106): Homolog of NCBI NO: 26006490 NR Description: Hypothetical protein [Oryza sativa (japonica
  misc_feature (1)..(27): Homolog of NCBI NO: 26006490 NR Description: Hypothetical protein [Oryza sativa (japonica
  misc_feature (16)..(233): Homolog of NCBI NO: 37533116 NR Description: unknown protein [Oryza sativa (japonica

SEQ ID NO: 104936 - DNA, 952 bp, Arabidopsis thaliana
  misc_feature (1)..(952): Ceres Seq. ID no. 13616090
  misc_feature: MA Experiment ID: 108464 Result: Up-regulated in Transcription
  misc_feature: MA Experiment 108464 PARAMETER Experiment Name: At_Germinating_Seeds_cDNA_P Parameter: Age (day) Value: 4 vs. 0
  misc_feature: MA Experiment 108464 PARAMETER Experiment Name: At_Germinating_Seeds_cDNA_P Parameter: Tissue Value: Germinating Seeds
  misc_feature: MA Experiment ID: 108579 Result: Down-regulated in Transcription
  misc_feature: MA Experiment 108579 PARAMETER Experiment Name: At_4deg_Cold_cDNA_P Parameter: Temperature (deg C) Value: 4 vs. 22
  misc_feature: MA Experiment 108579 PARAMETER Experiment Name: At_4deg_Cold_cDNA_P Parameter: Timepoint (hr) Value: 6
  misc_feature: MA Experiment 108579 PARAMETER Experiment Name: At_4deg_Cold_cDNA_P Parameter: Tissue Value: Aerial
  misc_feature: MA Experiment ID: 20000179 Result: Up-regulated in Transcription
  misc_feature: MA Experiment 20000179 PARAMETER Experiment Name: At_Germinating_Seeds_P Parameter: Age (hr) Value: 6 vs. 0
  misc_feature: MA Experiment 20000179 PARAMETER Experiment Name: At_Germinating_Seeds_P Parameter: Tissue Value: Germinating Seeds
  misc_feature: MA Experiment ID: 20000180 Result: Up-regulated in Transcription
  misc_feature: MA Experiment 20000180 PARAMETER Experiment Name: At_Germinating_Seeds_P Parameter: Age (hr) Value: 24 vs. 0
  misc_feature: MA Experiment 20000180 PARAMETER Experiment Name: At_Germinating_Seeds_P Parameter: Tissue Value: Germinating Seeds
  misc_feature: MA Experiment ID: 20001911 Result: Down-regulated in Transcription
  misc_feature: MA Experiment 20001911 PARAMETER Experiment Name: At_Drought_Reproduction_P Parameter: Age (day) Value: 40
  misc_feature: MA Experiment 20001911 PARAMETER Experiment Name: At_Drought_Reproduction_P Parameter: Organism Value: A. thaliana
  misc_feature: MA Experiment 20001911 PARAMETER Experiment Name: At_Drought_Reproduction_P Parameter: Plant Line Value: WS
  misc_feature: MA Experiment 20001911 PARAMETER Experiment Name: At_Drought_Reproduction_P Parameter: Timepoint (day) Value: 10
  misc_feature: MA Experiment 20001911 PARAMETER Experiment Name: At_Drought_Reproduction_P Parameter: Tissue Value: Flowers
  misc_feature: MA Experiment 20001911 PARAMETER Experiment Name: At_Drought_Reproduction_P Parameter: Treatment Value: Drought vs. No Drought
attgttgttgttccacggaactctaaaatggagagtggcgatgagagtccggtggttctaattacgggatgttctcagggaggaattggtcacgcgctggcccgtgagttcactgagaagggatgtcgagtggtggcgacgagtcgatcacggagtacgatgacggatctggagcaagattcgaggttattcgtgaaggagcttgatgtgcaatcggaccagaatgtgagtaaggttttgtcggaggttattgataagttcggtaagatcgacgttcttgttaataacgccggagttcagtgcgttggacctctggcggagactccaatttccgccatggaaaacacattcaacaccaatgtttttggttccatgaggatgactcaagctgttgtaccacacatggtgtctaagaaaaagggaaagattgtcaacgttggaagtatcactgttatggcacctggtccatgggctggtgtctatacagctaccaaagctgctattcatgctcttaccgatactctgaggttggagcttcgtccgtttgggattgatgtcatcaatgttgtcccgggaggaataagaacaaacatagcaaactcagctgtggcaactttcaacaaaatgcctgagctgaaactatacaagccttatgaagaagctatcagagaaagggcgtttatatcacagaggatgaatccaactcctgcagaaacatttgccagagacactgtagccgcagtgctgaagaagaatccacccgcttggttctcgtcaggcaggtattcaaccctcatggcagtcatgtatcatatgcccttatggctcaaagattttttccagaagcaggttttaatgaagaagtgataatcaggttggggtttaagacagaatgtaccttaaacacgaatgtaaaagctttgttcaaattgttaattgaatctcttatgtc

SEQ ID NO: 104937 - protein, 288 aa, Arabidopsis thaliana
  peptide (1)..(288): Ceres Seq. ID no. 13616091
  misc_feature (10)..(288): Homolog of NCBI NO: 30682984 NR Description: short-chain dehydrogenase/reductase family
  misc_feature (10)..(288): Homolog of NCBI NO: 26453106 NR Description: unknown protein [Arabidopsis thaliana]
  misc_feature (116)..(288): Homolog of NCBI NO: 11358313 NR Description: hypothetical protein T31P16.40 - Arabidopsis >gi|7960724|emb|CAB92046.1| putative protein [Arabidopsis
  misc_feature (10)..(124): Homolog of NCBI NO: 11358313 NR Description: hypothetical protein T31P16.40 - Arabidopsis >gi|7960724|emb|CAB92046.1| putative protein [Arabidopsis
  misc_feature (12)..(288): Homolog of NCBI NO: 18424923 NR Description: short-chain dehydrogenase/reductase family [Arabidopsis thaliana] >gi|15983432|gb|AAL11584.1|AF424590_1 [Arabidopsis thaliana] >gi|20466145|gb|AAM19994.1|
  misc_feature (12)..(259): Homolog of NCBI NO: 10178182 NR Description: contains similarity to
  misc_feature (54)..(288): Homolog of NCBI NO: 26450169 NR Description: unknown protein [Arabidopsis thaliana]
  misc_feature (54)..(287): Homolog of NCBI NO: 38567881 NR Description: OSJNBa0036B21.7 [Oryza sativa (japonica
  misc_feature (17)..(278): Homolog of NCBI NO: 28868436 NR Description: oxidoreductase, short chain family [Pseudomonas syringae pv. tomato str. DC3000] oxidoreductase, short chain dehydrogenase/reductase family
  misc_feature (17)..(283): Homolog of NCBI NO: 32039035 NR Description: hypothetical protein [Pseudomonas aeruginosa
IVVVPRNSKMESGDESPVVLITGCSQGGIGHALAREFTEKGCRVVATSRSRSTMTDLEQDSRLFVKELDVQSDQNVSKVLSEVIDKFGKIDVLVNNAGVQCVGPLAETPISAMENTFNTNVFGSMRMTQAVVPHMVSKKKGKIVNVGSITVMAPGPWAGVYTATKAAIHALTDTLRLELRPFGIDVINVVPGGIRTNIANSAVATFNKMPELKLYKPYEEAIRERAFISQRMNPTPAETFARDTVAAVLKKNPPAWFSSGRYSTLMAVMYHMPLWLKDFFQKQVLMKK

SEQ ID NO: 104938 - protein, 279 aa, Arabidopsis thaliana
  peptide (1)..(279): Ceres Seq. ID no. 13616092
  misc_feature (1)..(279): Homolog of NCBI NO: 30682984 NR Description: short-chain dehydrogenase/reductase family
  misc_feature (1)..(279): Homolog of NCBI NO: 26453106 NR Description: unknown protein [Arabidopsis thaliana]
  misc_feature (107)..(279): Homolog of NCBI NO: 11358313 NR Description: hypothetical protein T31P16.40 - Arabidopsis >gi|7960724|emb|CAB92046.1| putative protein [Arabidopsis
  misc_feature (1)..(115): Homolog of NCBI NO: 11358313 NR Description: hypothetical protein T31P16.40 - Arabidopsis >gi|7960724|emb|CAB92046.1| putative protein [Arabidopsis
  misc_feature (3)..(279): Homolog of NCBI NO: 18424923 NR Description: short-chain dehydrogenase/reductase family [Arabidopsis thaliana] >gi|15983432|gb|AAL11584.1|AF424590_1 [Arabidopsis thaliana] >gi|20466145|gb|AAM19994.1|
  misc_feature (3)..(250): Homolog of NCBI NO: 10178182 NR Description: contains similarity to
  misc_feature (45)..(279): Homolog of NCBI NO: 26450169 NR Description: unknown protein [Arabidopsis thaliana]
  misc_feature (45)..(278): Homolog of NCBI NO: 38567881 NR Description: OSJNBa0036B21.7 [Oryza sativa (japonica
  misc_feature (8)..(269): Homolog of NCBI NO: 28868436 NR Description: oxidoreductase, short chain family [Pseudomonas syringae pv. tomato str. DC3000] oxidoreductase, short chain dehydrogenase/reductase family
  misc_feature (8)..(274): Homolog of NCBI NO: 32039035 NR Description: hypothetical protein [Pseudomonas aeruginosa
MESGDESPVVLITGCSQGGIGHALAREFTEKGCRVVATSRSRSTMTDLEQDSRLFVKELDVQSDQNVSKVLSEVIDKFGKIDVLVNNAGVQCVGPLAETPISAMENTFNTNVFGSMRMTQAVVPHMVSKKKGKIVNVGSITVMAPGPWAGVYTATKAAIHALTDTLRLELRPFGIDVINVVPGGIRTNIANSAVATFNKMPELKLYKPYEEAIRERAFISQRMNPTPAETFARDTVAAVLKKNPPAWFSSGRYSTLMAVMYHMPLWLKDFFQKQVLMKK

SEQ ID NO: 104939 - protein, 235 aa, Arabidopsis thaliana
  peptide (1)..(235): Ceres Seq. ID no. 13616093
  misc_feature (1)..(235): Homolog of NCBI NO: 30682984 NR Description: short-chain dehydrogenase/reductase family
  misc_feature (1)..(235): Homolog of NCBI NO: 26453106 NR Description: unknown protein [Arabidopsis thaliana]
  misc_feature (63)..(235): Homolog of NCBI NO: 11358313 NR Description: hypothetical protein T31P16.40 - Arabidopsis >gi|7960724|emb|CAB92046.1| putative protein [Arabidopsis
  misc_feature (1)..(71): Homolog of NCBI NO: 11358313 NR Description: hypothetical protein T31P16.40 - Arabidopsis >gi|7960724|emb|CAB92046.1| putative protein [Arabidopsis
  misc_feature (1)..(235): Homolog of NCBI NO: 18424923 NR Description: short-chain dehydrogenase/reductase family [Arabidopsis thaliana] >gi|15983432|gb|AAL11584.1|AF424590_1 [Arabidopsis thaliana] >gi|20466145|gb|AAM19994.1|
  misc_feature (1)..(206): Homolog of NCBI NO: 10178182 NR Description: contains similarity to
  misc_feature (1)..(235): Homolog of NCBI NO: 26450169 NR Description: unknown protein [Arabidopsis thaliana]
  misc_feature (1)..(234): Homolog of NCBI NO: 38567881 NR Description: OSJNBa0036B21.7 [Oryza sativa (japonica
  misc_feature (1)..(225): Homolog of NCBI NO: 28868436 NR Description: oxidoreductase, short chain family [Pseudomonas syringae pv. tomato str. DC3000] oxidoreductase, short chain dehydrogenase/reductase family
  misc_feature (1)..(230): Homolog of NCBI NO: 32039035 NR Description: hypothetical protein [Pseudomonas aeruginosa
MTDLEQDSRLFVKELDVQSDQNVSKVLSEVIDKFGKIDVLVNNAGVQCVGPLAETPISAMENTFNTNVFGSMRMTQAVVPHMVSKKKGKIVNVGSITVMAPGPWAGVYTATKAAIHALTDTLRLELRPFGIDVINVVPGGIRTNIANSAVATFNKMPELKLYKPYEEAIRERAFISQRMNPTPAETFARDTVAAVLKKNPPAWFSSGRYSTLMAVMYHMPLWLKDFFQKQVLMKK

SEQ ID NO: 104940 - DNA, 975 bp, Arabidopsis thaliana
  misc_feature (1)..(975): Ceres Seq. ID no. 13616116
  misc_feature: MA Experiment ID: 108434 Result: Up-regulated in Transcription
  misc_feature: MA Experiment 108434 PARAMETER Experiment Name: At_Root_Tips_cDNA_P Parameter: Tissue Value: Root Tips
  misc_feature: MA Experiment ID: 108461 Result: Up-regulated in Transcription
  misc_feature: MA Experiment 108461 PARAMETER Experiment Name: At_Germinating_Seeds_cDNA_P Parameter: Age (day) Value: 1 vs. 0
  misc_feature: MA Experiment 108461 PARAMETER Experiment Name: At_Germinating_Seeds_cDNA_P Parameter: Tissue Value: Germinating Seeds
  misc_feature: MA Experiment ID: 108462 Result: Up-regulated in Transcription
  misc_feature: MA Experiment 108462 PARAMETER Experiment Name: At_Germinating_Seeds_cDNA_P Parameter: Age (day) Value: 2 vs. 0
  misc_feature: MA Experiment 108462 PARAMETER Experiment Name: At_Germinating_Seeds_cDNA_P Parameter: Tissue Value: Germinating Seeds
  misc_feature: MA Experiment ID: 108463 Result: Up-regulated in Transcription
  misc_feature: MA Experiment 108463 PARAMETER Experiment Name: At_Germinating_Seeds_cDNA_P Parameter: Age (day) Value: 3 vs. 0
  misc_feature: MA Experiment 108463 PARAMETER Experiment Name: At_Germinating_Seeds_cDNA_P Parameter: Tissue Value: Germinating Seeds
  misc_feature: MA Experiment ID: 108464 Result: Up-regulated in Transcription
  misc_feature: MA Experiment 108464 PARAMETER Experiment Name: At_Germinating_Seeds_cDNA_P Parameter: Age (day) Value: 4 vs. 0
  misc_feature: MA Experiment 108464 PARAMETER Experiment Name: At_Germinating_Seeds_cDNA_P Parameter: Tissue Value: Germinating Seeds
  misc_feature: MA Experiment ID: 108572 Result: Up-regulated in Transcription
  misc_feature: MA Experiment 108572 PARAMETER Experiment Name: At_Drought_cDNA_P Parameter: Timepoint (hr) Value: 1
  misc_feature: MA Experiment 108572 PARAMETER Experiment Name: At_Drought_cDNA_P Parameter: Tissue Value: Aerial
  misc_feature: MA Experiment 108572 PARAMETER Experiment Name: At_Drought_cDNA_P Parameter: Treatment Value: Drought vs. No Drought
  misc_feature: MA Experiment ID: 108573 Result: Up-regulated in Transcription
  misc_feature: MA Experiment 108573 PARAMETER Experiment Name: At_Drought_cDNA_P Parameter: Timepoint (hr) Value: 6
  misc_feature: MA Experiment 108573 PARAMETER Experiment Name: At_Drought_cDNA_P Parameter: Tissue Value: Aerial
  misc_feature: MA Experiment 108573 PARAMETER Experiment Name: At_Drought_cDNA_P Parameter: Treatment Value: Drought vs. No Drought
  misc_feature: MA Experiment ID: 108605 Result: Up-regulated in Transcription
  misc_feature: MA Experiment 108605 PARAMETER Experiment Name: At_100uM_ABA_cDNA_P Parameter: Timepoint (hr) Value: 6
  misc_feature: MA Experiment 108605 PARAMETER Experiment Name: At_100uM_ABA_cDNA_P Parameter: Tissue Value: Aerial
  misc_feature: MA Experiment 108605 PARAMETER Experiment Name: At_100uM_ABA_cDNA_P Parameter: Treatment Value: 100uM ABA vs. No Treatment
  misc_feature: MA Experiment ID: 108607 Result: Up-regulated in Transcription
  misc_feature: MA Experiment 108607 PARAMETER Experiment Name: At_100uM_ABA_cDNA_P Parameter: Timepoint (hr) Value: 4
  misc_feature: MA Experiment 108607 PARAMETER Experiment Name: At_100uM_ABA_cDNA_P Parameter: Tissue Value: Aerial
  misc_feature: MA Experiment 108607 PARAMETER Experiment Name: At_100uM_ABA_cDNA_P Parameter: Treatment Value: 100uM ABA vs. No Treatment
  misc_feature: MA Experiment ID: 20000111 Result: Down-regulated in Transcription
  misc_feature: MA Experiment 20000111 PARAMETER Experiment Name: At_42deg_Heat_cDNA_P Parameter: Temperature (deg C) Value: 42 vs. 22
  misc_feature: MA Experiment 20000111 PARAMETER Experiment Name: At_42deg_Heat_cDNA_P Parameter: Timepoint (hr) Value: 6
  misc_feature: MA Experiment 20000111 PARAMETER Experiment Name: At_42deg_Heat_cDNA_P Parameter: Tissue Value: Aerial
  misc_feature: MA Experiment ID: 20000112 Result: Down-regulated in Transcription
  misc_feature: MA Experiment 20000112 PARAMETER Experiment Name: At_42deg_Heat_cDNA_P Parameter: Temperature (deg C) Value: 42 vs. 22
  misc_feature: MA Experiment 20000112 PARAMETER Experiment Name: At_42deg_Heat_cDNA_P Parameter: Timepoint (hr) Value: 2
  misc_feature: MA Experiment 20000112 PARAMETER Experiment Name: At_42deg_Heat_cDNA_P Parameter: Tissue Value: Aerial
  misc_feature: MA Experiment ID: 20000144 Result: Down-regulated in Transcription
  misc_feature: MA Experiment 20000144 PARAMETER Experiment Name: At_42deg_Heat_cDNA_P Parameter: Temperature (deg C) Value: 42 vs. 22
  misc_feature: MA Experiment 20000144 PARAMETER Experiment Name: At_42deg_Heat_cDNA_P Parameter: Timepoint (hr) Value: 1
  misc_feature: MA Experiment 20000144 PARAMETER Experiment Name: At_42deg_Heat_cDNA_P Parameter: Tissue Value: Aerial
  misc_feature: MA Experiment ID: 20000169 Result: Up-regulated in Transcription
  misc_feature: MA Experiment 20000169 PARAMETER Experiment Name: At_100uM_ABA_P Parameter: Age (day) Value: 14
  misc_feature: MA Experiment 20000169 PARAMETER Experiment Name: At_100uM_ABA_P Parameter: Organism Value: A. thaliana
  misc_feature: MA Experiment 20000169 PARAMETER Experiment Name: At_100uM_ABA_P Parameter: Plant Line Value: WS
  misc_feature: MA Experiment 20000169 PARAMETER Experiment Name: At_100uM_ABA_P Parameter: Timepoint (hr) Value: 6
  misc_feature: MA Experiment 20000169 PARAMETER Experiment Name: At_100uM_ABA_P Parameter: Tissue Value: Aerial
  misc_feature: MA Experiment 20000169 PARAMETER Experiment Name: At_100uM_ABA_P Parameter: Treatment Value: 100uM ABA vs. No Treatment
  misc_feature: MA Experiment ID: 20000180 Result: Up-regulated in Transcription
  misc_feature: MA Experiment 20000180 PARAMETER Experiment Name: At_Germinating_Seeds_P Parameter: Age (hr) Value: 24 vs. 0
  misc_feature: MA Experiment 20000180 PARAMETER Experiment Name: At_Germinating_Seeds_P Parameter: Tissue Value: Germinating Seeds
  misc_feature: MA Experiment ID: 20000184 Result: Up-regulated in Transcription
  misc_feature: MA Experiment 20000184 PARAMETER Experiment Name: At_Shoots__P Parameter: Age (day) Value: 7
  misc_feature: MA Experiment 20000184 PARAMETER Experiment Name: At_Shoots__P Parameter: Tissue Value: Shoots vs. Whole Plant
  misc_feature: MA Experiment ID: 20000185 Result: Up-regulated in Transcription
  misc_feature: MA Experiment 20000185 PARAMETER Experiment Name: At_Roots__P Parameter: Age (day) Value: 7 vs. 21
  misc_feature: MA Experiment 20000185 PARAMETER Experiment Name: At_Roots__P Parameter: Organism Value: A. thaliana
  misc_feature: MA Experiment 20000185 PARAMETER Experiment Name: At_Roots__P Parameter: Tissue Value: Roots vs. Whole Plant
  misc_feature: MA Experiment ID: 20000234 Result: Up-regulated in Transcription
  misc_feature: MA Experiment 20000234 PARAMETER Experiment Name: At_Siliques_P Parameter: Age (day) Value: 21
  misc_feature: MA Experiment 20000234 PARAMETER Experiment Name: At_Siliques_P Parameter: Organism Value: A. thaliana
  misc_feature: MA Experiment 20000234 PARAMETER Experiment Name: At_Siliques_P Parameter: Plant Line Value: WS
  misc_feature: MA Experiment 20000234 PARAMETER Experiment Name: At_Siliques_P Parameter: Tissue Value: Less Than 5mm Siliques vs. Whole Plant
  misc_feature: MA Experiment ID: 20000264 Result: Up-regulated in Transcription
  misc_feature: MA Experiment 20000264 PARAMETER Experiment Name: At_Open_Flower_P Parameter: Age (day) Value: 21
  misc_feature: MA Experiment 20000264 PARAMETER Experiment Name: At_Open_Flower_P Parameter: Plant Line Value: WS
  misc_feature: MA Experiment 20000264 PARAMETER Experiment Name: At_Open_Flower_P Parameter: Tissue Value: Open Flower vs. Whole Plant
  misc_feature: MA Experiment ID: 20000265 Result: Up-regulated in Transcription
  misc_feature: MA Experiment 20000265 PARAMETER Experiment Name: At_Open_Flower_P Parameter: Age (day) Value: 21
  misc_feature: MA Experiment 20000265 PARAMETER Experiment Name: At_Open_Flower_P Parameter: Plant Line Value: WS
  misc_feature: MA Experiment 20000265 PARAMETER Experiment Name: At_Open_Flower_P Parameter: Tissue Value: Closed Flower vs. Whole Plant
  misc_feature: MA Experiment ID: 20000286 Result: Up-regulated in Transcription
  misc_feature: MA Experiment 20000286 PARAMETER Experiment Name: At_Open_Flower_P Parameter: Age (day) Value: 21
  misc_feature: MA Experiment 20000286 PARAMETER Experiment Name: At_Open_Flower_P Parameter: Plant Line Value: WS
  misc_feature: MA Experiment 20000286 PARAMETER Experiment Name: At_Open_Flower_P Parameter: Tissue Value: Half Open vs. Whole Plant
  misc_feature: MA Experiment ID: 20000438 Result: Up-regulated in Transcription
  misc_feature: MA Experiment 20000438 PARAMETER Experiment Name: At_Shoots__P Parameter: Age (day) Value: 14
  misc_feature: MA Experiment 20000438 PARAMETER Experiment Name: At_Shoots__P Parameter: Tissue Value: Shoots vs. Whole Plant
  misc_feature: MA Experiment ID: 20000794 Result: Down-regulated in Transcription
  misc_feature: MA Experiment 20000794 PARAMETER Experiment Name: At_Petals_P Parameter: Age (day) Value: 23-25 days
  misc_feature: MA Experiment 20000794 PARAMETER Experiment Name: At_Petals_P Parameter: Plant Line Value: WS
  misc_feature: MA Experiment 20000794 PARAMETER Experiment Name: At_Petals_P Parameter: Tissue Value: Petals vs. Whole plant
  misc_feature: MA Experiment ID: 20001905 Result: Up-regulated in Transcription
  misc_feature: MA Experiment 20001905 PARAMETER Experiment Name: At_Drought_Reproduction_P Parameter: Age (day) Value: 40
  misc_feature: MA Experiment 20001905 PARAMETER Experiment Name: At_Drought_Reproduction_P Parameter: Organism Value: A. thaliana
  misc_feature: MA Experiment 20001905 PARAMETER Experiment Name: At_Drought_Reproduction_P Parameter: Plant Line Value: WS
  misc_feature: MA Experiment 20001905 PARAMETER Experiment Name: At_Drought_Reproduction_P Parameter: Timepoint (day) Value: 10
  misc_feature: MA Experiment 20001905 PARAMETER Experiment Name: At_Drought_Reproduction_P Parameter: Tissue Value: Rosettes
  misc_feature: MA Experiment 20001905 PARAMETER Experiment Name: At_Drought_Reproduction_P Parameter: Treatment Value: Drought vs. No Drought
ataaatgctcctctcctccgatctctccgccataaaatctactctttcttcttctgggtgttcaaagaattagtcgttctcgcgtattcactttccatggcgggctttctctccgttgtccggcgcgtgtacctcactctctacaattggatcgtctttgctggatgggctcaggttttgtacttagcgataacgacgttgaaggaaacgggttatgagaatgtctatgacgccattgagaagcctctccagcttgctcagactgccgccgttctcgagattcttcatggattagtaggtttggtcagatctcctgtttctgcaactctgccacagataggttcaaggctatttctcacttggggcatcctatacagttttccagaggtccgatctcattttcttgttacgtcgctggtcataagctggtctatcacagagattattcgctactcattcttcggctttaaggaagctctaggctttgcaccttcatggcacttgtggctcagatacagcagctttttattgctataccctaccggtatcaccagcgaagttggtcttatctaccttgccttaccacacatcaagacatcggagatgtacagcgttaggatgcctaacatattgaacttctcatttgacttcttctatgcaacgatactcgtccttgcaatctatgtcccaggtagcccacacatgtacaggtacatgcttggtcagcgaaagagagctctctccaaatccaagagggaataaaagaaaagatttagaaagagacgaaaaagctcatcaactgttttctcctcttgtcttgttcgttcatgtactactagtctactactacaacttgtcttttgtttagcttgtttgagcttttacttcctcggcgattacttgaacttacatgcagcaggatactattaagtgtaatgtggtttctaaattaataagaaaatcattggttccttc

SEQ ID NO: 104941 - protein, 253 aa, Arabidopsis thaliana
  peptide (1)..(253): Ceres Seq. ID no. 13616117
  misc_feature (87)..(251): Pfam Name: Protein tyrosine phosphatase-like protein, PTPLA Pfam Description: Protein tyrosine phosphatase-like protein, PTPLA
  misc_feature (33)..(253): Homolog of NCBI NO: 22326707 NR Description: protein phosphatase -related [Arabidopsis >gi|17473600|gb|AAL38266.1| putative protein phosphatase thaliana] >gi|24411193|emb|CAD45041.1| PEPINO protein
  misc_feature (33)..(251): Homolog of NCBI NO: 38344078 NR Description: OSJNBb0056F09.1 [Oryza sativa (japonica
  misc_feature (33)..(253): Homolog of NCBI NO: 11358666 NR Description: probable protein phosphatase - Arabidopsis >gi|7671455|emb|CAB89395.1| putative protein phosphatase
  misc_feature (38)..(251): Homolog of NCBI NO: 34895862 NR Description: P0009G03.11 [Oryza sativa (japonica
  misc_feature (91)..(251): Homolog of NCBI NO: 34895852 NR Description: P0009G03.5 [Oryza sativa (japonica
  misc_feature (33)..(234): Homolog of NCBI NO: 34895856 NR Description: P0009G03.7 [Oryza sativa (japonica
  misc_feature (33)..(226): Homolog of NCBI NO: 34895854 NR Description: P0009G03.6 [Oryza sativa (japonica
  misc_feature (40)..(253): Homolog of NCBI NO: 34869216 NR Description: similar to protein tyrosine phosphatase-like
  misc_feature (40)..(253): Homolog of NCBI NO: 20892371 NR Description: similar to protein tyrosine phosphatase-like PTPLB [Mus musculus] >gi|12857727|dbj|BAB31092.1| unnamed protein [Mus musculus] >gi|20070640|gb|AAH27289.1| RIKEN cDNA 6330408J20
  misc_feature (37)..(247): Homolog of NCBI NO: 7305421 NR Description: protein tyrosine phosphatase-like (proline of catalytic arginine), member a [Mus musculus]
INAPLLRSLRHKIYSFFFWVFKELVVLAYSLSMAGFLSVVRRVYLTLYNWIVFAGWAQVLYLAITTLKETGYENVYDAIEKPLQLAQTAAVLEILHGLVGLVRSPVSATLPQIGSRLFLTWGILYSFPEVRSHFLVTSLVISWSITEIIRYSFFGFKEALGFAPSWHLWLRYSSFLLLYPTGITSEVGLIYLALPHIKTSEMYSVRMPNILNFSFDFFYATILVLAIYVPGSPHMYRYMLGQRKRALSKSKRE

SEQ ID NO: 104942 - protein, 221 aa, Arabidopsis thaliana; identical to SEQ ID NO: 21867
  peptide (1)..(221): Ceres Seq. ID no. 13616118
  misc_feature (55)..(219): Pfam Name: Protein tyrosine phosphatase-like protein, PTPLA Pfam Description: Protein tyrosine phosphatase-like protein, PTPLA
  misc_feature (1)..(221): Homolog of NCBI NO: 22326707 NR Description: protein phosphatase -related [Arabidopsis >gi|17473600|gb|AAL38266.1| putative protein phosphatase thaliana] >gi|24411193|emb|CAD45041.1| PEPINO protein
  misc_feature (1)..(219): Homolog of NCBI NO: 38344078 NR Description: OSJNBb0056F09.1 [Oryza sativa (japonica
  misc_feature (1)..(221): Homolog of NCBI NO: 11358666 NR Description: probable protein phosphatase - Arabidopsis >gi|7671455|emb|CAB89395.1| putative protein phosphatase
  misc_feature (6)..(219): Homolog of NCBI NO: 34895862 NR Description: P0009G03.11 [Oryza sativa (japonica
  misc_feature (59)..(219): Homolog of NCBI NO: 34895852 NR Description: P0009G03.5 [Oryza sativa (japonica
  misc_feature (1)..(202): Homolog of NCBI NO: 34895856 NR Description: P0009G03.7 [Oryza sativa (japonica
  misc_feature (1)..(194): Homolog of NCBI NO: 34895854 NR Description: P0009G03.6 [Oryza sativa (japonica
  misc_feature (8)..(221): Homolog of NCBI NO: 34869216 NR Description: similar to protein tyrosine phosphatase-like
  misc_feature (8)..(221): Homolog of NCBI NO: 20892371 NR Description: similar to protein tyrosine phosphatase-like PTPLB [Mus musculus] >gi|12857727|dbj|BAB31092.1| unnamed protein [Mus musculus] >gi|20070640|gb|AAH27289.1| RIKEN cDNA 6330408J20
  misc_feature (5)..(215): Homolog of NCBI NO: 7305421 NR Description: protein tyrosine phosphatase-like (proline of catalytic arginine), member a [Mus musculus]

SEQ ID NO: 104943 - DNA, 1754 bp, Arabidopsis thaliana
  misc_feature (1)..(1754): Ceres Seq. ID no. 13616122
  misc_feature: MA Experiment ID: 20000180 Result: Up-regulated in Transcription
  misc_feature: MA Experiment 20000180 PARAMETER Experiment Name: At_Germinating_Seeds_P Parameter: Age (hr) Value: 24 vs. 0
  misc_feature: MA Experiment 20000180 PARAMETER Experiment Name: At_Germinating_Seeds_P Parameter: Tissue Value: Germinating Seeds
  misc_feature: MA Experiment ID: 20000184 Result: Down-regulated in Transcription
  misc_feature: MA Experiment 20000184 PARAMETER Experiment Name: At_Shoots__P Parameter: Age (day) Value: 7
  misc_feature: MA Experiment 20000184 PARAMETER Experiment Name: At_Shoots__P Parameter: Tissue Value: Shoots vs. Whole Plant
  misc_feature: MA Experiment ID: 20000227 Result: Down-regulated in Transcription
  misc_feature: MA Experiment 20000227 PARAMETER Experiment Name: At_Root-Tips-vs-Tops_P Parameter: Tissue Value: Root Tips vs. Root Tops
  misc_feature: MA Experiment ID: 20000264 Result: Up-regulated in Transcription
  misc_feature: MA Experiment 20000264 PARAMETER Experiment Name: At_Open_Flower_P Parameter: Age (day) Value: 21
  misc_feature: MA Experiment 20000264 PARAMETER Experiment Name: At_Open_Flower_P Parameter: Plant Line Value: WS
  misc_feature: MA Experiment 20000264 PARAMETER Experiment Name: At_Open_Flower_P Parameter: Tissue Value: Open Flower vs. Whole Plant
  misc_feature: MA Experiment ID: 20000265 Result: Down-regulated in Transcription
  misc_feature: MA Experiment 20000265 PARAMETER Experiment Name: At_Open_Flower_P Parameter: Age (day) Value: 21
  misc_feature: MA Experiment 20000265 PARAMETER Experiment Name: At_Open_Flower_P Parameter: Plant Line Value: WS
  misc_feature: MA Experiment 20000265 PARAMETER Experiment Name: At_Open_Flower_P Parameter: Tissue Value: Closed Flower vs. Whole Plant
  misc_feature: MA Experiment ID: 20000438 Result: Down-regulated in Transcription
  misc_feature: MA Experiment 20000438 PARAMETER Experiment Name: At_Shoots__P Parameter: Age (day) Value: 14
  misc_feature: MA Experiment 20000438 PARAMETER Experiment Name: At_Shoots__P Parameter: Tissue Value: Shoots vs. Whole Plant
  misc_feature: MA Experiment ID: 20000452 Result: Up-regulated in Transcription
  misc_feature: MA Experiment 20000452 PARAMETER Experiment Name: At_CS6879_Shoots-Roots_P Parameter: Age (day) Value: 14
  misc_feature: MA Experiment 20000452 PARAMETER Experiment Name: At_CS6879_Shoots-Roots_P Parameter: Organism Value: A. thaliana
  misc_feature: MA Experiment 20000452 PARAMETER Experiment Name: At_CS6879_Shoots-Roots_P Parameter: Plant Line Value: CS6879 vs. WS
  misc_feature: MA Experiment 20000452 PARAMETER Experiment Name: At_CS6879_Shoots-Roots_P Parameter: Tissue Value: Shoots
  misc_feature: MA Experiment ID: 20000453 Result: Up-regulated in Transcription
  misc_feature: MA Experiment 20000453 PARAMETER Experiment Name: At_100uM_ABA_P Parameter: Age (day) Value: 15
  misc_feature: MA Experiment 20000453 PARAMETER Experiment Name: At_100uM_ABA_P Parameter: Organism Value: A. thaliana
  misc_feature: MA Experiment 20000453 PARAMETER Experiment Name: At_100uM_ABA_P Parameter: Plant Line Value: WS
  misc_feature: MA Experiment 20000453 PARAMETER Experiment Name: At_100uM_ABA_P Parameter: Timepoint (hr) Value: 24
  misc_feature: MA Experiment 20000453 PARAMETER Experiment Name: At_100uM_ABA_P Parameter: Tissue Value: Aerial
  misc_feature: MA Experiment 20000453 PARAMETER Experiment Name: At_100uM_ABA_P Parameter: Treatment Value: 100uM ABA vs. No Treatment
  misc_feature: MA Experiment ID: 20000495 Result: Up-regulated in Transcription
  misc_feature: MA Experiment 20000495 PARAMETER Experiment Name: At_Guard_Cells_P Parameter: Harvest Date Value: 8/2/2002
  misc_feature: MA Experiment 20000495 PARAMETER Experiment Name: At_Guard_Cells_P Parameter: Organism Value: A. thaliana
  misc_feature: MA Experiment 20000495 PARAMETER Experiment Name: At_Guard_Cells_P Parameter: Tissue Value: Guard Cells vs. Leaves
  misc_feature: MA Experiment ID: 20000709 Result: Down-regulated in Transcription
  misc_feature: MA Experiment 20000709 PARAMETER Experiment Name: At_15mM_NH4NO3_L-to-H_P Parameter: Age (hr) Value: 14
  misc_feature: MA Experiment 20000709 PARAMETER Experiment Name: At_15mM_NH4NO3_L-to-H_P Parameter: Organism Value: A. thaliana
  misc_feature: MA Experiment 20000709 PARAMETER Experiment Name: At_15mM_NH4NO3_L-to-H_P Parameter: Plant Line Value: WS
  misc_feature: MA Experiment 20000709 PARAMETER Experiment Name: At_15mM_NH4NO3_L-to-H_P Parameter: Timepoint (hr) Value: 4
  misc_feature: MA Experiment 20000709 PARAMETER Experiment Name: At_15mM_NH4NO3_L-to-H_P Parameter: Tissue Value: Aerial
  misc_feature: MA Experiment 20000709 PARAMETER Experiment Name: At_15mM_NH4NO3_L-to-H_P Parameter: Treatment Value: 15mM NH4NO3 vs. 30mM Mannitol
  misc_feature: MA Experiment ID: 20000794 Result: Up-regulated in Transcription
  misc_feature: MA Experiment 20000794 PARAMETER Experiment Name: At_Petals_P Parameter: Age (day) Value: 23-25 days
  misc_feature: MA Experiment 20000794 PARAMETER Experiment Name: At_Petals_P Parameter: Plant Line Value: WS
  misc_feature: MA Experiment 20000794 PARAMETER Experiment Name: At_Petals_P Parameter: Tissue Value: Petals vs. Whole plant
  misc_feature: MA Experiment ID: 20001458 Result: Down-regulated in Transcription
  misc_feature: MA Experiment 20001458 PARAMETER Experiment Name: At_50mM_NH4NO3_L-to-H_P Parameter: Age (day) Value: Undefined
  misc_feature: MA Experiment 20001458 PARAMETER Experiment Name: At_50mM_NH4NO3_L-to-H_P Parameter: Organism Value: Undefined
  misc_feature: MA Experiment 20001458 PARAMETER Experiment Name: At_50mM_NH4NO3_L-to-H_P Parameter: Plant Line Value: Undefined
  misc_feature: MA Experiment 20001458 PARAMETER Experiment Name: At_50mM_NH4NO3_L-to-H_P Parameter: Timepoint (hr) Value: 2
  misc_feature: MA Experiment 20001458 PARAMETER Experiment Name: At_50mM_NH4NO3_L-to-H_P Parameter: Tissue Value: Siliques
  misc_feature: MA Experiment 20001458 PARAMETER Experiment Name: At_50mM_NH4NO3_L-to-H_P Parameter: Treatment Value: 50mM NH4NO3 vs. 100mM Manitol
  misc_feature: MA Experiment ID: 20001503 Result: Up-regulated in Transcription
  misc_feature: MA Experiment 20001503 PARAMETER Experiment Name: At_Far-red-enriched_P Parameter: Age (day) Value: 7
  misc_feature: MA Experiment 20001503 PARAMETER Experiment Name: At_Far-red-enriched_P Parameter: Light Value: Far-red enriched vs. White
  misc_feature: MA Experiment 20001503 PARAMETER Experiment Name: At_Far-red-enriched_P Parameter: Organism Value: A. thaliana
  misc_feature: MA Experiment 20001503 PARAMETER Experiment Name: At_Far-red-enriched_P Parameter: Plant Line Value: Columbia
  misc_feature: MA Experiment 20001503 PARAMETER Experiment Name: At_Far-red-enriched_P Parameter: Timepoint (day) Value: 3
  misc_feature: MA Experiment 20001503 PARAMETER Experiment Name: At_Far-red-enriched_P Parameter: Tissue Value: Whole Plant
  misc_feature: MA Experiment ID: 20001556 Result: Down-regulated in Transcription
  misc_feature: MA Experiment 20001556 PARAMETER Experiment Name: At_Drought_Soil_Dry_P Parameter: Age (day) Value: 26
  misc_feature: MA Experiment 20001556 PARAMETER Experiment Name: At_Drought_Soil_Dry_P Parameter: Organism Value: A. thaliana
  misc_feature: MA Experiment 20001556 PARAMETER Experiment Name: At_Drought_Soil_Dry_P Parameter: Plant Line Value: WS
  misc_feature: MA Experiment 20001556 PARAMETER Experiment Name: At_Drought_Soil_Dry_P Parameter: Post Timepoint (hr) Value: None
  misc_feature: MA Experiment 20001556 PARAMETER Experiment Name: At_Drought_Soil_Dry_P Parameter: Post-Treatment Value: None
  misc_feature: MA Experiment 20001556 PARAMETER Experiment Name: At_Drought_Soil_Dry_P Parameter: Timepoint (day) Value: 12
  misc_feature: MA Experiment 20001556 PARAMETER Experiment Name: At_Drought_Soil_Dry_P Parameter: Treatment Value: Drought vs. No Drought
  misc_feature: MA Experiment ID: 20001557 Result: Down-regulated in Transcription
  misc_feature: MA Experiment 20001557 PARAMETER Experiment Name: At_Drought_Soil_Dry_P Parameter: Age (day) Value: 27
  misc_feature: MA Experiment 20001557 PARAMETER Experiment Name: At_Drought_Soil_Dry_P Parameter: Organism Value: A. thaliana
  misc_feature: MA Experiment 20001557 PARAMETER Experiment Name: At_Drought_Soil_Dry_P Parameter: Plant Line Value: WS
  misc_feature: MA Experiment 20001557 PARAMETER Experiment Name: At_Drought_Soil_Dry_P Parameter: Post Timepoint (hr) Value: 3
  misc_feature: MA Experiment 20001557 PARAMETER Experiment Name: At_Drought_Soil_Dry_P Parameter: Post-Treatment Value: Re-Water vs. No Drought
  misc_feature: MA Experiment 20001557 PARAMETER Experiment Name: At_Drought_Soil_Dry_P Parameter: Timepoint (day) Value: 13
  misc_feature: MA Experiment 20001557 PARAMETER Experiment Name: At_Drought_Soil_Dry_P Parameter: Treatment Value: Drought vs. No Drought
  misc_feature: MA Experiment ID: 20001558 Result: Down-regulated in Transcription
  misc_feature: MA Experiment 20001558 PARAMETER Experiment Name: At_Drought_Soil_Dry_P Parameter: Age (day) Value: 27
  misc_feature: MA Experiment 20001558 PARAMETER Experiment Name: At_Drought_Soil_Dry_P Parameter: Organism Value: A. thaliana
  misc_feature: MA Experiment 20001558 PARAMETER Experiment Name: At_Drought_Soil_Dry_P Parameter: Plant Line Value: WS
  misc_feature: MA Experiment 20001558 PARAMETER Experiment Name: At_Drought_Soil_Dry_P Parameter: Post Timepoint (hr) Value: 6
  misc_feature: MA Experiment 20001558 PARAMETER Experiment Name: At_Drought_Soil_Dry_P Parameter: Post-Treatment Value: Re-Water vs. No Drought
  misc_feature: MA Experiment 20001558 PARAMETER Experiment Name: At_Drought_Soil_Dry_P Parameter: Timepoint (day) Value: 13
  misc_feature: MA Experiment 20001558 PARAMETER Experiment Name: At_Drought_Soil_Dry_P Parameter: Treatment Value: Drought vs. No Drought
  misc_feature: MA Experiment ID: 20001757 Result: Down-regulated in Transcription
  misc_feature: MA Experiment 20001757 PARAMETER Experiment Name: At_50mM_NH4NO3_L-to-H_P Parameter: Timepoint (hr) Value: 6
  misc_feature: MA Experiment 20001757 PARAMETER Experiment Name: At_50mM_NH4NO3_L-to-H_P Parameter: Tissue Value: Leaf
  misc_feature: MA Experiment 20001757 PARAMETER Experiment Name: At_50mM_NH4NO3_L-to-H_P Parameter: Treatment Value: 50mM NH4NO3 vs 100mM Mannitol
  misc_feature: MA Experiment ID: 20001773 Result: Up-regulated in Transcription
  misc_feature: MA Experiment 20001773 PARAMETER Experiment Name: At_Far-red-enriched-adult_P Parameter: Age (day) Value: 30
  misc_feature: MA Experiment 20001773 PARAMETER Experiment Name: At_Far-red-enriched-adult_P Parameter: Light Value: Far-red enriched vs. White
  misc_feature: MA Experiment 20001773 PARAMETER Experiment Name: At_Far-red-enriched-adult_P Parameter: Organism Value: A. thaliana
  misc_feature: MA Experiment 20001773 PARAMETER Experiment Name: At_Far-red-enriched-adult_P Parameter: Plant Line Value: Columbia
  misc_feature: MA Experiment 20001773 PARAMETER Experiment Name: At_Far-red-enriched-adult_P Parameter: Timepoint (hr) Value: 48
  misc_feature: MA Experiment 20001773 PARAMETER Experiment Name: At_Far-red-enriched-adult_P Parameter: Tissue Value: Aerial
  misc_feature: MA Experiment ID: 20001911 Result: Down-regulated in Transcription
  misc_feature: MA Experiment 20001911 PARAMETER Experiment Name: At_Drought_Reproduction_P Parameter: Age (day) Value: 40
  misc_feature: MA Experiment 20001911 PARAMETER Experiment Name: At_Drought_Reproduction_P Parameter: Organism Value: A. thaliana
  misc_feature: MA Experiment 20001911 PARAMETER Experiment Name: At_Drought_Reproduction_P Parameter: Plant Line Value: WS
  misc_feature: MA Experiment 20001911 PARAMETER Experiment Name: At_Drought_Reproduction_P Parameter: Timepoint (day) Value: 10
  misc_feature: MA Experiment 20001911 PARAMETER Experiment Name: At_Drought_Reproduction_P Parameter: Tissue Value: Flowers
  misc_feature: MA Experiment 20001911 PARAMETER Experiment Name: At_Drought_Reproduction_P Parameter: Treatment Value: Drought vs. No Drought
aaagcttaacaacctccactagagactttcttgagcaaaaaagattggttataaaggaccaaccattgtcatgttattgagtgtcatttttgtgagggagagaattaagagagcaaaatgagcataaataggaatctgttgaatatcataataatcctttgtatatgtctcaatttgggttgtaacgatggagctcaagaaagagagactgattctcatactatccaagtcagctctctcctcccttcatcatcatcatcttgtgttctttctcccagagcgtctactacaaagtcttcactgcacgtgacgcatagacacggcacgtgttcgcgtctaaacaatggcaaggccacgagtccagaccatgtcgagatcctaagactcgaccaggctcgcgtaaactcaatccactcaaaactatcgaagaaactcgcaacagatcacgtcagtgaaagcaagtcaacggatctaccggctaaagacggaagcacactcggttcaggtaactacatcgtgacggtcggcctcgggacaccaaagaacgatctatcactaatcttcgacactggaagcgatttaacgtggactcagtgtcagccatgtgttcgaacttgctatgaccagaaggaaccaatctttaacccttctaagtctacttcttactacaacgtatcctgctcatcggctgcgtgtggttctctctcttctgctacaggaaacgccggaagctgttcggcttcgaattgcatctacggtattcaatacggcgatcaatcgttctccgtcggatttctcgccaaggagaagtttacactaacgaactccgacgtatttgacggcgtttatttcggttgcggcgagaacaaccaaggacttttcaccggtgtcgccggacttctcggtcttggtcgtgacaagctttcgtttccgtcgcagacggcaacggcttacaataagatcttctcttactgcctcccttcctccgctagctacaccggacatctcacattcggatccgccggaatctccagatccgttaaattcacaccaatttcaaccatcactgatggaacttccttctacggccttaatatcgtcgcaatcaccgtcggcggtcagaaattgccgattccttcaactgtattctctactccgggagctttaatcgattccggcaccgttatcactcgtctcccgccgaaagcctacgcggcgttaagaagctcgttcaaggcgaagatgtcaaagtatccgaccacgtcgggcgtctcgatcttggacacgtgtttcgatctcagcgggtttaagacggtgactatcccgaaagtggcgttctctttcagcggtggcgccgtcgtggagcttggttcgaaagggatattttacgtgtttaagatatctcaggtttgtctggcgtttgcagggaatagcgatgacagtaacgctgccatctttggaaacgttcagcagcaaacgctagaagttgtgtatgatggtgcgggtgggcgggtcgggtttgctccaaacgggtgtagttaagttagttaatgaaaaacagaacggggtaaattttaaatttatggatttggcacaaattagctttatccttaatcaagtgtgtaatttgggtaaagatcggaattcgtgatggtctttgaagtaattgtatagtaataagtgtgcatgatacaacaattacaagaacaaactgtttattgtaaaattttattccaatacaactatacaagatg

SEQ ID NO: 104944 - protein, 474 aa, Arabidopsis thaliana; identical to SEQ ID NO: 37702
  peptide (1)..(474): Ceres Seq. ID no. 13616123
  misc_feature (87)..(471): Pfam Name: Eukaryotic aspartyl protease Pfam Description: Eukaryotic aspartyl protease
  misc_feature (1)..(474): Homolog of NCBI NO: 22326716 NR Description: nucleoid DNA-binding protein cnd41 - like protein thaliana] >gi|18700103|gb|AAL77663.1| AT5g10770/T30N20_40 thaliana] >gi|24111269|gb|AAN46758.1| At5g10770/T30N20_40
  misc_feature (59)..(474): Homolog of NCBI NO: 11358588 NR Description: nucleoid DNA-binding protein cnd41-like protein -
  misc_feature (1)..(473): Homolog of NCBI NO: 24417232 NR Description: unknown [Arabidopsis thaliana]
  misc_feature (1)..(473): Homolog of NCBI NO: 15238250 NR Description: nucleoid DNA-binding protein cnd41 - like protein
  misc_feature (12)..(474): Homolog of NCBI NO: 7489168 NR Description: nucleoid DNA-binding protein cnd41, chloroplast - tobacco >gi|2541876|dbj|BAA22813.1| CND41, chloroplast nucleoid
  misc_feature (30)..(474): Homolog of NCBI NO: 24430421 NR Description: 41 kD chloroplast nucleoid DNA binding protein
  misc_feature (1)..(473): Homolog of NCBI NO: 21595063 NR Description: putative aspartyl protease [Arabidopsis thaliana]
  misc_feature (1)..(473): Homolog of NCBI NO: 18412482 NR Description: aspartyl protease -related [Arabidopsis thaliana] At1g79720/F19K16_30 [Arabidopsis thaliana]
  misc_feature (54)..(473): Homolog of NCBI NO: 25406599 NR Description: probable aspartyl proteinase, 105611-106921 - Arabidopsis thaliana >gi|7715602|gb|AAF68120.1|AC010793_15 [Arabidopsis thaliana] >gi|12324588|gb|AAG52249.1|AC011717_17
  misc_feature (88)..(473): Homolog of NCBI NO: 28392860 NR Description: unknown protein [Arabidopsis thaliana]

SEQ ID NO: 104945 - DNA, 906 bp, Arabidopsis thaliana
  misc_feature (1)..(906): Ceres Seq. ID no. 13616132
  misc_feature: MA Experiment ID: 108461 Result: Up-regulated in Transcription
  misc_feature: MA Experiment 108461 PARAMETER Experiment Name: At_Germinating_Seeds_cDNA_P Parameter: Age (day) Value: 1 vs. 0
  misc_feature: MA Experiment 108461 PARAMETER Experiment Name: At_Germinating_Seeds_cDNA_P Parameter: Tissue Value: Germinating Seeds
  misc_feature: MA Experiment ID: 108462 Result: Up-regulated in Transcription
  misc_feature: MA Experiment 108462 PARAMETER Experiment Name: At_Germinating_Seeds_cDNA_P Parameter: Age (day) Value: 2 vs. 0
  misc_feature: MA Experiment 108462 PARAMETER Experiment Name: At_Germinating_Seeds_cDNA_P Parameter: Tissue Value: Germinating Seeds
  misc_feature: MA Experiment ID: 108463 Result: Up-regulated in Transcription
  misc_feature: MA Experiment 108463 PARAMETER Experiment Name: At_Germinating_Seeds_cDNA_P Parameter: Age (day) Value: 3 vs. 0
  misc_feature: MA Experiment 108463 PARAMETER Experiment Name: At_Germinating_Seeds_cDNA_P Parameter: Tissue Value: Germinating Seeds
  misc_feature: MA Experiment ID: 108464 Result: Up-regulated in Transcription
  misc_feature: MA Experiment 108464 PARAMETER Experiment Name: At_Germinating_Seeds_cDNA_P Parameter: Age (day) Value: 4 vs. 0
  misc_feature: MA Experiment 108464 PARAMETER Experiment Name: At_Germinating_Seeds_cDNA_P Parameter: Tissue Value: Germinating Seeds
  misc_feature: MA Experiment ID: 108488 Result: Down-regulated in Transcription
  misc_feature: MA Experiment ID: 108595 Result: Up-regulated in Transcription
  misc_feature: MA Experiment 108595 PARAMETER Experiment Name: At_Ler-pi_Ovule_cDNA_P Parameter: Plant Line Value: null
  misc_feature: MA Experiment ID: 108667 Result: Up-regulated in Transcription
  misc_feature: MA Experiment 108667 PARAMETER Experiment Name: At_2mM_SA_cDNA_P Parameter: Plant Line Value: WS
  misc_feature: MA Experiment 108667 PARAMETER Experiment Name: At_2mM_SA_cDNA_P Parameter: Timepoint (hr) Value: 1
  misc_feature: MA Experiment 108667 PARAMETER Experiment Name: At_2mM_SA_cDNA_P Parameter: Treatment Value: 2mM SA vs. No Treatment
  misc_feature: MA Experiment ID: 20000089 Result: Up-regulated in Transcription
  misc_feature: MA Experiment ID: 20000173 Result: Down-regulated in Transcription
  misc_feature: MA Experiment 20000173 PARAMETER Experiment Name: At_42deg_Heat_P Parameter: Age (day) Value: 14
  misc_feature: MA Experiment 20000173 PARAMETER Experiment Name: At_42deg_Heat_P Parameter: Organism Value: A. thaliana
  misc_feature: MA Experiment 20000173 PARAMETER Experiment Name: At_42deg_Heat_P Parameter: Plant Line Value: WS
  misc_feature: MA Experiment 20000173 PARAMETER Experiment Name: At_42deg_Heat_P Parameter: Temperature (deg C) Value: 42 vs. 22
  misc_feature: MA Experiment 20000173 PARAMETER Experiment Name: At_42deg_Heat_P Parameter: Timepoint (hr) Value: 6
  misc_feature: MA Experiment 20000173 PARAMETER Experiment Name: At_42deg_Heat_P Parameter: Tissue Value: Aerial
  misc_feature: MA Experiment ID: 20000180 Result: Up-regulated in Transcription
  misc_feature: MA Experiment 20000180 PARAMETER Experiment Name: At_Germinating_Seeds_P Parameter: Age (hr) Value: 24 vs. 0
  misc_feature: MA Experiment 20000180 PARAMETER Experiment Name: At_Germinating_Seeds_P Parameter: Tissue Value: Germinating Seeds
  misc_feature: MA Experiment ID: 20000182 Result: Up-regulated in Transcription
  misc_feature: MA Experiment 20000182 PARAMETER Experiment Name: At_2mM_SA_P Parameter: Age (day) Value: 14
  misc_feature: MA Experiment 20000182 PARAMETER Experiment Name: At_2mM_SA_P Parameter: Organism Value: A. thaliana
  misc_feature: MA Experiment 20000182 PARAMETER Experiment Name: At_2mM_SA_P Parameter: Plant Line Value: WS
  misc_feature: MA Experiment 20000182 PARAMETER Experiment Name: At_2mM_SA_P Parameter: Timepoint (hr) Value: 6
  misc_feature: MA Experiment 20000182 PARAMETER Experiment Name: At_2mM_SA_P Parameter: Tissue Value: Aerial
  misc_feature: MA Experiment 20000182 PARAMETER Experiment Name: At_2mM_SA_P Parameter: Treatment Value: 2mM SA vs. No Treatment
  misc_feature: MA Experiment ID: 20000185 Result: Up-regulated in Transcription
  misc_feature: MA Experiment 20000185 PARAMETER Experiment Name: At_Roots__P Parameter: Age (day) Value: 7 vs. 21
  misc_feature: MA Experiment 20000185 PARAMETER Experiment Name: At_Roots__P Parameter: Organism Value: A. thaliana
  misc_feature: MA Experiment 20000185 PARAMETER Experiment Name: At_Roots__P Parameter: Tissue Value: Roots vs. Whole Plant
  misc_feature: MA Experiment ID: 20000224 Result: Up-regulated in Transcription
  misc_feature: MA Experiment ID: 20000227 Result: Up-regulated in Transcription
  misc_feature: MA Experiment 20000227 PARAMETER Experiment Name: At_Root-Tips-vs-Tops_P Parameter: Tissue Value: Root Tips vs. Root Tops
  misc_feature: MA Experiment ID: 20000234 Result: Up-regulated in Transcription
  misc_feature: MA Experiment 20000234 PARAMETER Experiment Name: At_Siliques_P Parameter: Age (day) Value: 21
  misc_feature: MA Experiment 20000234 PARAMETER Experiment Name: At_Siliques_P Parameter: Organism Value: A. thaliana
  misc_feature: MA Experiment 20000234 PARAMETER Experiment Name: At_Siliques_P Parameter: Plant Line Value: WS
  misc_feature: MA Experiment 20000234 PARAMETER Experiment Name: At_Siliques_P Parameter: Tissue Value: Less Than 5mm Siliques vs. Whole Plant
  misc_feature: MA Experiment ID: 20000264 Result: Up-regulated in Transcription
  misc_feature: MA Experiment 20000264 PARAMETER Experiment Name: At_Open_Flower_P Parameter: Age (day) Value: 21
  misc_feature: MA Experiment 20000264 PARAMETER Experiment Name: At_Open_Flower_P Parameter: Plant Line Value: WS
  misc_feature: MA Experiment 20000264 PARAMETER Experiment Name: At_Open_Flower_P Parameter: Tissue Value: Open Flower vs. Whole Plant
  misc_feature: MA Experiment ID: 20000437 Result: Down-regulated in Transcription
  misc_feature: MA Experiment 20000437 PARAMETER Experiment Name: At_Drought_P Parameter: Age (day) Value: 8
  misc_feature: MA Experiment 20000437 PARAMETER Experiment Name: At_Drought_P Parameter: Organism Value: A. thaliana
  misc_feature: MA Experiment 20000437 PARAMETER Experiment Name: At_Drought_P Parameter: Plant Line Value: WS
  misc_feature: MA Experiment 20000437 PARAMETER Experiment Name: At_Drought_P Parameter: Timepoint (hr) Value: 24
  misc_feature: MA Experiment 20000437 PARAMETER Experiment Name: At_Drought_P Parameter: Tissue Value: Whole Plant
  misc_feature: MA Experiment 20000437 PARAMETER Experiment Name: At_Drought_P Parameter: Treatment Value: Drought vs. No Drought
  misc_feature: MA Experiment ID: 20000439 Result: Up-regulated in Transcription
  misc_feature: MA Experiment 20000439 PARAMETER Experiment Name: At_Roots__P Parameter: Age (day) Value: 14 vs. 21
  misc_feature: MA Experiment 20000439 PARAMETER Experiment Name: At_Roots__P Parameter: Organism Value: A. thaliana
  misc_feature: MA Experiment 20000439 PARAMETER Experiment Name: At_Roots__P Parameter: Tissue Value: Roots vs. Whole Plant
  misc_feature: MA Experiment ID: 20000495 Result: Up-regulated in Transcription
  misc_feature: MA Experiment 20000495 PARAMETER Experiment Name: At_Guard_Cells_P Parameter: Harvest Date Value: 8/2/2002
  misc_feature: MA Experiment 20000495 PARAMETER Experiment Name: At_Guard_Cells_P Parameter: Organism Value: A. thaliana
  misc_feature: MA Experiment 20000495 PARAMETER Experiment Name: At_Guard_Cells_P Parameter: Tissue Value: Guard Cells vs. Leaves
  misc_feature: MA Experiment ID: 20000527 Result: Down-regulated in Transcription
  misc_feature: MA Experiment 20000527 PARAMETER Experiment Name: At_10percent_PEG_P Parameter: Age (day) Value: 20
  misc_feature: MA Experiment 20000527 PARAMETER Experiment Name: At_10percent_PEG_P Parameter: Organism Value: A. thaliana
  misc_feature: MA Experiment 20000527 PARAMETER Experiment Name: At_10percent_PEG_P Parameter: Plant Line Value: WS
  misc_feature: MA Experiment 20000527 PARAMETER Experiment Name: At_10percent_PEG_P Parameter: Timepoint (day) Value: 20
  misc_feature: MA Experiment 20000527 PARAMETER Experiment Name: At_10percent_PEG_P Parameter: Tissue Value: Whole Plant
  misc_feature: MA Experiment 20000527 PARAMETER Experiment Name: At_10percent_PEG_P Parameter: Treatment Value: 10percent PEG vs. No Treatment
  misc_feature: MA Experiment ID: 20000709 Result: Up-regulated in Transcription
  misc_feature: MA Experiment 20000709 PARAMETER Experiment Name: At_15mM_NH4NO3_L-to-H_P Parameter: Age (hr) Value: 14
  misc_feature: MA Experiment 20000709 PARAMETER Experiment Name: At_15mM_NH4NO3_L-to-H_P Parameter: Organism Value: A. thaliana
  misc_feature: MA Experiment 20000709 PARAMETER Experiment Name: At_15mM_NH4NO3_L-to-H_P Parameter: Plant Line Value: WS
  misc_feature: MA Experiment 20000709 PARAMETER Experiment Name: At_15mM_NH4NO3_L-to-H_P Parameter: Timepoint (hr) Value: 4
  misc_feature: MA Experiment 20000709 PARAMETER Experiment Name: At_15mM_NH4NO3_L-to-H_P Parameter: Tissue Value: Aerial
  misc_feature: MA Experiment 20000709 PARAMETER Experiment Name: At_15mM_NH4NO3_L-to-H_P Parameter: Treatment Value: 15mM NH4NO3 vs. 30mM Mannitol
  misc_feature: MA Experiment ID: 20000794 Result: Up-regulated in Transcription
  misc_feature: MA Experiment 20000794 PARAMETER Experiment Name: At_Petals_P Parameter: Age (day) Value: 23-25 days
  misc_feature: MA Experiment 20000794 PARAMETER Experiment Name: At_Petals_P Parameter: Plant Line Value: WS
  misc_feature: MA Experiment 20000794 PARAMETER Experiment Name: At_Petals_P Parameter: Tissue Value: Petals vs. Whole plant
  misc_feature: MA Experiment ID: 20001557 Result: Up-regulated in Transcription
  misc_feature: MA Experiment 20001557 PARAMETER Experiment Name: At_Drought_Soil_Dry_P Parameter: Age (day) Value: 27
  misc_feature: MA Experiment 20001557 PARAMETER Experiment Name: At_Drought_Soil_Dry_P Parameter: Organism Value: A. thaliana
  misc_feature: MA Experiment 20001557 PARAMETER Experiment Name: At_Drought_Soil_Dry_P Parameter: Plant Line Value: WS
  misc_feature: MA Experiment 20001557 PARAMETER Experiment Name: At_Drought_Soil_Dry_P Parameter: Post Timepoint (hr) Value: 3
  misc_feature: MA Experiment 20001557 PARAMETER Experiment Name: At_Drought_Soil_Dry_P Parameter: Post-Treatment Value: Re-Water vs. No Drought
  misc_feature: MA Experiment 20001557 PARAMETER Experiment Name: At_Drought_Soil_Dry_P Parameter: Timepoint (day) Value: 13
  misc_feature: MA Experiment 20001557 PARAMETER Experiment Name: At_Drought_Soil_Dry_P Parameter: Treatment Value: Drought vs. No Drought
  misc_feature: MA Experiment ID: 20001560 Result: Up-regulated in Transcription
  misc_feature: MA Experiment 20001560 PARAMETER Experiment Name: At_Drought_Soil_Dry_P Parameter: Age (day) Value: 28
  misc_feature: MA Experiment 20001560 PARAMETER Experiment Name: At_Drought_Soil_Dry_P Parameter: Organism Value: A. thaliana
  misc_feature: MA Experiment 20001560 PARAMETER Experiment Name: At_Drought_Soil_Dry_P Parameter: Plant Line Value: WS
  misc_feature: MA Experiment 20001560 PARAMETER Experiment Name: At_Drought_Soil_Dry_P Parameter: Post Timepoint (hr) Value: None
  misc_feature: MA Experiment 20001560 PARAMETER Experiment Name: At_Drought_Soil_Dry_P Parameter: Post-Treatment Value: None
  misc_feature: MA Experiment 20001560 PARAMETER Experiment Name: At_Drought_Soil_Dry_P Parameter: Timepoint (day) Value: 14
  misc_feature: MA Experiment 20001560 PARAMETER Experiment Name: At_Drought_Soil_Dry_P Parameter: Treatment Value: Drought vs. No Drought
  misc_feature: MA Experiment ID: 20001757 Result: Down-regulated in Transcription
  misc_feature: MA Experiment 20001757 PARAMETER Experiment Name: At_50mM_NH4NO3_L-to-H_P Parameter: Timepoint (hr) Value: 6
  misc_feature: MA Experiment 20001757 PARAMETER Experiment Name: At_50mM_NH4NO3_L-to-H_P Parameter: Tissue Value: Leaf
  misc_feature: MA Experiment 20001757 PARAMETER Experiment Name: At_50mM_NH4NO3_L-to-H_P Parameter: Treatment Value: 50mM NH4NO3 vs 100mM Mannitol
aatcagaaaaaagagagaaagaaaagaagaagcaaaacagagagaaaatggcaggattgtttgataaacaagccgatctataccttgacgccagacctaattacccctctgagtggttctcgaagctcgctgatctcaccgatcaccacggtttagcctgggatgctgccaccggaaatggccaagcagctctcgccgttgcagagcattacgagagtgtcgtagcaacggacgtgagtgaatcgcagctgaagctagcaacgccacatccgaaaatcaattatcgccatacgccgacgtcaatgaccgacgacgagctagtggaattaatcggaggagaaaactcagtggatctaatcacggtcgcccaaggcgtacactggttcgatctccctaggttctactcagtggccacacgactcctccgtaaaccaggcggaatcatcgctgtctggggatacaacgacgtcatagtgagtccagagttcgacgccgtccagtatcggctccacgccacaacgctgccgttttggaagtatccgtacattcagcacatcttcgattcgtacgaagcattgccgtttcctttcgaaaatgttgggatgggatcagaaggggagccattaaagctggagatgcctaaaacgacgtcgtttgaagggatcataaggatgtttaaatcatggtcggccatcgtcacggcgagagagaaaggcgtcgagttgttaccggagagtttggtgagagagcttgaaaccgcttggggaggttctgatctggttcgttccgtcgtttacaaagcttttatgattgcaggaaaagttagagtttgatatcaccaaaccatgattgattgttgttctcatttgagtttatttataaaaattggttatattgcaaaaattc

SEQ ID NO: 104946 - protein, 276 aa, Arabidopsis thaliana
  peptide (1)..(276): Ceres Seq. ID no. 13616133
  misc_feature (10)..(150): Pfam Name: ubiE/COQ5 methyltransferase family Pfam Description: ubiE/COQ5 methyltransferase family
  misc_feature (16)..(276): Homolog of NCBI NO: 15238280 NR Description: embryonic abundant protein -related [Arabidopsis
  misc_feature (16)..(274): Homolog of NCBI NO: 15235684 NR Description: expressed protein [Arabidopsis thaliana]
  misc_feature (40)..(274): Homolog of NCBI NO: 20258825 NR Description: unknown protein [Arabidopsis thaliana]
  misc_feature (16)..(274): Homolog of NCBI NO: 21594033 NR Description: embryonic abundant protein-like [Arabidopsis
  misc_feature (16)..(274): Homolog of NCBI NO: 15232436 NR Description: embryonic abundant protein -related [Arabidopsis
  misc_feature (16)..(274): Homolog of NCBI NO: 18405387 NR Description: expressed protein [Arabidopsis thaliana]
  misc_feature (15)..(274): Homolog of NCBI NO: 15233061 NR Description: expressed protein [Arabidopsis thaliana]
  misc_feature (16)..(276): Homolog of NCBI NO: 34910604 NR Description: putative embryonic abundant protein-like [Oryza
  misc_feature (16)..(261): Homolog of NCBI NO: 34912212 NR Description: P0415C01.8 [Oryza sativa (japonica
  misc_feature (16)..(274): Homolog of NCBI NO: 15227331 NR Description: embryo-abundant protein -related [Arabidopsis
SEKREKEKKKQNREKMAGLFDKQADLYLDARPNYPSEWFSKLADLTDHHGLAWDAATGNGQAALAVAEHYESVVATDVSESQLKLATPHPKINYRHTPTSMTDDELVELIGGENSVDLITVAQGVHWFDLPRFYSVATRLLRKPGGIIAVWGYNDVIVSPEFDAVQYRLHATTLPFWKYPYIQHIFDSYEALPFPFENVGMGSEGEPLKLEMPKTTSFEGIIRMFKSWSAIVTAREKGVELLPESLVRELETAWGGSDLVRSVVYKAFMIAGKVRV

SEQ ID NO: 104947 - protein, 261 aa, Arabidopsis thaliana
  peptide (1)..(261): Ceres Seq. ID no. 13616134
  misc_feature (1)..(135): Pfam Name: ubiE/COQ5 methyltransferase family Pfam Description: ubiE/COQ5 methyltransferase family
  misc_feature (1)..(261): Homolog of NCBI NO: 15238280 NR Description: embryonic abundant protein -related [Arabidopsis
  misc_feature (1)..(259): Homolog of NCBI NO: 15235684 NR Description: expressed protein [Arabidopsis thaliana]
  misc_feature (25)..(259): Homolog of NCBI NO: 20258825 NR Description: unknown protein [Arabidopsis thaliana]
  misc_feature (1)..(259): Homolog of NCBI NO: 21594033 NR Description: embryonic abundant protein-like [Arabidopsis
  misc_feature (1)..(259): Homolog of NCBI NO: 15232436 NR Description: embryonic abundant protein -related [Arabidopsis
  misc_feature (1)..(259): Homolog of NCBI NO: 18405387 NR Description: expressed protein [Arabidopsis thaliana]
  misc_feature (1)..(259): Homolog of NCBI NO: 15233061 NR Description: expressed protein [Arabidopsis thaliana]
  misc_feature (1)..(261): Homolog of NCBI NO: 34910604 NR Description: putative embryonic abundant protein-like [Oryza
  misc_feature (1)..(246): Homolog of NCBI NO: 34912212 NR Description: P0415C01.8 [Oryza sativa (japonica
  misc_feature (1)..(259): Homolog of NCBI NO: 15227331 NR Description: embryo-abundant protein -related [Arabidopsis
MAGLFDKQADLYLDARPNYPSEWFSKLADLTDHHGLAWDAATGNGQAALAVAEHYESVVATDVSESQLKLATPHPKINYRHTPTSMTDDELVELIGGENSVDLITVAQGVHWFDLPRFYSVATRLLRKPGGIIAVWGYNDVIVSPEFDAVQYRLHATTLPFWKYPYIQHIFDSYEALPFPFENVGMGSEGEPLKLEMPKTTSFEGIIRMFKSWSAIVTAREKGVELLPESLVRELETAWGGSDLVRSVVYKAFMIAGKVRV

SEQ ID NO: 104948 - protein, 176 aa, Arabidopsis thaliana; identical to SEQ ID NO: 30953
  peptide (1)..(176): Ceres Seq. ID no. 13616135
  misc_feature (1)..(176): Homolog of NCBI NO: 15238280 NR Description: embryonic abundant protein -related [Arabidopsis
  misc_feature (1)..(174): Homolog of NCBI NO: 15235684 NR Description: expressed protein [Arabidopsis thaliana]
  misc_feature (1)..(174): Homolog of NCBI NO: 20258825 NR Description: unknown protein [Arabidopsis thaliana]
  misc_feature (1)..(174): Homolog of NCBI NO: 21594033 NR Description: embryonic abundant protein-like [Arabidopsis
  misc_feature (1)..(174): Homolog of NCBI NO: 15232436 NR Description: embryonic abundant protein -related [Arabidopsis
  misc_feature (1)..(174): Homolog of NCBI NO: 18405387 NR Description: expressed protein [Arabidopsis thaliana]
  misc_feature (1)..(174): Homolog of NCBI NO: 15233061 NR Description: expressed protein [Arabidopsis thaliana]
  misc_feature (1)..(176): Homolog of NCBI NO: 34910604 NR Description: putative embryonic abundant protein-like [Oryza
  misc_feature (1)..(161): Homolog of NCBI NO: 34912212 NR Description: P0415C01.8 [Oryza sativa (japonica
  misc_feature (1)..(174): Homolog of NCBI NO: 15227331 NR Description: embryo-abundant protein -related [Arabidopsis

SEQ ID NO: 104949 - DNA, 1039 bp, Arabidopsis thaliana
  misc_feature (1)..(1039): Ceres Seq. ID no. 13616140
  misc_feature: MA Experiment ID: 20000234 Result: Down-regulated in Transcription
  misc_feature: MA Experiment 20000234 PARAMETER Experiment Name: At_Siliques_P Parameter: Age (day) Value: 21
  misc_feature: MA Experiment 20000234 PARAMETER Experiment Name: At_Siliques_P Parameter: Organism Value: A. thaliana
  misc_feature: MA Experiment 20000234 PARAMETER Experiment Name: At_Siliques_P Parameter: Plant Line Value: WS
  misc_feature: MA Experiment 20000234 PARAMETER Experiment Name: At_Siliques_P Parameter: Tissue Value: Less Than 5mm Siliques vs. Whole Plant
  misc_feature: MA Experiment ID: 20000235 Result: Down-regulated in Transcription
  misc_feature: MA Experiment 20000235 PARAMETER Experiment Name: At_Siliques_P Parameter: Age (day) Value: 21
  misc_feature: MA Experiment 20000235 PARAMETER Experiment Name: At_Siliques_P Parameter: Organism Value: A. thaliana
  misc_feature: MA Experiment 20000235 PARAMETER Experiment Name: At_Siliques_P Parameter: Plant Line Value: WS
  misc_feature: MA Experiment 20000235 PARAMETER Experiment Name: At_Siliques_P Parameter: Tissue Value: 5-10mm Siliques vs. Whole Plant
  misc_feature: MA Experiment ID: 20000264 Result: Down-regulated in Transcription
  misc_feature: MA Experiment 20000264 PARAMETER Experiment Name: At_Open_Flower_P Parameter: Age (day) Value: 21
  misc_feature: MA Experiment 20000264 PARAMETER Experiment Name: At_Open_Flower_P Parameter: Plant Line Value: WS
  misc_feature: MA Experiment 20000264 PARAMETER Experiment Name: At_Open_Flower_P Parameter: Tissue Value: Open Flower vs. Whole Plant
  misc_feature: MA Experiment ID: 20000265 Result: Down-regulated in Transcription
  misc_feature: MA Experiment 20000265 PARAMETER Experiment Name: At_Open_Flower_P Parameter: Age (day) Value: 21
  misc_feature: MA Experiment 20000265 PARAMETER Experiment Name: At_Open_Flower_P Parameter: Plant Line Value: WS
  misc_feature: MA Experiment 20000265 PARAMETER Experiment Name: At_Open_Flower_P Parameter: Tissue Value: Closed Flower vs. Whole Plant
  misc_feature: MA Experiment ID: 20000286 Result: Down-regulated in Transcription
  misc_feature: MA Experiment 20000286 PARAMETER Experiment Name: At_Open_Flower_P Parameter: Age (day) Value: 21
  misc_feature: MA Experiment 20000286 PARAMETER Experiment Name: At_Open_Flower_P Parameter: Plant Line Value: WS
  misc_feature: MA Experiment 20000286 PARAMETER Experiment Name: At_Open_Flower_P Parameter: Tissue Value: Half Open vs. Whole Plant
  misc_feature: MA Experiment ID: 20000438 Result: Down-regulated in Transcription
  misc_feature: MA Experiment 20000438 PARAMETER Experiment Name: At_Shoots__P Parameter: Age (day) Value: 14
  misc_feature: MA Experiment 20000438 PARAMETER Experiment Name: At_Shoots__P Parameter: Tissue Value: Shoots vs. Whole Plant
  misc_feature: MA Experiment ID: 20001248 Result: Up-regulated in Transcription
  misc_feature: MA Experiment 20001248 PARAMETER Experiment Name: At_Far-red-induction_P Parameter: Age (day) Value: 7
  misc_feature: MA Experiment 20001248 PARAMETER Experiment Name: At_Far-red-induction_P Parameter: Light Value: Far-red vs. White
  misc_feature: MA Experiment 20001248 PARAMETER Experiment Name: At_Far-red-induction_P Parameter: Organism Value: A. thaliana
  misc_feature: MA Experiment 20001248 PARAMETER Experiment Name: At_Far-red-induction_P Parameter: Plant Line Value: Columbia
  misc_feature: MA Experiment 20001248 PARAMETER Experiment Name: At_Far-red-induction_P Parameter: Timepoint (hr) Value: 4
  misc_feature: MA Experiment 20001248 PARAMETER Experiment Name: At_Far-red-induction_P Parameter: Tissue Value: Whole Plant
  misc_feature: MA Experiment ID: 20001450 Result: Up-regulated in Transcription
  misc_feature: MA Experiment 20001450 PARAMETER Experiment Name: At_Far-red-induction_P Parameter: Age (day) Value: 7
  misc_feature: MA Experiment 20001450 PARAMETER Experiment Name: At_Far-red-induction_P Parameter: Light Value: Far-red vs. White
  misc_feature: MA Experiment 20001450 PARAMETER Experiment Name: At_Far-red-induction_P Parameter: Organism Value: A. thaliana
  misc_feature: MA Experiment 20001450 PARAMETER Experiment Name: At_Far-red-induction_P Parameter: Plant Line Value: Columbia
  misc_feature: MA Experiment 20001450 PARAMETER Experiment Name: At_Far-red-induction_P Parameter: Timepoint (hr) Value: 8
  misc_feature: MA Experiment 20001450 PARAMETER Experiment Name: At_Far-red-induction_P Parameter: Tissue Value: Whole Plant
  misc_feature: MA Experiment ID: 20001451 Result: Up-regulated in Transcription
  misc_feature: MA Experiment 20001451 PARAMETER Experiment Name: At_Far-red-induction_P Parameter: Age (day) Value: 7
  misc_feature: MA Experiment 20001451 PARAMETER Experiment Name: At_Far-red-induction_P Parameter: Light Value: Far-red vs. White
  misc_feature: MA Experiment 20001451 PARAMETER Experiment Name: At_Far-red-induction_P Parameter: Organism Value: A. thaliana
  misc_feature: MA Experiment 20001451 PARAMETER Experiment Name: At_Far-red-induction_P Parameter: Plant Line Value: Columbia
  misc_feature: MA Experiment 20001451 PARAMETER Experiment Name: At_Far-red-induction_P Parameter: Timepoint (hr) Value: 24
  misc_feature: MA Experiment 20001451 PARAMETER Experiment Name: At_Far-red-induction_P Parameter: Tissue Value: Whole Plant
  misc_feature: MA Experiment ID: 20001905 Result: Down-regulated in Transcription
  misc_feature: MA Experiment 20001905 PARAMETER Experiment Name: At_Drought_Reproduction_P Parameter: Age (day) Value: 40
  misc_feature: MA Experiment 20001905 PARAMETER Experiment Name: At_Drought_Reproduction_P Parameter: Organism Value: A. thaliana
  misc_feature: MA Experiment 20001905 PARAMETER Experiment Name: At_Drought_Reproduction_P Parameter: Plant Line Value: WS
  misc_feature: MA Experiment 20001905 PARAMETER Experiment Name: At_Drought_Reproduction_P Parameter: Timepoint (day) Value: 10
  misc_feature: MA Experiment 20001905 PARAMETER Experiment Name: At_Drought_Reproduction_P Parameter: Tissue Value: Rosettes
  misc_feature: MA Experiment 20001905 PARAMETER Experiment Name: At_Drought_Reproduction_P Parameter: Treatment Value: Drought vs. No Drought
aaaaaactctccactcaactctctctggtcagctgtctcttccccattctctagggttttcaagctcaacctcaagctccactacgatctcttcttcttctctaatctcagttgacagttgaaagatgcaaggtgtgattcgatccttcgtctccggtggaaatgttgtgaaaggctctgtgctgcaacatctccgtgtgattaacccggcgattcagccttctgtgttttgttcacgctctgaatcaactcaacctgcacgtatggaggaatctggattcgagagcacaactatttccgatgtcatgaaatccaaaggcaaaagtgctgatggatcttggctttggtgtactactgatgacactgtttatgatgctgttaaatccatgacacaacacaatgttggtgccttggtggttgtgaaacctggtgagcaacaagctcttgctggtatcattacagagagagattatctacggaagatcattgtgcaagggagatcatccaaatcaacaaaagttggagacattatgactgaagagaataagcttatcactgtgacaccggagaccaaggtcttgcgtgctatgcaactgatgacagataaccgaatcaggcatattccggtaatcaaagacaagggcatgattggaatggtgtccataggagatgttgtccgtgcagtggttcatgagcatagagaggagcttcaacgcctaaatgcgtatattcagggaggttactagatcttgaataatggaaagaaaagagttccctgttgtgtcgtctggtcttgtgctgctgaatctgaaaagcttccagatcagtgtaaatatgcagtcctcgttgttattgttgttgttgttgtgtttgatgttttgtgttgtttcgttgtttaacttgtcaaaactaaggccttgtgctgcttctcttcttgcgcttacttagcaagagaataaaaccaaaaatatgatgtttgtttttgttatcaaatcttgcgtcaagtatccatgtgtgttatgaaataatagaattactt

SEQ ID NO: 104950 - protein, 206 aa, Arabidopsis thaliana; identical to SEQ ID NO: 25658
  peptide (1)..(206): Ceres Seq. ID no. 13616141
  misc_feature (66)..(121): Pfam Name: CBS domain Pfam Description: CBS domain
  misc_feature (1)..(206): Homolog of NCBI NO: 15238284 NR Description: CBS domain containing protein [Arabidopsis >gi|20455364|sp|Q9LEV3|UMP3_ARATH Protein At5g10860, precursor >gi|11358290|pir||T50795 hypothetical protein
  misc_feature (1)..(206): Homolog of NCBI NO: 29788876 NR Description: unknown protein [Oryza sativa (japonica
  misc_feature (1)..(206): Homolog of NCBI NO: 34913008 NR Description: P0663E10.18 [Oryza sativa (japonica
  misc_feature (1)..(110): Homolog of NCBI NO: 18266206 NR Description: senescence-associated putative protein [Narcissus
  misc_feature (56)..(203): Homolog of NCBI NO: 34499375 NR Description: conserved hypothetical protein [Chromobacterium ATCC 12472] >gi|34105225|gb|AAQ61581.1| conserved hypothetical
  misc_feature (36)..(204): Homolog of NCBI NO: 22984734 NR Description: hypothetical protein [Burkholderia fungorum]
  misc_feature (48)..(202): Homolog of NCBI NO: 28850322 NR Description: similar to putative protein; protein id: supported by cDNA: gi_13605727, supported by cDNA: gi_17978886
  misc_feature (66)..(206): Homolog of NCBI NO: 22988916 NR Description: hypothetical protein [Burkholderia fungorum]
  misc_feature (56)..(204): Homolog of NCBI NO: 26986946 NR Description: CBS domain protein [Pseudomonas putida KT2440]
  misc_feature (78)..(204): Homolog of NCBI NO: 15595447 NR Description: conserved hypothetical protein [Pseudomonas

SEQ ID NO: 104951 - protein, 160 aa, Arabidopsis thaliana; identical to SEQ ID NO: 25659
  peptide (1)..(160): Ceres Seq. ID no. 13616142
  misc_feature (20)..(75): Pfam Name: CBS domain Pfam Description: CBS domain
  misc_feature (1)..(160): Homolog of NCBI NO: 15238284 NR Description: CBS domain containing protein [Arabidopsis >gi|20455364|sp|Q9LEV3|UMP3_ARATH Protein At5g10860, precursor >gi|11358290|pir||T50795 hypothetical protein
  misc_feature (1)..(160): Homolog of NCBI NO: 29788876 NR Description: unknown protein [Oryza sativa (japonica
  misc_feature (1)..(160): Homolog of NCBI NO: 34913008 NR Description: P0663E10.18 [Oryza sativa (japonica
  misc_feature (1)..(64): Homolog of NCBI NO: 18266206 NR Description: senescence-associated putative protein [Narcissus
  misc_feature (10)..(157): Homolog of NCBI NO: 34499375 NR Description: conserved hypothetical protein [Chromobacterium ATCC 12472] >gi|34105225|gb|AAQ61581.1| conserved hypothetical
  misc_feature (1)..(158): Homolog of NCBI NO: 22984734 NR Description: hypothetical protein [Burkholderia fungorum]
  misc_feature (2)..(156): Homolog of NCBI NO: 28850322 NR Description: similar to putative protein; protein id: supported by cDNA: gi_13605727, supported by cDNA: gi_17978886
  misc_feature (20)..(160): Homolog of NCBI NO: 22988916 NR Description: hypothetical protein [Burkholderia fungorum]
  misc_feature (10)..(158): Homolog of NCBI NO: 26986946 NR Description: CBS domain protein [Pseudomonas putida KT2440]
  misc_feature (32)..(158): Homolog of NCBI NO: 15595447 NR Description: conserved hypothetical protein [Pseudomonas

SEQ ID NO: 104952 - protein, 146 aa, Arabidopsis thaliana; identical to SEQ ID NO: 25660
  peptide (1)..(146): Ceres Seq. ID no. 13616143
  misc_feature (6)..(61): Pfam Name: CBS domain Pfam Description: CBS domain
  misc_feature (1)..(146): Homolog of NCBI NO: 15238284 NR Description: CBS domain containing protein [Arabidopsis >gi|20455364|sp|Q9LEV3|UMP3_ARATH Protein At5g10860, precursor >gi|11358290|pir||T50795 hypothetical protein
  misc_feature (1)..(146): Homolog of NCBI NO: 29788876 NR Description: unknown protein [Oryza sativa (japonica
  misc_feature (1)..(146): Homolog of NCBI NO: 34913008 NR Description: P0663E10.18 [Oryza sativa (japonica
  misc_feature (1)..(50): Homolog of NCBI NO: 18266206 NR Description: senescence-associated putative protein [Narcissus
  misc_feature (1)..(143): Homolog of NCBI NO: 34499375 NR Description: conserved hypothetical protein [Chromobacterium ATCC 12472] >gi|34105225|gb|AAQ61581.1| conserved hypothetical
  misc_feature (1)..(144): Homolog of NCBI NO: 22984734 NR Description: hypothetical protein [Burkholderia fungorum]
  misc_feature (1)..(142): Homolog of NCBI NO: 28850322 NR Description: similar to putative protein; protein id: supported by cDNA: gi_13605727, supported by cDNA: gi_17978886
  misc_feature (6)..(146): Homolog of NCBI NO: 22988916 NR Description: hypothetical protein [Burkholderia fungorum]
  misc_feature (1)..(144): Homolog of NCBI NO: 26986946 NR Description: CBS domain protein [Pseudomonas putida KT2440]
  misc_feature (18)..(144): Homolog of NCBI NO: 15595447 NR Description: conserved hypothetical protein [Pseudomonas

SEQ ID NO: 104953 - DNA, 1433 bp, Arabidopsis thaliana
  misc_feature (1)..(1433): Ceres Seq. ID no. 13616147
  misc_feature: MA Experiment ID: 108434 Result: Up-regulated in Transcription
  misc_feature: MA Experiment 108434 PARAMETER Experiment Name: At_Root_Tips_cDNA_P Parameter: Tissue Value: Root Tips
  misc_feature: MA Experiment ID: 108464 Result: Down-regulated in Transcription
  misc_feature: MA Experiment 108464 PARAMETER Experiment Name: At_Germinating_Seeds_cDNA_P Parameter: Age (day) Value: 4 vs. 0
  misc_feature: MA Experiment 108464 PARAMETER Experiment Name: At_Germinating_Seeds_cDNA_P Parameter: Tissue Value: Germinating Seeds
  misc_feature: MA Experiment ID: 108576 Result: Up-regulated in Transcription
  misc_feature: MA Experiment 108576 PARAMETER Experiment Name: At_42deg_Heat_cDNA_P Parameter: Temperature (deg C) Value: 42 vs. 22
  misc_feature: MA Experiment 108576 PARAMETER Experiment Name: At_42deg_Heat_cDNA_P Parameter: Timepoint (hr) Value: 1
  misc_feature: MA Experiment 108576 PARAMETER Experiment Name: At_42deg_Heat_cDNA_P Parameter: Tissue Value: Aerial
  misc_feature: MA Experiment ID: 108577 Result: Up-regulated in Transcription
  misc_feature: MA Experiment 108577 PARAMETER Experiment Name: At_42deg_Heat_cDNA_P Parameter: Temperature (deg C) Value: 42 vs. 22
  misc_feature: MA Experiment 108577 PARAMETER Experiment Name: At_42deg_Heat_cDNA_P Parameter: Timepoint (hr) Value: 6
  misc_feature: MA Experiment 108577 PARAMETER Experiment Name: At_42deg_Heat_cDNA_P Parameter: Tissue Value: Aerial
  misc_feature: MA Experiment ID: 20000093 Result: Up-regulated in Transcription
  misc_feature: MA Experiment 20000093 PARAMETER Experiment Name: At_42deg_Heat_cDNA_P Parameter: Temperature (deg C) Value: 42 vs. 22
  misc_feature: MA Experiment 20000093 PARAMETER Experiment Name: At_42deg_Heat_cDNA_P Parameter: Timepoint (hr) Value: 0.5
  misc_feature: MA Experiment 20000093 PARAMETER Experiment Name: At_42deg_Heat_cDNA_P Parameter: Tissue Value: Aerial
  misc_feature: MA Experiment ID: 20000111 Result: Up-regulated in Transcription
  misc_feature: MA Experiment 20000111 PARAMETER Experiment Name: At_42deg_Heat_cDNA_P Parameter: Temperature (deg C) Value: 42 vs. 22
  misc_feature: MA Experiment 20000111 PARAMETER Experiment Name: At_42deg_Heat_cDNA_P Parameter: Timepoint (hr) Value: 6
  misc_feature: MA Experiment 20000111 PARAMETER Experiment Name: At_42deg_Heat_cDNA_P Parameter: Tissue Value: Aerial
  misc_feature: MA Experiment ID: 20000112 Result: Up-regulated in Transcription
  misc_feature: MA Experiment 20000112 PARAMETER Experiment Name: At_42deg_Heat_cDNA_P Parameter: Temperature (deg C) Value: 42 vs. 22
  misc_feature: MA Experiment 20000112 PARAMETER Experiment Name: At_42deg_Heat_cDNA_P Parameter: Timepoint (hr) Value: 2
  misc_feature: MA Experiment 20000112 PARAMETER Experiment Name: At_42deg_Heat_cDNA_P Parameter: Tissue Value: Aerial
  misc_feature: MA Experiment ID: 20000144 Result: Up-regulated in Transcription
  misc_feature: MA Experiment 20000144 PARAMETER Experiment Name: At_42deg_Heat_cDNA_P Parameter: Temperature (deg C) Value: 42 vs. 22
  misc_feature: MA Experiment 20000144 PARAMETER Experiment Name: At_42deg_Heat_cDNA_P Parameter: Timepoint (hr) Value: 1
  misc_feature: MA Experiment 20000144 PARAMETER Experiment Name: At_42deg_Heat_cDNA_P Parameter: Tissue Value: Aerial
  misc_feature: MA Experiment ID: 20000171 Result: Up-regulated in Transcription
  misc_feature: MA Experiment 20000171 PARAMETER Experiment Name: At_42deg_Heat_P Parameter: Age (day) Value: 14
  misc_feature: MA Experiment 20000171 PARAMETER Experiment Name: At_42deg_Heat_P Parameter: Organism Value: A. thaliana
  misc_feature: MA Experiment 20000171 PARAMETER Experiment Name: At_42deg_Heat_P Parameter: Plant Line Value: WS
  misc_feature: MA Experiment 20000171 PARAMETER Experiment Name: At_42deg_Heat_P Parameter: Temperature (deg C) Value: 42 vs. 22
  misc_feature: MA Experiment 20000171 PARAMETER Experiment Name: At_42deg_Heat_P Parameter: Timepoint (hr) Value: 1
  misc_feature: MA Experiment 20000171 PARAMETER Experiment Name: At_42deg_Heat_P Parameter: Tissue Value: Aerial
  misc_feature: MA Experiment ID: 20000173 Result: Up-regulated in Transcription
  misc_feature: MA Experiment 20000173 PARAMETER Experiment Name: At_42deg_Heat_P Parameter: Age (day) Value: 14
  misc_feature: MA Experiment 20000173 PARAMETER Experiment Name: At_42deg_Heat_P Parameter: Organism Value: A. thaliana
  misc_feature: MA Experiment 20000173 PARAMETER Experiment Name: At_42deg_Heat_P Parameter: Plant Line Value: WS
  misc_feature: MA Experiment 20000173 PARAMETER Experiment Name: At_42deg_Heat_P Parameter: Temperature (deg C) Value: 42 vs. 22
  misc_feature: MA Experiment 20000173 PARAMETER Experiment Name: At_42deg_Heat_P Parameter: Timepoint (hr) Value: 6
  misc_feature: MA Experiment 20000173 PARAMETER Experiment Name: At_42deg_Heat_P Parameter: Tissue Value: Aerial
  misc_feature: MA Experiment ID: 20000185 Result: Up-regulated in Transcription
  misc_feature: MA Experiment 20000185 PARAMETER Experiment Name: At_Roots__P Parameter: Age (day) Value: 7 vs. 21
  misc_feature: MA Experiment 20000185 PARAMETER Experiment Name: At_Roots__P Parameter: Organism Value: A. thaliana
  misc_feature: MA Experiment 20000185 PARAMETER Experiment Name: At_Roots__P Parameter: Tissue Value: Roots vs. Whole Plant
  misc_feature: MA Experiment ID: 20000234 Result: Up-regulated in Transcription
  misc_feature: MA Experiment 20000234 PARAMETER Experiment Name: At_Siliques_P Parameter: Age (day) Value: 21
  misc_feature: MA Experiment 20000234 PARAMETER Experiment Name: At_Siliques_P Parameter: Organism Value: A. thaliana
  misc_feature: MA Experiment 20000234 PARAMETER Experiment Name: At_Siliques_P Parameter: Plant Line Value: WS
  misc_feature: MA Experiment 20000234 PARAMETER Experiment Name: At_Siliques_P Parameter: Tissue Value: Less Than 5mm Siliques vs. Whole Plant
  misc_feature: MA Experiment ID: 20000438 Result: Up-regulated in Transcription
  misc_feature: MA Experiment 20000438 PARAMETER Experiment Name: At_Shoots__P Parameter: Age (day) Value: 14
  misc_feature: MA Experiment 20000438 PARAMETER Experiment Name: At_Shoots__P Parameter: Tissue Value: Shoots vs. Whole Plant
  misc_feature: MA Experiment ID: 20000439 Result: Up-regulated in Transcription
  misc_feature: MA Experiment 20000439 PARAMETER Experiment Name: At_Roots__P Parameter: Age (day) Value: 14 vs. 21
  misc_feature: MA Experiment 20000439 PARAMETER Experiment Name: At_Roots__P Parameter: Organism Value: A. thaliana
  misc_feature: MA Experiment 20000439 PARAMETER Experiment Name: At_Roots__P Parameter: Tissue Value: Roots vs. Whole Plant
atgtgttatgtcccttactacacaagaatctccttctcctcaaccttctgctttcactcccgccttatctcctgattatcaacagagagagaaggaattgcataaacaagagagtaacaacatgagactggttatttcactagcagctacattttccttagttggtataatcttactttgctctctgctttattggttttgccataggagaagaaacctcaagagctcaggttgtgggtgtagtggaatcacattcttgaatcggtttagtcgctcaaaaacattagacaagagaactacaaagcagggaacagtgtcattgatcgattacaatatactagaagaaggaactagtggtttcaaggagagtaacattttgggtcaaggtggatttggatgtgtatattctgccacattagagaacaacatttcagctgcggttaagaagctagactgtgccaatgaagatgcagcaaaggaatttaagagtgaggttgagatattgagtaagctccagcacccgaatataatatcccttttgggttatagcacgaatgatactgcgagattcattgtctatgagctgatgccaaacgtttctctggaatctcatttacacggatcttctcagggttcggcgatcacatggcctatgaggatgaagattgctcttgatgtaacaaggggattagaatatttgcatgaacattgtcatccagcaatcattcacagggacttgaaatcatccaacatcttattagatagcaatttcaatgctaagatttcagattttggtctagctgttgttgatgggccaaagaacaagaaccataaactttccgggacagttggctacgttgcaccagagtatcttctcaacggccaattgacagaaaagagcgacgtgtatgcttttggagtagtgttattagagcttttactcgggaaaaaacctgtggagaaactagctcccggtgaatgccaatccatcatcacttgggcaatgccttatctcactgatagaaccaagttaccaagcgtcatagatcctgcgattaaagatacgatggacttgaaacacctttaccaggtagcggcagtggcgattttgtgcgtgcagccagaaccgagttatagaccgttgattacagacgtcttgcattctcttatacctttggttccaatggaacttggtggaaccttaaaaaccatcaaatgtgcttcaatggatcactgttaaacaccatagaaaaccggtgtttttttttatagaaattcggtttaatattgaccggtaggtggttttgatgtgtatattgggttagaagttgtaaccggaacattacagtatccttttgaaatgcttacttgcgcactgttgatgaactcttttctcatgtgatttctatttacgaaaacaaatgaaaattatt

SEQ ID NO: 104954 - protein, 412 aa, Arabidopsis thaliana
  peptide (1)..(412): Ceres Seq. ID no. 13616148
  misc_feature (120)..(318): Pfam Name: Protein kinase domain Pfam Description: Protein kinase domain
  misc_feature (41)..(412): Homolog of NCBI NO: 30683447 NR Description: protein kinase family [Arabidopsis thaliana]
  misc_feature (102)..(412): Homolog of NCBI NO: 11358833 NR Description: ser/thr specific protein kinase-like protein -
  misc_feature (1)..(24): Homolog of NCBI NO: 11358833 NR Description: ser/thr specific protein kinase-like protein -
  misc_feature (102)..(412): Homolog of NCBI NO: 11259774 NR Description: ser/thr specific protein kinase-like protein -
  misc_feature (3)..(404): Homolog of NCBI NO: 15220195 NR Description: protein kinase family [Arabidopsis thaliana]
  misc_feature (2)..(177): Homolog of NCBI NO: 30689231 NR Description: protein kinase family [Arabidopsis thaliana]
  misc_feature (230)..(372): Homolog of NCBI NO: 30689231 NR Description: protein kinase family [Arabidopsis thaliana]
  misc_feature (100)..(393): Homolog of NCBI NO: 11358842 NR Description: serine/threonine-specific protein kinase-like
  misc_feature (207)..(402): Homolog of NCBI NO: 29367521 NR Description: protein kinase-like protein [Oryza sativa
  misc_feature (76)..(389): Homolog of NCBI NO: 34910468 NR Description: putative protein kinase [Oryza sativa (japonica group)] >gi|13366186|dbj|BAB39409.1| putative protein kinase
CVMSLTTQESPSPQPSAFTPALSPDYQQREKELHKQESNNMRLVISLAATFSLVGIILLCSLLYWFCHRRRNLKSSGCGCSGITFLNRFSRSKTLDKRTTKQGTVSLIDYNILEEGTSGFKESNILGQGGFGCVYSATLENNISAAVKKLDCANEDAAKEFKSEVEILSKLQHPNIISLLGYSTNDTARFIVYELMPNVSLESHLHGSSQGSAITWPMRMKIALDVTRGLEYLHEHCHPAIIHRDLKSSNILLDSNFNAKISDFGLAVVDGPKNKNHKLSGTVGYVAPEYLLNGQLTEKSDVYAFGVVLLELLLGKKPVEKLAPGECQSIITWAMPYLTDRTKLPSVIDPAIKDTMDLKHLYQVAAVAILCVQPEPSYRPLITDVLHSLIPLVPMELGGTLKTIKCASMDHC

SEQ ID NO: 104955 - protein, 410 aa, Arabidopsis thaliana
  peptide (1)..(410): Ceres Seq. ID no. 13616149
  misc_feature (118)..(316): Pfam Name: Protein kinase domain Pfam Description: Protein kinase domain
  misc_feature (39)..(410): Homolog of NCBI NO: 30683447 NR Description: protein kinase family [Arabidopsis thaliana]
  misc_feature (100)..(410): Homolog of NCBI NO: 11358833 NR Description: ser/thr specific protein kinase-like protein -
  misc_feature (1)..(22): Homolog of NCBI NO: 11358833 NR Description: ser/thr specific protein kinase-like protein -
  misc_feature (100)..(410): Homolog of NCBI NO: 11259774 NR Description: ser/thr specific protein kinase-like protein -
  misc_feature (1)..(402): Homolog of NCBI NO: 15220195 NR Description: protein kinase family [Arabidopsis thaliana]
  misc_feature (1)..(175): Homolog of NCBI NO: 30689231 NR Description: protein kinase family [Arabidopsis thaliana]
  misc_feature (228)..(370): Homolog of NCBI NO: 30689231 NR Description: protein kinase family [Arabidopsis thaliana]
  misc_feature (98)..(391): Homolog of NCBI NO: 11358842 NR Description: serine/threonine-specific protein kinase-like
  misc_feature (205)..(400): Homolog of NCBI NO: 29367521 NR Description: protein kinase-like protein [Oryza sativa
  misc_feature (74)..(387): Homolog of NCBI NO: 34910468 NR Description: putative protein kinase [Oryza sativa (japonica group)] >gi|13366186|dbj|BAB39409.1| putative protein kinase
MSLTTQESPSPQPSAFTPALSPDYQQREKELHKQESNNMRLVISLAATFSLVGIILLCSLLYWFCHRRRNLKSSGCGCSGITFLNRFSRSKTLDKRTTKQGTVSLIDYNILEEGTSGFKESNILGQGGFGCVYSATLENNISAAVKKLDCANEDAAKEFKSEVEILSKLQHPNIISLLGYSTNDTARFIVYELMPNVSLESHLHGSSQGSAITWPMRMKIALDVTRGLEYLHEHCHPAIIHRDLKSSNILLDSNFNAKISDFGLAVVDGPKNKNHKLSGTVGYVAPEYLLNGQLTEKSDVYAFGVVLLELLLGKKPVEKLAPGECQSIITWAMPYLTDRTKLPSVIDPAIKDTMDLKHLYQVAAVAILCVQPEPSYRPLITDVLHSLIPLVPMELGGTLKTIKCASMDHC

SEQ ID NO: 104956 - protein, 372 aa, Arabidopsis thaliana
  peptide (1)..(372): Ceres Seq. ID no. 13616150
  misc_feature (80)..(278): Pfam Name: Protein kinase domain Pfam Description: Protein kinase domain
  misc_feature (1)..(372): Homolog of NCBI NO: 30683447 NR Description: protein kinase family [Arabidopsis thaliana]
  misc_feature (62)..(372): Homolog of NCBI NO: 11358833 NR Description: ser/thr specific protein kinase-like protein -
  misc_feature (62)..(372): Homolog of NCBI NO: 11259774 NR Description: ser/thr specific protein kinase-like protein -
  misc_feature (1)..(364): Homolog of NCBI NO: 15220195 NR Description: protein kinase family [Arabidopsis thaliana]
  misc_feature (1)..(137): Homolog of NCBI NO: 30689231 NR Description: protein kinase family [Arabidopsis thaliana]
  misc_feature (190)..(332): Homolog of NCBI NO: 30689231 NR Description: protein kinase family [Arabidopsis thaliana]
  misc_feature (60)..(353): Homolog of NCBI NO: 11358842 NR Description: serine/threonine-specific protein kinase-like
  misc_feature (167)..(362): Homolog of NCBI NO: 29367521 NR Description: protein kinase-like protein [Oryza sativa
  misc_feature (36)..(349): Homolog of NCBI NO: 34910468 NR Description: putative protein kinase [Oryza sativa (japonica group)] >gi|13366186|dbj|BAB39409.1| putative protein kinase
  misc_feature (190)..(332): Homolog of NCBI NO: 7434336 NR Description: hypothetical protein F10N7.190 - Arabidopsis >gi|3858939|emb|CAA16589.1| serine/threonine protein kinase like
MRLVISLAATFSLVGIILLCSLLYWFCHRRRNLKSSGCGCSGITFLNRFSRSKTLDKRTTKQGTVSLIDYNILEEGTSGFKESNILGQGGFGCVYSATLENNISAAVKKLDCANEDAAKEFKSEVEILSKLQHPNIISLLGYSTNDTARFIVYELMPNVSLESHLHGSSQGSAITWPMRMKIALDVTRGLEYLHEHCHPAIIHRDLKSSNILLDSNFNAKISDFGLAVVDGPKNKNHKLSGTVGYVAPEYLLNGQLTEKSDVYAFGVVLLELLLGKKPVEKLAPGECQSIITWAMPYLTDRTKLPSVIDPAIKDTMDLKHLYQVAAVAILCVQPEPSYRPLITDVLHSLIPLVPMELGGTLKTIKCASMDHC

SEQ ID NO: 104957 - DNA, 1199 bp, Arabidopsis thaliana
  misc_feature (1)..(1199): Ceres Seq. ID no. 13616161
  misc_feature: MA Experiment ID: 108434 Result: Up-regulated in Transcription
  misc_feature: MA Experiment 108434 PARAMETER Experiment Name: At_Root_Tips_cDNA_P Parameter: Tissue Value: Root Tips
  misc_feature: MA Experiment ID: 108463 Result: Down-regulated in Transcription
  misc_feature: MA Experiment 108463 PARAMETER Experiment Name: At_Germinating_Seeds_cDNA_P Parameter: Age (day) Value: 3 vs. 0
  misc_feature: MA Experiment 108463 PARAMETER Experiment Name: At_Germinating_Seeds_cDNA_P Parameter: Tissue Value: Germinating Seeds
  misc_feature: MA Experiment ID: 108488 Result: Up-regulated in Transcription
  misc_feature: MA Experiment ID: 20000071 Result: Down-regulated in Transcription
  misc_feature: MA Experiment 20000071 PARAMETER Experiment Name: At_100uM_ABA_Mutants_cDNA_P Parameter: Plant Line Value: CS8104
  misc_feature: MA Experiment 20000071 PARAMETER Experiment Name: At_100uM_ABA_Mutants_cDNA_P Parameter: Timepoint (hr) Value: 6
  misc_feature: MA Experiment 20000071 PARAMETER Experiment Name: At_100uM_ABA_Mutants_cDNA_P Parameter: Tissue Value: Aerial
  misc_feature: MA Experiment 20000071 PARAMETER Experiment Name: At_100uM_ABA_Mutants_cDNA_P Parameter: Treatment Value: 100uM ABA vs. No Treatment
  misc_feature: MA Experiment ID: 20000185 Result: Down-regulated in Transcription
  misc_feature: MA Experiment 20000185 PARAMETER Experiment Name: At_Roots__P Parameter: Age (day) Value: 7 vs. 21
  misc_feature: MA Experiment 20000185 PARAMETER Experiment Name: At_Roots__P Parameter: Organism Value: A. thaliana
  misc_feature: MA Experiment 20000185 PARAMETER Experiment Name: At_Roots__P Parameter: Tissue Value: Roots vs. Whole Plant
  misc_feature: MA Experiment ID: 20000224 Result: Up-regulated in Transcription
  misc_feature: MA Experiment ID: 20000437 Result: Down-regulated in Transcription
  misc_feature: MA Experiment 20000437 PARAMETER Experiment Name: At_Drought_P Parameter: Age (day) Value: 8
  misc_feature: MA Experiment 20000437 PARAMETER Experiment Name: At_Drought_P Parameter: Organism Value: A. thaliana
  misc_feature: MA Experiment 20000437 PARAMETER Experiment Name: At_Drought_P Parameter: Plant Line Value: WS
  misc_feature: MA Experiment 20000437 PARAMETER Experiment Name: At_Drought_P Parameter: Timepoint (hr) Value: 24
  misc_feature: MA Experiment 20000437 PARAMETER Experiment Name: At_Drought_P Parameter: Tissue Value: Whole Plant
  misc_feature: MA Experiment 20000437 PARAMETER Experiment Name: At_Drought_P Parameter: Treatment Value: Drought vs. No Drought
  misc_feature: MA Experiment ID: 20000439 Result: Down-regulated in Transcription
  misc_feature: MA Experiment 20000439 PARAMETER Experiment Name: At_Roots__P Parameter: Age (day) Value: 14 vs. 21
  misc_feature: MA Experiment 20000439 PARAMETER Experiment Name: At_Roots__P Parameter: Organism Value: A. thaliana
  misc_feature: MA Experiment 20000439 PARAMETER Experiment Name: At_Roots__P Parameter: Tissue Value: Roots vs. Whole Plant
  misc_feature: MA Experiment ID: 20001757 Result: Up-regulated in Transcription
  misc_feature: MA Experiment 20001757 PARAMETER Experiment Name: At_50mM_NH4NO3_L-to-H_P Parameter: Timepoint (hr) Value: 6
  misc_feature: MA Experiment 20001757 PARAMETER Experiment Name: At_50mM_NH4NO3_L-to-H_P Parameter: Tissue Value: Leaf
  misc_feature: MA Experiment 20001757 PARAMETER Experiment Name: At_50mM_NH4NO3_L-to-H_P Parameter: Treatment Value: 50mM NH4NO3 vs 100mM Mannitol
  misc_feature: MA Experiment ID: 20001905 Result: Down-regulated in Transcription
  misc_feature: MA Experiment 20001905 PARAMETER Experiment Name: At_Drought_Reproduction_P Parameter: Age (day) Value: 40
  misc_feature: MA Experiment 20001905 PARAMETER Experiment Name: At_Drought_Reproduction_P Parameter: Organism Value: A. thaliana
  misc_feature: MA Experiment 20001905 PARAMETER Experiment Name: At_Drought_Reproduction_P Parameter: Plant Line Value: WS
  misc_feature: MA Experiment 20001905 PARAMETER Experiment Name: At_Drought_Reproduction_P Parameter: Timepoint (day) Value: 10
  misc_feature: MA Experiment 20001905 PARAMETER Experiment Name: At_Drought_Reproduction_P Parameter: Tissue Value: Rosettes
  misc_feature: MA Experiment 20001905 PARAMETER Experiment Name: At_Drought_Reproduction_P Parameter: Treatment Value: Drought vs. No Drought
agttcagtcctacatccatggctgctcacagaatctaaagagaactaaaaagctcataagactattacttagaagagaatcgatcagatatgattttagcgcatcttccaagattccatctctcaatcctcgcgaaaccttctttctctctctcttcttcgcatttcagtttcttaaaccctaagccttcggtaacagtatctcgaacccttttctcattcgcgtctaaatcgaatctcgccactgttgaacccataccattatcggtctcagattcaaccgatttggatgatgcacctgtcgagattgcgctcgacaagctttttattccgccggagaccgatatatccggtgaagactcggcgagtttaacgacgaggatacttaagggttcgaatattgtgctgagcaagtacgcgagggacgcacaggtggttcaggctgattatgtgaagagtagtgtcaagacggaggattgtccggccgatgggttgccggagtttgcgcttgttgggagatccaatgttgggaaatcatcgcttctcaattcgttggtgaggaggaaacgccttgccttgacttctaagaaacctggaaagacgcaatgcattaatcatttccggatcaacgacaagtggtacttggtagatttgcctggttacgggtatgcatcagcaccgcatgaactcaaacaagactggaacaaattcaccaaagactattttctaaatcgatcaacattggtctcggtgtttttactagttgatgccagcattcctgtaaagccaatcgatctcgagtatgcaagctggcttggtcaaaaccaggttccaatgactttgatattcacaaaatgcgacaagagaaagaagaagaaaaatggagggaagaaaccggaggcgaacataaaggagttccaagacttgatccaagggttctttgagacaacaccgccatggattatgaccagcagtgtgacgaatcaaggtcgggacgagatattgttgcatatggctcagctaagaaactactggctcaaacactgagaaccaaaacaacacttctccatattatctttttataaggagacttatataacagttagtgtaaaacgacaaaactaacagttagtgtaccaattatttgggcactgtctttgattaatgcaacgctgagattttgtttaatgtatttgtgtt

SEQ ID NO: 104958 - protein, 318 aa, Arabidopsis thaliana; identical to SEQ ID NO: 22124
  peptide (1)..(318): Ceres Seq. ID no. 13616162
  misc_feature (1)..(318): Homolog of NCBI NO: 15239069 NR Description: GTP-binding protein -related [Arabidopsis
  misc_feature (1)..(318): Homolog of NCBI NO: 21592799 NR Description: putative GTP-binding protein [Arabidopsis
  misc_feature (1)..(318): Homolog of NCBI NO: 34910170 NR Description: putative GTP-binding protein [Oryza sativa
  misc_feature (29)..(315): Homolog of NCBI NO: 18400109 NR Description: nucleotide-binding protein -related [Arabidopsis
  misc_feature (98)..(315): Homolog of NCBI NO: 25306612 NR Description: probable nucleotide-binding protein [imported] -
  misc_feature (193)..(315): Homolog of NCBI NO: 20330773 NR Description: Putative nucleotide binding protein [Oryza sativa
  misc_feature (98)..(192): Homolog of NCBI NO: 20330773 NR Description: Putative nucleotide binding protein [Oryza sativa
  misc_feature (115)..(305): Homolog of NCBI NO: 31194343 NR Description: ENSANGP00000000181 [Anopheles gambiae]
  misc_feature (114)..(305): Homolog of NCBI NO: 29346493 NR Description: putative GTP-binding protein [Bacteroides
  misc_feature (116)..(311): Homolog of NCBI NO: 23137475 NR Description: hypothetical protein [Cytophaga hutchinsonii]

SEQ ID NO: 104959 - DNA, 1549 bp, Arabidopsis thaliana
  misc_feature (1)..(1549): Ceres Seq. ID no. 13616163
  misc_feature: MA Experiment ID: 108462 Result: Down-regulated in Transcription
  misc_feature: MA Experiment 108462 PARAMETER Experiment Name: At_Germinating_Seeds_cDNA_P Parameter: Age (day) Value: 2 vs. 0
  misc_feature: MA Experiment 108462 PARAMETER Experiment Name: At_Germinating_Seeds_cDNA_P Parameter: Tissue Value: Germinating Seeds
  misc_feature: MA Experiment ID: 108463 Result: Down-regulated in Transcription
  misc_feature: MA Experiment 108463 PARAMETER Experiment Name: At_Germinating_Seeds_cDNA_P Parameter: Age (day) Value: 3 vs. 0
  misc_feature: MA Experiment 108463 PARAMETER Experiment Name: At_Germinating_Seeds_cDNA_P Parameter: Tissue Value: Germinating Seeds
  misc_feature: MA Experiment ID: 108464 Result: Down-regulated in Transcription
  misc_feature: MA Experiment 108464 PARAMETER Experiment Name: At_Germinating_Seeds_cDNA_P Parameter: Age (day) Value: 4 vs. 0
  misc_feature: MA Experiment 108464 PARAMETER Experiment Name: At_Germinating_Seeds_cDNA_P Parameter: Tissue Value: Germinating Seeds
  misc_feature: MA Experiment ID: 108469 Result: Up-regulated in Transcription
  misc_feature: MA Experiment ID: 108488 Result: Down-regulated in Transcription
  misc_feature: MA Experiment ID: 108489 Result: Up-regulated in Transcription
  misc_feature: MA Experiment ID: 108561 Result: Up-regulated in Transcription
  misc_feature: MA Experiment 108561 PARAMETER Experiment Name: At_100uM_ABA_cDNA_P Parameter: Timepoint (hr) Value: 6
  misc_feature: MA Experiment 108561 PARAMETER Experiment Name: At_100uM_ABA_cDNA_P Parameter: Tissue Value: Aerial
  misc_feature: MA Experiment 108561 PARAMETER Experiment Name: At_100uM_ABA_cDNA_P Parameter: Treatment Value: 100uM ABA vs. No Treatment
  misc_feature: MA Experiment ID: 108573 Result: Up-regulated in Transcription
  misc_feature: MA Experiment 108573 PARAMETER Experiment Name: At_Drought_cDNA_P Parameter: Timepoint (hr) Value: 6
  misc_feature: MA Experiment 108573 PARAMETER Experiment Name: At_Drought_cDNA_P Parameter: Tissue Value: Aerial
  misc_feature: MA Experiment 108573 PARAMETER Experiment Name: At_Drought_cDNA_P Parameter: Treatment Value: Drought vs. No Drought
  misc_feature: MA Experiment ID: 108585 Result: Up-regulated in Transcription
  misc_feature: MA Experiment 108585 PARAMETER Experiment Name: At_5mM_NaNP_cDNA_P Parameter: Timepoint (hr) Value: 6
  misc_feature: MA Experiment 108585 PARAMETER Experiment Name: At_5mM_NaNP_cDNA_P Parameter: Tissue Value: Aerial
  misc_feature: MA Experiment 108585 PARAMETER Experiment Name: At_5mM_NaNP_cDNA_P Parameter: Treatment Value: null
  misc_feature: MA Experiment ID: 108595 Result: Down-regulated in Transcription
  misc_feature: MA Experiment 108595 PARAMETER Experiment Name: At_Ler-pi_Ovule_cDNA_P Parameter: Plant Line Value: null
  misc_feature: MA Experiment ID: 108605 Result: Up-regulated in Transcription
  misc_feature: MA Experiment 108605 PARAMETER Experiment Name: At_100uM_ABA_cDNA_P Parameter: Timepoint (hr) Value: 6
  misc_feature: MA Experiment 108605 PARAMETER Experiment Name: At_100uM_ABA_cDNA_P Parameter: Tissue Value: Aerial
  misc_feature: MA Experiment 108605 PARAMETER Experiment Name: At_100uM_ABA_cDNA_P Parameter: Treatment Value: 100uM ABA vs. No Treatment
  misc_feature: MA Experiment ID: 108607 Result: Up-regulated in Transcription
  misc_feature: MA Experiment 108607 PARAMETER Experiment Name: At_100uM_ABA_cDNA_P Parameter: Timepoint (hr) Value: 4
  misc_feature: MA Experiment 108607 PARAMETER Experiment Name: At_100uM_ABA_cDNA_P Parameter: Tissue Value: Aerial
  misc_feature: MA Experiment 108607 PARAMETER Experiment Name: At_100uM_ABA_cDNA_P Parameter: Treatment Value: 100uM ABA vs. No Treatment
  misc_feature: MA Experiment ID: 108609 Result: Up-regulated in Transcription
  misc_feature: MA Experiment 108609 PARAMETER Experiment Name: At_100uM_ABA_cDNA_P Parameter: Timepoint (hr) Value: 24
  misc_feature: MA Experiment 108609 PARAMETER Experiment Name: At_100uM_ABA_cDNA_P Parameter: Tissue Value: Aerial
  misc_feature: MA Experiment 108609 PARAMETER Experiment Name: At_100uM_ABA_cDNA_P Parameter: Treatment Value: 100uM ABA vs. No Treatment
  misc_feature: MA Experiment ID: 108667 Result: Up-regulated in Transcription
  misc_feature: MA Experiment 108667 PARAMETER Experiment Name: At_2mM_SA_cDNA_P Parameter: Plant Line Value: WS
  misc_feature: MA Experiment 108667 PARAMETER Experiment Name: At_2mM_SA_cDNA_P Parameter: Timepoint (hr) Value: 1
  misc_feature: MA Experiment 108667 PARAMETER Experiment Name: At_2mM_SA_cDNA_P Parameter: Treatment Value: 2mM SA vs. No Treatment
  misc_feature: MA Experiment ID: 20000069 Result: Up-regulated in Transcription
  misc_feature: MA Experiment 20000069 PARAMETER Experiment Name: At_100uM_ABA_Mutants_cDNA_P Parameter: Plant Line Value: CS23
  misc_feature: MA Experiment 20000069 PARAMETER Experiment Name: At_100uM_ABA_Mutants_cDNA_P Parameter: Timepoint (hr) Value: 6
  misc_feature: MA Experiment 20000069 PARAMETER Experiment Name: At_100uM_ABA_Mutants_cDNA_P Parameter: Tissue Value: Aerial
  misc_feature: MA Experiment 20000069 PARAMETER Experiment Name: At_100uM_ABA_Mutants_cDNA_P Parameter: Treatment Value: 100uM ABA vs. No Treatment
  misc_feature: MA Experiment ID: 20000070 Result: Up-regulated in Transcription
  misc_feature: MA Experiment 20000070 PARAMETER Experiment Name: At_100uM_ABA_Mutants_cDNA_P Parameter: Plant Line Value: CS24
  misc_feature: MA Experiment 20000070 PARAMETER Experiment Name: At_100uM_ABA_Mutants_cDNA_P Parameter: Timepoint (hr) Value: 6
  misc_feature: MA Experiment 20000070 PARAMETER Experiment Name: At_100uM_ABA_Mutants_cDNA_P Parameter: Tissue Value: Aerial
  misc_feature: MA Experiment 20000070 PARAMETER Experiment Name: At_100uM_ABA_Mutants_cDNA_P Parameter: Treatment Value: 100uM ABA vs. No Treatment
  misc_feature: MA Experiment ID: 20000071 Result: Up-regulated in Transcription
  misc_feature: MA Experiment 20000071 PARAMETER Experiment Name: At_100uM_ABA_Mutants_cDNA_P Parameter: Plant Line Value: CS8104
  misc_feature: MA Experiment 20000071 PARAMETER Experiment Name: At_100uM_ABA_Mutants_cDNA_P Parameter: Timepoint (hr) Value: 6
  misc_feature: MA Experiment 20000071 PARAMETER Experiment Name: At_100uM_ABA_Mutants_cDNA_P Parameter: Tissue Value: Aerial
  misc_feature: MA Experiment 20000071 PARAMETER Experiment Name: At_100uM_ABA_Mutants_cDNA_P Parameter: Treatment Value: 100uM ABA vs. No Treatment
  misc_feature: MA Experiment ID: 20000072 Result: Up-regulated in Transcription
  misc_feature: MA Experiment 20000072 PARAMETER Experiment Name: At_100uM_ABA_Mutants_cDNA_P Parameter: Plant Line Value: CS8105
  misc_feature: MA Experiment 20000072 PARAMETER Experiment Name: At_100uM_ABA_Mutants_cDNA_P Parameter: Timepoint (hr) Value: 6
  misc_feature: MA Experiment 20000072 PARAMETER Experiment Name: At_100uM_ABA_Mutants_cDNA_P Parameter: Tissue Value: Aerial
  misc_feature: MA Experiment 20000072 PARAMETER Experiment Name: At_100uM_ABA_Mutants_cDNA_P Parameter: Treatment Value: 100uM ABA vs. No Treatment
  misc_feature: MA Experiment ID: 20000086 Result: Up-regulated in Transcription
  misc_feature: MA Experiment 20000086 PARAMETER Experiment Name: At_100uM_ABA_Mutants_cDNA_P Parameter: Plant Line Value: CS22
  misc_feature: MA Experiment 20000086 PARAMETER Experiment Name: At_100uM_ABA_Mutants_cDNA_P Parameter: Timepoint (hr) Value: 6
  misc_feature: MA Experiment 20000086 PARAMETER Experiment Name: At_100uM_ABA_Mutants_cDNA_P Parameter: Tissue Value: Aerial
  misc_feature: MA Experiment 20000086 PARAMETER Experiment Name: At_100uM_ABA_Mutants_cDNA_P Parameter: Treatment Value: 100uM ABA vs. No Treatment
  misc_feature: MA Experiment ID: 20000087 Result: Up-regulated in Transcription
  misc_feature: MA Experiment 20000087 PARAMETER Experiment Name: At_100uM_ABA_Mutants_cDNA_P Parameter: Plant Line Value: WS
  misc_feature: MA Experiment 20000087 PARAMETER Experiment Name: At_100uM_ABA_Mutants_cDNA_P Parameter: Timepoint (hr) Value: 6
  misc_feature: MA Experiment 20000087 PARAMETER Experiment Name: At_100uM_ABA_Mutants_cDNA_P Parameter: Tissue Value: Aerial
  misc_feature: MA Experiment 20000087 PARAMETER Experiment Name: At_100uM_ABA_Mutants_cDNA_P Parameter: Treatment Value: 100uM ABA vs. No Treatment
  misc_feature: MA Experiment ID: 20000088 Result: Up-regulated in Transcription
  misc_feature: MA Experiment 20000088 PARAMETER Experiment Name: At_100uM_ABA_Mutants_cDNA_P Parameter: Plant Line Value: Landsberg
  misc_feature: MA Experiment 20000088 PARAMETER Experiment Name: At_100uM_ABA_Mutants_cDNA_P Parameter: Timepoint (hr) Value: 6
  misc_feature: MA Experiment 20000088 PARAMETER Experiment Name: At_100uM_ABA_Mutants_cDNA_P Parameter: Tissue Value: Aerial
  misc_feature: MA Experiment 20000088 PARAMETER Experiment Name: At_100uM_ABA_Mutants_cDNA_P Parameter: Treatment Value: 100uM ABA vs. No Treatment
  misc_feature: MA Experiment ID: 20000089 Result: Up-regulated in Transcription
  misc_feature: MA Experiment ID: 20000090 Result: Up-regulated in Transcription
  misc_feature: MA Experiment ID: 20000111 Result: Down-regulated in Transcription
  misc_feature: MA Experiment 20000111 PARAMETER Experiment Name: At_42deg_Heat_cDNA_P Parameter: Temperature (deg C) Value: 42 vs. 22
  misc_feature: MA Experiment 20000111 PARAMETER Experiment Name: At_42deg_Heat_cDNA_P Parameter: Timepoint (hr) Value: 6
  misc_feature: MA Experiment 20000111 PARAMETER Experiment Name: At_42deg_Heat_cDNA_P Parameter: Tissue Value: Aerial
  misc_feature: MA Experiment ID: 20000117 Result: Up-regulated in Transcription
  misc_feature: MA Experiment 20000117 PARAMETER Experiment Name: At_100uM_ABA_Mutants_cDNA_P Parameter: Plant Line Value: Columbia
  misc_feature: MA Experiment 20000117 PARAMETER Experiment Name: At_100uM_ABA_Mutants_cDNA_P Parameter: Timepoint (hr) Value: 6
  misc_feature: MA Experiment 20000117 PARAMETER Experiment Name: At_100uM_ABA_Mutants_cDNA_P Parameter: Tissue Value: Aerial
  misc_feature: MA Experiment 20000117 PARAMETER Experiment Name: At_100uM_ABA_Mutants_cDNA_P Parameter: Treatment Value: 100uM ABA vs. No Treatment
  misc_feature: MA Experiment ID: 20000169 Result: Up-regulated in Transcription
  misc_feature: MA Experiment 20000169 PARAMETER Experiment Name: At_100uM_ABA_P Parameter: Age (day) Value: 14
  misc_feature: MA Experiment 20000169 PARAMETER Experiment Name: At_100uM_ABA_P Parameter: Organism Value: A. thaliana
  misc_feature: MA Experiment 20000169 PARAMETER Experiment Name: At_100uM_ABA_P Parameter: Plant Line Value: WS
  misc_feature: MA Experiment 20000169 PARAMETER Experiment Name: At_100uM_ABA_P Parameter: Timepoint (hr) Value: 6
  misc_feature: MA Experiment 20000169 PARAMETER Experiment Name: At_100uM_ABA_P Parameter: Tissue Value: Aerial
  misc_feature: MA Experiment 20000169 PARAMETER Experiment Name: At_100uM_ABA_P Parameter: Treatment Value: 100uM ABA vs. No Treatment
  misc_feature: MA Experiment ID: 20000182 Result: Up-regulated in Transcription
  misc_feature: MA Experiment 20000182 PARAMETER Experiment Name: At_2mM_SA_P Parameter: Age (day) Value: 14
  misc_feature: MA Experiment 20000182 PARAMETER Experiment Name: At_2mM_SA_P Parameter: Organism Value: A. thaliana
  misc_feature: MA Experiment 20000182 PARAMETER Experiment Name: At_2mM_SA_P Parameter: Plant Line Value: WS
  misc_feature: MA Experiment 20000182 PARAMETER Experiment Name: At_2mM_SA_P Parameter: Timepoint (hr) Value: 6
  misc_feature: MA Experiment 20000182 PARAMETER Experiment Name: At_2mM_SA_P Parameter: Tissue Value: Aerial
  misc_feature: MA Experiment 20000182 PARAMETER Experiment Name: At_2mM_SA_P Parameter: Treatment Value: 2mM SA vs. No Treatment
  misc_feature: MA Experiment ID: 20000574 Result: Up-regulated in Transcription
  misc_feature: MA Experiment 20000574 PARAMETER Experiment Name: At_100uM_ABA_Mutants__P Parameter: Organism Value: A. thaliana
  misc_feature: MA Experiment 20000574 PARAMETER Experiment Name: At_100uM_ABA_Mutants__P Parameter: Plant Line Value: CS23 vs. Ler wt
  misc_feature: MA Experiment 20000574 PARAMETER Experiment Name: At_100uM_ABA_Mutants__P Parameter: Timepoint (hr) Value: N/A
  misc_feature: MA Experiment 20000574 PARAMETER Experiment Name: At_100uM_ABA_Mutants__P Parameter: Tissue Value: Whole Plant
  misc_feature: MA Experiment 20000574 PARAMETER Experiment Name: At_100uM_ABA_Mutants__P Parameter: Treatment Value: None
  misc_feature: MA Experiment ID: 20001248 Result: Up-regulated in Transcription
  misc_feature: MA Experiment 20001248 PARAMETER Experiment Name: At_Far-red-induction_P Parameter: Age (day) Value: 7
  misc_feature: MA Experiment 20001248 PARAMETER Experiment Name: At_Far-red-induction_P Parameter: Light Value: Far-red vs. White
  misc_feature: MA Experiment 20001248 PARAMETER Experiment Name: At_Far-red-induction_P Parameter: Organism Value: A. thaliana
  misc_feature: MA Experiment 20001248 PARAMETER Experiment Name: At_Far-red-induction_P Parameter: Plant Line Value: Columbia
  misc_feature: MA Experiment 20001248 PARAMETER Experiment Name: At_Far-red-induction_P Parameter: Timepoint (hr) Value: 4
  misc_feature: MA Experiment 20001248 PARAMETER Experiment Name: At_Far-red-induction_P Parameter: Tissue Value: Whole Plant
  misc_feature: MA Experiment ID: 20001904 Result: Up-regulated in Transcription
  misc_feature: MA Experiment 20001904 PARAMETER Experiment Name: At_Drought_Reproduction_P Parameter: Age (day) Value: 37
  misc_feature: MA Experiment 20001904 PARAMETER Experiment Name: At_Drought_Reproduction_P Parameter: Organism Value: A. thaliana
  misc_feature: MA Experiment 20001904 PARAMETER Experiment Name: At_Drought_Reproduction_P Parameter: Plant Line Value: WS
  misc_feature: MA Experiment 20001904 PARAMETER Experiment Name: At_Drought_Reproduction_P Parameter: Timepoint (day) Value: 7
  misc_feature: MA Experiment 20001904 PARAMETER Experiment Name: At_Drought_Reproduction_P Parameter: Tissue Value: Rosettes
  misc_feature: MA Experiment 20001904 PARAMETER Experiment Name: At_Drought_Reproduction_P Parameter: Treatment Value: Drought vs. No Drought
  misc_feature: MA Experiment ID: 20001905 Result: Up-regulated in Transcription
  misc_feature: MA Experiment 20001905 PARAMETER Experiment Name: At_Drought_Reproduction_P Parameter: Age (day) Value: 40
  misc_feature: MA Experiment 20001905 PARAMETER Experiment Name: At_Drought_Reproduction_P Parameter: Organism Value: A. thaliana
  misc_feature: MA Experiment 20001905 PARAMETER Experiment Name: At_Drought_Reproduction_P Parameter: Plant Line Value: WS
  misc_feature: MA Experiment 20001905 PARAMETER Experiment Name: At_Drought_Reproduction_P Parameter: Timepoint (day) Value: 10
  misc_feature: MA Experiment 20001905 PARAMETER Experiment Name: At_Drought_Reproduction_P Parameter: Tissue Value: Rosettes
  misc_feature: MA Experiment 20001905 PARAMETER Experiment Name: At_Drought_Reproduction_P Parameter: Treatment Value: Drought vs. No Drought
atttcttcattcgtaaacaaacacacacgaagcaaaaacaaaaatgaaaactactcatttctcttcctcttcttcttccgatcgcaggatcggtgctctgctccgtcatctcaattccggctcagattcggacaacctgagctctctttatgcatctccgacatcgggaggcaccggtggttctgttttctctcatcttgttcaagctccagaggatcctattcttggggtgacagttgcatacaacaaagatcctagcccagttaagctgaatttaggagttggtgcttaccgaactgaggagggaaaacctttggttcttaatgttgtgaggaaagctgagcagcagcttatcaatgacagaacaagaatcaaggagtatcttcccattgttggattggttgagttcaacaagttaagcgctaagctcatactaggcgctgacagtcctgctattcgggagaatcggattaccaccgtggagtgtttgtctggtactggttctctgagagttggaggagagtttttggctaaacattatcatcagaaaacaatttacatcactcagccaacatggggaaatcatccaaagattttcacgctcgctggtttgacagtgaaaacttaccgatactacgatccagcgacgcgtgggttgaactttcaaggtttattagaagaccttggtgctgccgcacctggttctatagtgcttctccatgcctgtgcccataaccctactggtgttgatccaaccattcaacaatgggagcaaatcaggaagttgatgcgatcaaagggattgatgcccttcttcgatagtgcttatcagggctttgcaagtggaagtcttgatacagatgcgaaacctattaggatgtttgttgctgatggcggagaatgcctcgttgctcaaagttatgcgaagaacatgggactctatggagaacgagttggagctctcagcattgtatgcaaatcagcagatgttgcggggagagttgaaagccaactgaaactagtgataaggccaatgtactcgagtcctccaatccatggtgcatcaatcgtggctgtaatcctccgtgacaagaatttgttcaacgaatggactctggaactgaaggccatggctgatcgtatcatcagcatgaggaaacagcttttcgaggcattacgtactcgaggcactcctggagactggagtcacatcataaagcagattggtatgtttaccttcacagggttaaacccagctcaagtctccttcatgactaaagagtaccacatctacatgacatctgacgggaggataagcatggctggtctgagttcgaagactgtacctcaccttgcagacgctatccatgctgttgtcaccaaagccgtctgagaaactgaacaccaccatgacaccaaagcttcataataaagattttgttcttttctttctattatagcatttccggcagtgacaagataaatgtcgttactattattattgtttcatcccagtatcaataaagtacgcaagaaagcttttgtgctc

SEQ ID NO: 104960 - protein, 449 aa, Arabidopsis thaliana; identical to SEQ ID NO: 36484
  peptide (1)..(449): Ceres Seq. ID no. 13616164
  misc_feature (128)..(445): Pfam Name: Aminotransferase class I and II Pfam Description: Aminotransferase class I and II
  misc_feature (1)..(449): Homolog of NCBI NO: 15239078 NR Description: aspartate aminotransferase, chloroplast A/Asp3) [Arabidopsis thaliana] >gi|1168258|sp|P46644|AAT3_ARATH aminotransferase, chloroplast precursor (Transaminase A)

SEQ ID NO: 104961 - DNA, 1032 bp, Arabidopsis thaliana
  misc_feature (1)..(1032): Ceres Seq. ID no. 13616173
  misc_feature: MA Experiment ID: 108576 Result: Up-regulated in Transcription
  misc_feature: MA Experiment 108576 PARAMETER Experiment Name: At_42deg_Heat_cDNA_P Parameter: Temperature (deg C) Value: 42 vs. 22
  misc_feature: MA Experiment 108576 PARAMETER Experiment Name: At_42deg_Heat_cDNA_P Parameter: Timepoint (hr) Value: 1
  misc_feature: MA Experiment 108576 PARAMETER Experiment Name: At_42deg_Heat_cDNA_P Parameter: Tissue Value: Aerial
  misc_feature: MA Experiment ID: 108577 Result: Up-regulated in Transcription
  misc_feature: MA Experiment 108577 PARAMETER Experiment Name: At_42deg_Heat_cDNA_P Parameter: Temperature (deg C) Value: 42 vs. 22
  misc_feature: MA Experiment 108577 PARAMETER Experiment Name: At_42deg_Heat_cDNA_P Parameter: Timepoint (hr) Value: 6
  misc_feature: MA Experiment 108577 PARAMETER Experiment Name: At_42deg_Heat_cDNA_P Parameter: Tissue Value: Aerial
  misc_feature: MA Experiment ID: 20000093 Result: Up-regulated in Transcription
  misc_feature: MA Experiment 20000093 PARAMETER Experiment Name: At_42deg_Heat_cDNA_P Parameter: Temperature (deg C) Value: 42 vs. 22
  misc_feature: MA Experiment 20000093 PARAMETER Experiment Name: At_42deg_Heat_cDNA_P Parameter: Timepoint (hr) Value: 0.5
  misc_feature: MA Experiment 20000093 PARAMETER Experiment Name: At_42deg_Heat_cDNA_P Parameter: Tissue Value: Aerial
  misc_feature: MA Experiment ID: 20000111 Result: Up-regulated in Transcription
  misc_feature: MA Experiment 20000111 PARAMETER Experiment Name: At_42deg_Heat_cDNA_P Parameter: Temperature (deg C) Value: 42 vs. 22
  misc_feature: MA Experiment 20000111 PARAMETER Experiment Name: At_42deg_Heat_cDNA_P Parameter: Timepoint (hr) Value: 6
  misc_feature: MA Experiment 20000111 PARAMETER Experiment Name: At_42deg_Heat_cDNA_P Parameter: Tissue Value: Aerial
  misc_feature: MA Experiment ID: 20000112 Result: Up-regulated in Transcription
  misc_feature: MA Experiment 20000112 PARAMETER Experiment Name: At_42deg_Heat_cDNA_P Parameter: Temperature (deg C) Value: 42 vs. 22
  misc_feature: MA Experiment 20000112 PARAMETER Experiment Name: At_42deg_Heat_cDNA_P Parameter: Timepoint (hr) Value: 2
  misc_feature: MA Experiment 20000112 PARAMETER Experiment Name: At_42deg_Heat_cDNA_P Parameter: Tissue Value: Aerial
  misc_feature: MA Experiment ID: 20000113 Result: Up-regulated in Transcription
  misc_feature: MA Experiment 20000113 PARAMETER Experiment Name: At_42deg_Heat_cDNA_P Parameter: Temperature (deg C) Value: 42 vs. 22
  misc_feature: MA Experiment 20000113 PARAMETER Experiment Name: At_42deg_Heat_cDNA_P Parameter: Timepoint (hr) Value: 8
  misc_feature: MA Experiment 20000113 PARAMETER Experiment Name: At_42deg_Heat_cDNA_P Parameter: Tissue Value: Aerial
  misc_feature: MA Experiment ID: 20000144 Result: Up-regulated in Transcription
  misc_feature: MA Experiment 20000144 PARAMETER Experiment Name: At_42deg_Heat_cDNA_P Parameter: Temperature (deg C) Value: 42 vs. 22
  misc_feature: MA Experiment 20000144 PARAMETER Experiment Name: At_42deg_Heat_cDNA_P Parameter: Timepoint (hr) Value: 1
  misc_feature: MA Experiment 20000144 PARAMETER Experiment Name: At_42deg_Heat_cDNA_P Parameter: Tissue Value: Aerial
  misc_feature: MA Experiment ID: 20000171 Result: Up-regulated in Transcription
  misc_feature: MA Experiment 20000171 PARAMETER Experiment Name: At_42deg_Heat_P Parameter: Age (day) Value: 14
  misc_feature: MA Experiment 20000171 PARAMETER Experiment Name: At_42deg_Heat_P Parameter: Organism Value: A. thaliana
  misc_feature: MA Experiment 20000171 PARAMETER Experiment Name: At_42deg_Heat_P Parameter: Plant Line Value: WS
  misc_feature: MA Experiment 20000171 PARAMETER Experiment Name: At_42deg_Heat_P Parameter: Temperature (deg C) Value: 42 vs. 22
  misc_feature: MA Experiment 20000171 PARAMETER Experiment Name: At_42deg_Heat_P Parameter: Timepoint (hr) Value: 1
  misc_feature: MA Experiment 20000171 PARAMETER Experiment Name: At_42deg_Heat_P Parameter: Tissue Value: Aerial
  misc_feature: MA Experiment ID: 20000173 Result: Up-regulated in Transcription
  misc_feature: MA Experiment 20000173 PARAMETER Experiment Name: At_42deg_Heat_P Parameter: Age (day) Value: 14
  misc_feature: MA Experiment 20000173 PARAMETER Experiment Name: At_42deg_Heat_P Parameter: Organism Value: A. thaliana
  misc_feature: MA Experiment 20000173 PARAMETER Experiment Name: At_42deg_Heat_P Parameter: Plant Line Value: WS
  misc_feature: MA Experiment 20000173 PARAMETER Experiment Name: At_42deg_Heat_P Parameter: Temperature (deg C) Value: 42 vs. 22
  misc_feature: MA Experiment 20000173 PARAMETER Experiment Name: At_42deg_Heat_P Parameter: Timepoint (hr) Value: 6
  misc_feature: MA Experiment 20000173 PARAMETER Experiment Name: At_42deg_Heat_P Parameter: Tissue Value: Aerial
aagaataaaccgcgtcgcgtctcttttctggaaaaaacgagaaactgtgatcttggcccttttattacccctatcctcttcttcttcaatctctccgatcaaaatccttttaagctctgtagacccaggttacgcagagaagaagaacagaacaaggaattatataatcattggcttgatcaatctgaattgcagttcatggcgctaaaccctcaattactacccaatgggatgcctgttccctttgttaatgaaatgttcgtcctagtccgagatggtgttgagtttgaagtcgacaagatccctggagggcatggaggtcatgttaaggccaagggggtgatttacttgtctaatatacggatggtctttgtttcaagcaagcctgttgacaactttgttgcttttgacatgcccctgctttacatccatgccgagaaatttaatcagccaatatttcactgcaacaatattgctggacaagtggagcctgtggtgccagaaaatgagcatagagctctatattcaacacacagtttcaagatcctatttaaggaaggtggttgtgggacatttgttcctctcttcttgaatctcatatcatcagtgagacaatacaacagacaaatgcaacaagcagcagaagcagcagcggcagctcctcatgttgatcctcttcaagccgctcagacacctgtggacgaaatgatgagacatgcgtacgtggaccctaatgatccaacgaggatatatctgcaacagccatcaggggaatctcagttgaggcgtagagcttaccattcgggtgcggcggaacattgagatacacggaaaaaaaaaatacaaaggctatgaatacagaaacagcaacagattagtgttgctaataagcaaaacgtgttgtttgtttgtttaaagttgaaaactaaaagtctaaaaccatctgtgtaaagaaagatgagacttgtttggtgtgtggatgtatctggtaaaattggagtcgtaataatcataagtttggttcatatattg

SEQ ID NO: 104962 - protein, 273 aa, Arabidopsis thaliana; identical to SEQ ID NO: 25736
  peptide (1)..(273): Ceres Seq. ID no. 13616174
  misc_feature (67)..(273): Homolog of NCBI NO: 15239148 NR Description: expressed protein [Arabidopsis thaliana]
  misc_feature (67)..(205): Homolog of NCBI NO: 23479181 NR Description: arabinogalactan protein [Plasmodium yoelii yoelii]
  misc_feature (67)..(210): Homolog of NCBI NO: 23619609 NR Description: hypothetical protein [Plasmodium falciparum 3D7]

SEQ ID NO: 104963 - protein, 207 aa, Arabidopsis thaliana; identical to SEQ ID NO: 25737
  peptide (1)..(207): Ceres Seq. ID no. 13616175
  misc_feature (1)..(207): Homolog of NCBI NO: 15239148 NR Description: expressed protein [Arabidopsis thaliana]
  misc_feature (1)..(139): Homolog of NCBI NO: 23479181 NR Description: arabinogalactan protein [Plasmodium yoelii yoelii]
  misc_feature (1)..(144): Homolog of NCBI NO: 23619609 NR Description: hypothetical protein [Plasmodium falciparum 3D7]

SEQ ID NO: 104964 - protein, 196 aa, Arabidopsis thaliana; identical to SEQ ID NO: 25738
  peptide (1)..(196): Ceres Seq. ID no. 13616176
  misc_feature (1)..(196): Homolog of NCBI NO: 15239148 NR Description: expressed protein [Arabidopsis thaliana]
  misc_feature (1)..(128): Homolog of NCBI NO: 23479181 NR Description: arabinogalactan protein [Plasmodium yoelii yoelii]
  misc_feature (1)..(133): Homolog of NCBI NO: 23619609 NR Description: hypothetical protein [Plasmodium falciparum 3D7]

SEQ ID NO: 104965 - DNA, 705 bp, Arabidopsis thaliana
  misc_feature (1)..(705): Ceres Seq. ID no. 13616177
  misc_feature: MA Experiment ID: 108434 Result: Up-regulated in Transcription
  misc_feature: MA Experiment 108434 PARAMETER Experiment Name: At_Root_Tips_cDNA_P Parameter: Tissue Value: Root Tips
  misc_feature: MA Experiment ID: 108585 Result: Down-regulated in Transcription
  misc_feature: MA Experiment 108585 PARAMETER Experiment Name: At_5mM_NaNP_cDNA_P Parameter: Timepoint (hr) Value: 6
  misc_feature: MA Experiment 108585 PARAMETER Experiment Name: At_5mM_NaNP_cDNA_P Parameter: Tissue Value: Aerial
  misc_feature: MA Experiment 108585 PARAMETER Experiment Name: At_5mM_NaNP_cDNA_P Parameter: Treatment Value: null
  misc_feature: MA Experiment ID: 20000069 Result: Down-regulated in Transcription
  misc_feature: MA Experiment 20000069 PARAMETER Experiment Name: At_100uM_ABA_Mutants_cDNA_P Parameter: Plant Line Value: CS23
  misc_feature: MA Experiment 20000069 PARAMETER Experiment Name: At_100uM_ABA_Mutants_cDNA_P Parameter: Timepoint (hr) Value: 6
  misc_feature: MA Experiment 20000069 PARAMETER Experiment Name: At_100uM_ABA_Mutants_cDNA_P Parameter: Tissue Value: Aerial
  misc_feature: MA Experiment 20000069 PARAMETER Experiment Name: At_100uM_ABA_Mutants_cDNA_P Parameter: Treatment Value: 100uM ABA vs. No Treatment
aaaacaaattgtaacactcactaggcatagcattctagttagttctgcagaaatttatagcgacactggtccaaattaggaggagcgagagcgaaggtacgagtgaggatttacaattgtcgatcgttttcacctagaaaccctaatttcgggggctcgcacgccctctctgattagaagcgacttcattatcggtcactagaatctgctgcttcttttctgaaactagcattgtcaggaacatggacactaagaagaaatctaaggaacatggcctataccgtatagtcaatgctatcggttatgcatttggagcgggagctgttggaggttctgtatatcatttcgtgagaggggcatacaattccccaataggtgctcgatatgttggaggaacacaagcggctagcatgaatgctcctcgcttgggaggcacttttgctgtatttggaggattgctctcaacatttgactatgcattggtgcgcatcaggaagaaggaagatccatggaactccatcgtagcgggtgctgctacaggtggagttctgtctatccgaaaaggggttgttgcagcttcaacatcagcggttatgtttggtttttttttggctgtactcaaccctccgttcgggagcaagtaagctttttgggttgtctttgatgagaatgtcatttagactttcatgataattgccttttcgt

SEQ ID NO: 104966 - protein, 133 aa, Arabidopsis thaliana; identical to SEQ ID NO: 26809
  peptide (1)..(133): Ceres Seq. ID no. 13616178
  misc_feature (4)..(133): Pfam Name: Tim17/Tim22/Tim23 family Pfam Description: Tim17/Tim22/Tim23 family
  misc_feature (1)..(133): Homolog of NCBI NO: 15239150 NR Description: membrane translocase - like protein [Arabidopsis
  misc_feature (1)..(133): Homolog of NCBI NO: 21593521 NR Description: membrane translocase-like protein [Arabidopsis
  misc_feature (1)..(133): Homolog of NCBI NO: 38678774 NR Description: mitochondrial inner membrane translocase TM17-3
  misc_feature (1)..(126): Homolog of NCBI NO: 15228131 NR Description: protein translocase -related [Arabidopsis >gi|12643851|sp|Q9SP35|IM17_ARATH Mitochondrial import inner translocase subunit TIM17 >gi|25408549|pir||D84792 probable
  misc_feature (1)..(126): Homolog of NCBI NO: 38678772 NR Description: mitochondrial inner membrane translocase TM17-2
  misc_feature (1)..(126): Homolog of NCBI NO: 6103722 NR Description: TIM17 [Arabidopsis thaliana]
  misc_feature (1)..(126): Homolog of NCBI NO: 34394571 NR Description: translocase inner membrane-like protein [Oryza
  misc_feature (1)..(126): Homolog of NCBI NO: 15217923 NR Description: mitochondrial inner membrane translocase
  misc_feature (13)..(126): Homolog of NCBI NO: 34933423 NR Description: similar to mitochondrial inner membrane
  misc_feature (13)..(126): Homolog of NCBI NO: 5032181 NR Description: translocase of inner mitochondrial membrane 17 B; inner mitochondrial membrane preprotein translocase [Homo >gi|12643624|sp|O60830|IM7B_HUMAN Mitochondrial import inner

SEQ ID NO: 104967 - protein, 77 aa, Arabidopsis thaliana; identical to SEQ ID NO: 26810
  peptide (1)..(77): Ceres Seq. ID no. 13616179
  misc_feature (1)..(77): Pfam Name: Tim17/Tim22/Tim23 family Pfam Description: Tim17/Tim22/Tim23 family
  misc_feature (1)..(77): Homolog of NCBI NO: 15239150 NR Description: membrane translocase - like protein [Arabidopsis
  misc_feature (1)..(77): Homolog of NCBI NO: 21593521 NR Description: membrane translocase-like protein [Arabidopsis
  misc_feature (1)..(77): Homolog of NCBI NO: 38678774 NR Description: mitochondrial inner membrane translocase TM17-3
  misc_feature (1)..(70): Homolog of NCBI NO: 15228131 NR Description: protein translocase -related [Arabidopsis >gi|12643851|sp|Q9SP35|IM17_ARATH Mitochondrial import inner translocase subunit TIM17 >gi|25408549|pir||D84792 probable
  misc_feature (1)..(70): Homolog of NCBI NO: 38678772 NR Description: mitochondrial inner membrane translocase TM17-2
  misc_feature (1)..(70): Homolog of NCBI NO: 6103722 NR Description: TIM17 [Arabidopsis thaliana]
  misc_feature (1)..(70): Homolog of NCBI NO: 34394571 NR Description: translocase inner membrane-like protein [Oryza
  misc_feature (1)..(70): Homolog of NCBI NO: 15217923 NR Description: mitochondrial inner membrane translocase
  misc_feature (1)..(70): Homolog of NCBI NO: 34933423 NR Description: similar to mitochondrial inner membrane
  misc_feature (1)..(70): Homolog of NCBI NO: 5032181 NR Description: translocase of inner mitochondrial membrane 17 B; inner mitochondrial membrane preprotein translocase [Homo >gi|12643624|sp|O60830|IM7B_HUMAN Mitochondrial import inner

SEQ ID NO: 104968 - DNA, 1168 bp, Arabidopsis thaliana
  misc_feature (1)..(1168): Ceres Seq. ID no. 13616184
  misc_feature: MA Experiment ID: 108434 Result: Down-regulated in Transcription
  misc_feature: MA Experiment 108434 PARAMETER Experiment Name: At_Root_Tips_cDNA_P Parameter: Tissue Value: Root Tips
  misc_feature: MA Experiment ID: 108585 Result: Up-regulated in Transcription
  misc_feature: MA Experiment 108585 PARAMETER Experiment Name: At_5mM_NaNP_cDNA_P Parameter: Timepoint (hr) Value: 6
  misc_feature: MA Experiment 108585 PARAMETER Experiment Name: At_5mM_NaNP_cDNA_P Parameter: Tissue Value: Aerial
  misc_feature: MA Experiment 108585 PARAMETER Experiment Name: At_5mM_NaNP_cDNA_P Parameter: Treatment Value: null
  misc_feature: MA Experiment ID: 20000184 Result: Down-regulated in Transcription
  misc_feature: MA Experiment 20000184 PARAMETER Experiment Name: At_Shoots__P Parameter: Age (day) Value: 7
  misc_feature: MA Experiment 20000184 PARAMETER Experiment Name: At_Shoots__P Parameter: Tissue Value: Shoots vs. Whole Plant
  misc_feature: MA Experiment ID: 20001247 Result: Up-regulated in Transcription
  misc_feature: MA Experiment 20001247 PARAMETER Experiment Name: At_Far-red-induction_P Parameter: Age (day) Value: 7
  misc_feature: MA Experiment 20001247 PARAMETER Experiment Name: At_Far-red-induction_P Parameter: Light Value: Far-red vs. White
  misc_feature: MA Experiment 20001247 PARAMETER Experiment Name: At_Far-red-induction_P Parameter: Organism Value: A. thaliana
  misc_feature: MA Experiment 20001247 PARAMETER Experiment Name: At_Far-red-induction_P Parameter: Plant Line Value: Columbia
  misc_feature: MA Experiment 20001247 PARAMETER Experiment Name: At_Far-red-induction_P Parameter: Timepoint (hr) Value: 1
  misc_feature: MA Experiment 20001247 PARAMETER Experiment Name: At_Far-red-induction_P Parameter: Tissue Value: Whole Plant
caacgcggaagggaaaaaaaaaaaaggcgcaattgaaagaaaaaaattgataatcggtaagatttgatgtcccggcgtccgtcgttttgatcaccgtgagaaatggattcttcgaattgttgttctgagtaaaactcactcaccgtcaccggagaagaaagtgtaaatggattccgaagaaacgacgtcgtcggtaacgactacaaagaagcaaaagagggttttctcttcgttagctttgcgattccgtacagtgatagttttctcgatcattagcttcgtcgtcttgtcgtttctattaggaatcttagtgattttcatcggtgaattgtgggtttattcttcttcatctgcttctgcttctcttcattctcgctgcaaaattgtttccagctctgttgatcttaggtcttctaaagtgtgtggcattggactattgaacgtcaaagcacaacatgtgttttacccttttgagagagataaattcagatgtcgttatgattactactgggcttctgtcttcaaggtagagtataaagataacttaatgggtcaaacacggttagcgttttcagaagcaccaaatgaagctcttcctcctgagtgcagacctaactttggtgctgcattacttaccaaagataacttcaaggttaatgagacttacgattgctggtacacattagggattccaaagataaagctttatcgggatagctttttcggttgccaagcagatgatctttctttcactgacattgctaagcaatactctattgtaatctctaaacttttacagtcatggcttaatggagaatcaacaccaaagtactggaaatatgatgtgatcgctggcattgtctctggcttcgcaacttccataatcacagtcttcatcataaggatcttaagacatgcaaaatcttggttccctcaagcttgttgttcagttaagagacagttttctaaggtgaatatattggtacaagtgaaacgtgcatgtttgcttcttgtttacttctcggttctcggatggatggctacacaatacttaaaaattctttttccaaatgcttaggaaaaaacattacttgagagtcagtgagtatgtaatgattcgtagacagttgtgtgatgtaatcttaaatcatttacagaaaaagaaagc

SEQ ID NO: 104969 - protein, 303 aa, Arabidopsis thaliana
  peptide (1)..(303): Ceres Seq. ID no. 13616185
  misc_feature (1)..(303): Homolog of NCBI NO: 18415248 NR Description: expressed protein [Arabidopsis thaliana]
  misc_feature (1)..(303): Homolog of NCBI NO: 21553578 NR Description: unknown [Arabidopsis thaliana]
  misc_feature (77)..(303): Homolog of NCBI NO: 7459450 NR Description: hypothetical protein T18B16.110 - Arabidopsis >gi|2828289|emb|CAA16703.1| hypothetical protein [Arabidopsis >gi|7268709|emb|CAB78916.1| hypothetical protein [Arabidopsis
  misc_feature (37)..(299): Homolog of NCBI NO: 38345775 NR Description: OSJNBa0083N12.13 [Oryza sativa (japonica
MDSEETTSSVTTTKKQKRVFSSLALRFRTVIVFSIISFVVLSFLLGILVIFIGELWVYSSSSASASLHSRCKIVSSSVDLRSSKVCGIGLLNVKAQHVFYPFERDKFRCRYDYYWASVFKVEYKDNLMGQTRLAFSEAPNEALPPECRPNFGAALLTKDNFKVNETYDCWYTLGIPKIKLYRDSFFGCQADDLSFTDIAKQYSIVISKLLQSWLNGESTPKYWKYDVIAGIVSGFATSIITVFIIRILRHAKSWFPQACCSVKRQFSKVNILVQVKRACLLLVYFSVLGWMATQYLKILFPNA

SEQ ID NO: 104970 - protein, 176 aa, Arabidopsis thaliana
  peptide (1)..(176): Ceres Seq. ID no. 13616186
  misc_feature (1)..(176): Homolog of NCBI NO: 18415248 NR Description: expressed protein [Arabidopsis thaliana]
  misc_feature (1)..(176): Homolog of NCBI NO: 21553578 NR Description: unknown [Arabidopsis thaliana]
  misc_feature (1)..(176): Homolog of NCBI NO: 7459450 NR Description: hypothetical protein T18B16.110 - Arabidopsis >gi|2828289|emb|CAA16703.1| hypothetical protein [Arabidopsis >gi|7268709|emb|CAB78916.1| hypothetical protein [Arabidopsis
  misc_feature (1)..(172): Homolog of NCBI NO: 38345775 NR Description: OSJNBa0083N12.13 [Oryza sativa (japonica
MGQTRLAFSEAPNEALPPECRPNFGAALLTKDNFKVNETYDCWYTLGIPKIKLYRDSFFGCQADDLSFTDIAKQYSIVISKLLQSWLNGESTPKYWKYDVIAGIVSGFATSIITVFIIRILRHAKSWFPQACCSVKRQFSKVNILVQVKRACLLLVYFSVLGWMATQYLKILFPNA

SEQ ID NO: 104971 - DNA, 918 bp, Arabidopsis thaliana
  misc_feature (1)..(918): Ceres Seq. ID no. 13616191
  misc_feature: MA Experiment ID: 108434 Result: Down-regulated in Transcription
  misc_feature: MA Experiment 108434 PARAMETER Experiment Name: At_Root_Tips_cDNA_P Parameter: Tissue Value: Root Tips
  misc_feature: MA Experiment ID: 108462 Result: Up-regulated in Transcription
  misc_feature: MA Experiment 108462 PARAMETER Experiment Name: At_Germinating_Seeds_cDNA_P Parameter: Age (day) Value: 2 vs. 0
  misc_feature: MA Experiment 108462 PARAMETER Experiment Name: At_Germinating_Seeds_cDNA_P Parameter: Tissue Value: Germinating Seeds
  misc_feature: MA Experiment ID: 108463 Result: Up-regulated in Transcription
  misc_feature: MA Experiment 108463 PARAMETER Experiment Name: At_Germinating_Seeds_cDNA_P Parameter: Age (day) Value: 3 vs. 0
  misc_feature: MA Experiment 108463 PARAMETER Experiment Name: At_Germinating_Seeds_cDNA_P Parameter: Tissue Value: Germinating Seeds
  misc_feature: MA Experiment ID: 108573 Result: Up-regulated in Transcription
  misc_feature: MA Experiment 108573 PARAMETER Experiment Name: At_Drought_cDNA_P Parameter: Timepoint (hr) Value: 6
  misc_feature: MA Experiment 108573 PARAMETER Experiment Name: At_Drought_cDNA_P Parameter: Tissue Value: Aerial
  misc_feature: MA Experiment 108573 PARAMETER Experiment Name: At_Drought_cDNA_P Parameter: Treatment Value: Drought vs. No Drought
  misc_feature: MA Experiment ID: 108579 Result: Up-regulated in Transcription
  misc_feature: MA Experiment 108579 PARAMETER Experiment Name: At_4deg_Cold_cDNA_P Parameter: Temperature (deg C) Value: 4 vs. 22
  misc_feature: MA Experiment 108579 PARAMETER Experiment Name: At_4deg_Cold_cDNA_P Parameter: Timepoint (hr) Value: 6
  misc_feature: MA Experiment 108579 PARAMETER Experiment Name: At_4deg_Cold_cDNA_P Parameter: Tissue Value: Aerial
  misc_feature: MA Experiment ID: 20000113 Result: Up-regulated in Transcription
  misc_feature: MA Experiment 20000113 PARAMETER Experiment Name: At_42deg_Heat_cDNA_P Parameter: Temperature (deg C) Value: 42 vs. 22
  misc_feature: MA Experiment 20000113 PARAMETER Experiment Name: At_42deg_Heat_cDNA_P Parameter: Timepoint (hr) Value: 8
  misc_feature: MA Experiment 20000113 PARAMETER Experiment Name: At_42deg_Heat_cDNA_P Parameter: Tissue Value: Aerial
  misc_feature: MA Experiment ID: 20000180 Result: Up-regulated in Transcription
  misc_feature: MA Experiment 20000180 PARAMETER Experiment Name: At_Germinating_Seeds_P Parameter: Age (hr) Value: 24 vs. 0
  misc_feature: MA Experiment 20000180 PARAMETER Experiment Name: At_Germinating_Seeds_P Parameter: Tissue Value: Germinating Seeds
  misc_feature: MA Experiment ID: 20000185 Result: Down-regulated in Transcription
  misc_feature: MA Experiment 20000185 PARAMETER Experiment Name: At_Roots__P Parameter: Age (day) Value: 7 vs. 21
  misc_feature: MA Experiment 20000185 PARAMETER Experiment Name: At_Roots__P Parameter: Organism Value: A. thaliana
  misc_feature: MA Experiment 20000185 PARAMETER Experiment Name: At_Roots__P Parameter: Tissue Value: Roots vs. Whole Plant
  misc_feature: MA Experiment ID: 20000224 Result: Down-regulated in Transcription
  misc_feature: MA Experiment ID: 20000286 Result: Down-regulated in Transcription
  misc_feature: MA Experiment 20000286 PARAMETER Experiment Name: At_Open_Flower_P Parameter: Age (day) Value: 21
  misc_feature: MA Experiment 20000286 PARAMETER Experiment Name: At_Open_Flower_P Parameter: Plant Line Value: WS
  misc_feature: MA Experiment 20000286 PARAMETER Experiment Name: At_Open_Flower_P Parameter: Tissue Value: Half Open vs. Whole Plant
  misc_feature: MA Experiment ID: 20000438 Result: Down-regulated in Transcription
  misc_feature: MA Experiment 20000438 PARAMETER Experiment Name: At_Shoots__P Parameter: Age (day) Value: 14
  misc_feature: MA Experiment 20000438 PARAMETER Experiment Name: At_Shoots__P Parameter: Tissue Value: Shoots vs. Whole Plant
  misc_feature: MA Experiment ID: 20000439 Result: Down-regulated in Transcription
  misc_feature: MA Experiment 20000439 PARAMETER Experiment Name: At_Roots__P Parameter: Age (day) Value: 14 vs. 21
  misc_feature: MA Experiment 20000439 PARAMETER Experiment Name: At_Roots__P Parameter: Organism Value: A. thaliana
  misc_feature: MA Experiment 20000439 PARAMETER Experiment Name: At_Roots__P Parameter: Tissue Value: Roots vs. Whole Plant
  misc_feature: MA Experiment ID: 20001248 Result: Up-regulated in Transcription
  misc_feature: MA Experiment 20001248 PARAMETER Experiment Name: At_Far-red-induction_P Parameter: Age (day) Value: 7
  misc_feature: MA Experiment 20001248 PARAMETER Experiment Name: At_Far-red-induction_P Parameter: Light Value: Far-red vs. White
  misc_feature: MA Experiment 20001248 PARAMETER Experiment Name: At_Far-red-induction_P Parameter: Organism Value: A. thaliana
  misc_feature: MA Experiment 20001248 PARAMETER Experiment Name: At_Far-red-induction_P Parameter: Plant Line Value: Columbia
  misc_feature: MA Experiment 20001248 PARAMETER Experiment Name: At_Far-red-induction_P Parameter: Timepoint (hr) Value: 4
  misc_feature: MA Experiment 20001248 PARAMETER Experiment Name: At_Far-red-induction_P Parameter: Tissue Value: Whole Plant
  misc_feature: MA Experiment ID: 20001558 Result: Down-regulated in Transcription
  misc_feature: MA Experiment 20001558 PARAMETER Experiment Name: At_Drought_Soil_Dry_P Parameter: Age (day) Value: 27
  misc_feature: MA Experiment 20001558 PARAMETER Experiment Name: At_Drought_Soil_Dry_P Parameter: Organism Value: A. thaliana
  misc_feature: MA Experiment 20001558 PARAMETER Experiment Name: At_Drought_Soil_Dry_P Parameter: Plant Line Value: WS
  misc_feature: MA Experiment 20001558 PARAMETER Experiment Name: At_Drought_Soil_Dry_P Parameter: Post Timepoint (hr) Value: 6
  misc_feature: MA Experiment 20001558 PARAMETER Experiment Name: At_Drought_Soil_Dry_P Parameter: Post-Treatment Value: Re-Water vs. No Drought
  misc_feature: MA Experiment 20001558 PARAMETER Experiment Name: At_Drought_Soil_Dry_P Parameter: Timepoint (day) Value: 13
  misc_feature: MA Experiment 20001558 PARAMETER Experiment Name: At_Drought_Soil_Dry_P Parameter: Treatment Value: Drought vs. No Drought
  misc_feature: MA Experiment ID: 20001560 Result: Down-regulated in Transcription
  misc_feature: MA Experiment 20001560 PARAMETER Experiment Name: At_Drought_Soil_Dry_P Parameter: Age (day) Value: 28
  misc_feature: MA Experiment 20001560 PARAMETER Experiment Name: At_Drought_Soil_Dry_P Parameter: Organism Value: A. thaliana
  misc_feature: MA Experiment 20001560 PARAMETER Experiment Name: At_Drought_Soil_Dry_P Parameter: Plant Line Value: WS
  misc_feature: MA Experiment 20001560 PARAMETER Experiment Name: At_Drought_Soil_Dry_P Parameter: Post Timepoint (hr) Value: None
  misc_feature: MA Experiment 20001560 PARAMETER Experiment Name: At_Drought_Soil_Dry_P Parameter: Post-Treatment Value: None
  misc_feature: MA Experiment 20001560 PARAMETER Experiment Name: At_Drought_Soil_Dry_P Parameter: Timepoint (day) Value: 14
  misc_feature: MA Experiment 20001560 PARAMETER Experiment Name: At_Drought_Soil_Dry_P Parameter: Treatment Value: Drought vs. No Drought
atccatatatatccttctccattagcttttgttcttctgttccaattccaattccttctgaaatattcatcgcaattcgtatcggtttaaagtaaaaaagcaatgggaggtggtaaagacaagcatcatgatgagcaagagaaaggatttcatggttttccaggaggtggacattacccacctgctcaaggaggttaccctcctcaaggttacccaccacaacaagggtatcctccagctggaggctacccacctgccggatatcctcctggtgcttaccctgctgcgcccggtggttatcctcctgcacctggaggttaccctcctgctggctatcctgcacctggagctcaccattcaggacattctggtggtggactcggaggcatgatagcaggtgcagctggtgcagccgcagcagcttatggagctcaccatgttggtcacgcctctcacaacccttacgggcatgctgtaggacatggagggtatggccatgcccctgctcatggctttggccatggtggtcatggtaaattcaagcacggaaagcatggaggcaaattcaagcacggaaagcatggaaagcacgggaaacatggcatgtttggaggaggaggcaaattcaagaagtggaagtaatctcaaaaaccccacctttgatcctctcctccagtatagtctcattacctgaccgatgtttctaataatcccccttcaaacatatttcattttaactatgtcggtttagagattactggttgaggaaataattggagagtgctagtataaaccttatggtatctgcagcagaggtttctttaatctctcaatagtagatgctttgaaacttatctataatttggtattgtaatgacagtttgtgtttggttttttcttcagtatcttctttgtttg

SEQ ID NO: 104972 - protein, 179 aa, Arabidopsis thaliana; identical to SEQ ID NO: 27992
  peptide (1)..(179): Ceres Seq. ID no. 13616192
  misc_feature (82)..(179): Pfam Name: Dehydrin Pfam Description: Dehydrin
  misc_feature (1)..(179): Homolog of NCBI NO: 15234178 NR Description: glycine/proline-rich protein [Arabidopsis
  misc_feature (1)..(150): Homolog of NCBI NO: 7487135 NR Description: hypothetical protein T18B16.170 - Arabidopsis >gi|2828295|emb|CAA16709.1| putative protein [Arabidopsis
  misc_feature (1)..(179): Homolog of NCBI NO: 18422542 NR Description: proline-rich protein family [Arabidopsis thaliana]
  misc_feature (1)..(179): Homolog of NCBI NO: 6478148 NR Description: putative glycine and proline-rich protein
  misc_feature (17)..(179): Homolog of NCBI NO: 33668156 NR Description: GPRP [Oryza sativa (indica cultivar-group)]
  misc_feature (1)..(179): Homolog of NCBI NO: 13543234 NR Description: Unknown (protein for MGC:12025) [Mus musculus]
  misc_feature (4)..(179): Homolog of NCBI NO: 18398103 NR Description: proline-rich protein family [Arabidopsis thaliana]
  misc_feature (4)..(179): Homolog of NCBI NO: 21553447 NR Description: putative glycine and proline-rich protein
  misc_feature (4)..(179): Homolog of NCBI NO: 15238005 NR Description: glycine/proline-rich protein [Arabidopsis
  misc_feature (1)..(137): Homolog of NCBI NO: 585217 NR Description: GLYCINE RICH PROTEIN A3 >gi|322728|pir||S32123

SEQ ID NO: 104973 - DNA, 1625 bp, Arabidopsis thaliana
  misc_feature (1)..(1625): Ceres Seq. ID no. 13616193
  misc_feature: MA Experiment ID: 108434 Result: Down-regulated in Transcription
  misc_feature: MA Experiment 108434 PARAMETER Experiment Name: At_Root_Tips_cDNA_P Parameter: Tissue Value: Root Tips
  misc_feature: MA Experiment ID: 108435 Result: Up-regulated in Transcription
  misc_feature: MA Experiment 108435 PARAMETER Experiment Name: At_stm_Mutants_cDNA_P Parameter: Plant Line Value: wt Landsburg vs stm
  misc_feature: MA Experiment 108435 PARAMETER Experiment Name: At_stm_Mutants_cDNA_P Parameter: Tissue Value: Shoot Apical Meristem Region
  misc_feature: MA Experiment ID: 108461 Result: Up-regulated in Transcription
  misc_feature: MA Experiment 108461 PARAMETER Experiment Name: At_Germinating_Seeds_cDNA_P Parameter: Age (day) Value: 1 vs. 0
  misc_feature: MA Experiment 108461 PARAMETER Experiment Name: At_Germinating_Seeds_cDNA_P Parameter: Tissue Value: Germinating Seeds
  misc_feature: MA Experiment ID: 108462 Result: Up-regulated in Transcription
  misc_feature: MA Experiment 108462 PARAMETER Experiment Name: At_Germinating_Seeds_cDNA_P Parameter: Age (day) Value: 2 vs. 0
  misc_feature: MA Experiment 108462 PARAMETER Experiment Name: At_Germinating_Seeds_cDNA_P Parameter: Tissue Value: Germinating Seeds
  misc_feature: MA Experiment ID: 108463 Result: Up-regulated in Transcription
  misc_feature: MA Experiment 108463 PARAMETER Experiment Name: At_Germinating_Seeds_cDNA_P Parameter: Age (day) Value: 3 vs. 0
  misc_feature: MA Experiment 108463 PARAMETER Experiment Name: At_Germinating_Seeds_cDNA_P Parameter: Tissue Value: Germinating Seeds
  misc_feature: MA Experiment ID: 108464 Result: Up-regulated in Transcription
  misc_feature: MA Experiment 108464 PARAMETER Experiment Name: At_Germinating_Seeds_cDNA_P Parameter: Age (day) Value: 4 vs. 0
  misc_feature: MA Experiment 108464 PARAMETER Experiment Name: At_Germinating_Seeds_cDNA_P Parameter: Tissue Value: Germinating Seeds
  misc_feature: MA Experiment ID: 108573 Result: Up-regulated in Transcription
  misc_feature: MA Experiment 108573 PARAMETER Experiment Name: At_Drought_cDNA_P Parameter: Timepoint (hr) Value: 6
  misc_feature: MA Experiment 108573 PARAMETER Experiment Name: At_Drought_cDNA_P Parameter: Tissue Value: Aerial
  misc_feature: MA Experiment 108573 PARAMETER Experiment Name: At_Drought_cDNA_P Parameter: Treatment Value: Drought vs. No Drought
  misc_feature: MA Experiment ID: 108574 Result: Down-regulated in Transcription
  misc_feature: MA Experiment 108574 PARAMETER Experiment Name: At_Wounding__cDNA_P Parameter: Timepoint (hr) Value: 1
  misc_feature: MA Experiment 108574 PARAMETER Experiment Name: At_Wounding__cDNA_P Parameter: Tissue Value: Aerial
  misc_feature: MA Experiment 108574 PARAMETER Experiment Name: At_Wounding__cDNA_P Parameter: Treatment Value: Wounding vs. No Wounding
  misc_feature: MA Experiment ID: 108577 Result: Down-regulated in Transcription
  misc_feature: MA Experiment 108577 PARAMETER Experiment Name: At_42deg_Heat_cDNA_P Parameter: Temperature (deg C) Value: 42 vs. 22
  misc_feature: MA Experiment 108577 PARAMETER Experiment Name: At_42deg_Heat_cDNA_P Parameter: Timepoint (hr) Value: 6
  misc_feature: MA Experiment 108577 PARAMETER Experiment Name: At_42deg_Heat_cDNA_P Parameter: Tissue Value: Aerial
  misc_feature: MA Experiment ID: 108579 Result: Down-regulated in Transcription
  misc_feature: MA Experiment 108579 PARAMETER Experiment Name: At_4deg_Cold_cDNA_P Parameter: Temperature (deg C) Value: 4 vs. 22
  misc_feature: MA Experiment 108579 PARAMETER Experiment Name: At_4deg_Cold_cDNA_P Parameter: Timepoint (hr) Value: 6
  misc_feature: MA Experiment 108579 PARAMETER Experiment Name: At_4deg_Cold_cDNA_P Parameter: Tissue Value: Aerial
  misc_feature: MA Experiment ID: 108605 Result: Up-regulated in Transcription
  misc_feature: MA Experiment 108605 PARAMETER Experiment Name: At_100uM_ABA_cDNA_P Parameter: Timepoint (hr) Value: 6
  misc_feature: MA Experiment 108605 PARAMETER Experiment Name: At_100uM_ABA_cDNA_P Parameter: Tissue Value: Aerial
  misc_feature: MA Experiment 108605 PARAMETER Experiment Name: At_100uM_ABA_cDNA_P Parameter: Treatment Value: 100uM ABA vs. No Treatment
  misc_feature: MA Experiment ID: 108608 Result: Down-regulated in Transcription
  misc_feature: MA Experiment 108608 PARAMETER Experiment Name: At_100uM_ABA_cDNA_P Parameter: Timepoint (hr) Value: 1
  misc_feature: MA Experiment 108608 PARAMETER Experiment Name: At_100uM_ABA_cDNA_P Parameter: Tissue Value: Aerial
  misc_feature: MA Experiment 108608 PARAMETER Experiment Name: At_100uM_ABA_cDNA_P Parameter: Treatment Value: 100uM ABA vs. No Treatment
  misc_feature: MA Experiment ID: 20000069 Result: Up-regulated in Transcription
  misc_feature: MA Experiment 20000069 PARAMETER Experiment Name: At_100uM_ABA_Mutants_cDNA_P Parameter: Plant Line Value: CS23
  misc_feature: MA Experiment 20000069 PARAMETER Experiment Name: At_100uM_ABA_Mutants_cDNA_P Parameter: Timepoint (hr) Value: 6
  misc_feature: MA Experiment 20000069 PARAMETER Experiment Name: At_100uM_ABA_Mutants_cDNA_P Parameter: Tissue Value: Aerial
  misc_feature: MA Experiment 20000069 PARAMETER Experiment Name: At_100uM_ABA_Mutants_cDNA_P Parameter: Treatment Value: 100uM ABA vs. No Treatment
  misc_feature: MA Experiment ID: 20000072 Result: Up-regulated in Transcription
  misc_feature: MA Experiment 20000072 PARAMETER Experiment Name: At_100uM_ABA_Mutants_cDNA_P Parameter: Plant Line Value: CS8105
  misc_feature: MA Experiment 20000072 PARAMETER Experiment Name: At_100uM_ABA_Mutants_cDNA_P Parameter: Timepoint (hr) Value: 6
  misc_feature: MA Experiment 20000072 PARAMETER Experiment Name: At_100uM_ABA_Mutants_cDNA_P Parameter: Tissue Value: Aerial
  misc_feature: MA Experiment 20000072 PARAMETER Experiment Name: At_100uM_ABA_Mutants_cDNA_P Parameter: Treatment Value: 100uM ABA vs. No Treatment
  misc_feature: MA Experiment ID: 20000086 Result: Up-regulated in Transcription
  misc_feature: MA Experiment 20000086 PARAMETER Experiment Name: At_100uM_ABA_Mutants_cDNA_P Parameter: Plant Line Value: CS22
  misc_feature: MA Experiment 20000086 PARAMETER Experiment Name: At_100uM_ABA_Mutants_cDNA_P Parameter: Timepoint (hr) Value: 6
  misc_feature: MA Experiment 20000086 PARAMETER Experiment Name: At_100uM_ABA_Mutants_cDNA_P Parameter: Tissue Value: Aerial
  misc_feature: MA Experiment 20000086 PARAMETER Experiment Name: At_100uM_ABA_Mutants_cDNA_P Parameter: Treatment Value: 100uM ABA vs. No Treatment
  misc_feature: MA Experiment ID: 20000088 Result: Up-regulated in Transcription
  misc_feature: MA Experiment 20000088 PARAMETER Experiment Name: At_100uM_ABA_Mutants_cDNA_P Parameter: Plant Line Value: Landsberg
  misc_feature: MA Experiment 20000088 PARAMETER Experiment Name: At_100uM_ABA_Mutants_cDNA_P Parameter: Timepoint (hr) Value: 6
  misc_feature: MA Experiment 20000088 PARAMETER Experiment Name: At_100uM_ABA_Mutants_cDNA_P Parameter: Tissue Value: Aerial
  misc_feature: MA Experiment 20000088 PARAMETER Experiment Name: At_100uM_ABA_Mutants_cDNA_P Parameter: Treatment Value: 100uM ABA vs. No Treatment
  misc_feature: MA Experiment ID: 20000111 Result: Down-regulated in Transcription
  misc_feature: MA Experiment 20000111 PARAMETER Experiment Name: At_42deg_Heat_cDNA_P Parameter: Temperature (deg C) Value: 42 vs. 22
  misc_feature: MA Experiment 20000111 PARAMETER Experiment Name: At_42deg_Heat_cDNA_P Parameter: Timepoint (hr) Value: 6
  misc_feature: MA Experiment 20000111 PARAMETER Experiment Name: At_42deg_Heat_cDNA_P Parameter: Tissue Value: Aerial
  misc_feature: MA Experiment ID: 20000113 Result: Down-regulated in Transcription
  misc_feature: MA Experiment 20000113 PARAMETER Experiment Name: At_42deg_Heat_cDNA_P Parameter: Temperature (deg C) Value: 42 vs. 22
  misc_feature: MA Experiment 20000113 PARAMETER Experiment Name: At_42deg_Heat_cDNA_P Parameter: Timepoint (hr) Value: 8
  misc_feature: MA Experiment 20000113 PARAMETER Experiment Name: At_42deg_Heat_cDNA_P Parameter: Tissue Value: Aerial
  misc_feature: MA Experiment ID: 20000144 Result: Down-regulated in Transcription
  misc_feature: MA Experiment 20000144 PARAMETER Experiment Name: At_42deg_Heat_cDNA_P Parameter: Temperature (deg C) Value: 42 vs. 22
  misc_feature: MA Experiment 20000144 PARAMETER Experiment Name: At_42deg_Heat_cDNA_P Parameter: Timepoint (hr) Value: 1
  misc_feature: MA Experiment 20000144 PARAMETER Experiment Name: At_42deg_Heat_cDNA_P Parameter: Tissue Value: Aerial
  misc_feature: MA Experiment ID: 20000166 Result: Down-regulated in Transcription
  misc_feature: MA Experiment 20000166 PARAMETER Experiment Name: At_100uM_ABA_P Parameter: Age (day) Value: 14
  misc_feature: MA Experiment 20000166 PARAMETER Experiment Name: At_100uM_ABA_P Parameter: Organism Value: A. thaliana
  misc_feature: MA Experiment 20000166 PARAMETER Experiment Name: At_100uM_ABA_P Parameter: Plant Line Value: WS
  misc_feature: MA Experiment 20000166 PARAMETER Experiment Name: At_100uM_ABA_P Parameter: Timepoint (hr) Value: 1
  misc_feature: MA Experiment 20000166 PARAMETER Experiment Name: At_100uM_ABA_P Parameter: Tissue Value: Aerial
  misc_feature: MA Experiment 20000166 PARAMETER Experiment Name: At_100uM_ABA_P Parameter: Treatment Value: 100uM ABA vs. No Treatment
  misc_feature: MA Experiment ID: 20000171 Result: Down-regulated in Transcription
  misc_feature: MA Experiment 20000171 PARAMETER Experiment Name: At_42deg_Heat_P Parameter: Age (day) Value: 14
  misc_feature: MA Experiment 20000171 PARAMETER Experiment Name: At_42deg_Heat_P Parameter: Organism Value: A. thaliana
  misc_feature: MA Experiment 20000171 PARAMETER Experiment Name: At_42deg_Heat_P Parameter: Plant Line Value: WS
  misc_feature: MA Experiment 20000171 PARAMETER Experiment Name: At_42deg_Heat_P Parameter: Temperature (deg C) Value: 42 vs. 22
  misc_feature: MA Experiment 20000171 PARAMETER Experiment Name: At_42deg_Heat_P Parameter: Timepoint (hr) Value: 1
  misc_feature: MA Experiment 20000171 PARAMETER Experiment Name: At_42deg_Heat_P Parameter: Tissue Value: Aerial
  misc_feature: MA Experiment ID: 20000173 Result: Down-regulated in Transcription
  misc_feature: MA Experiment 20000173 PARAMETER Experiment Name: At_42deg_Heat_P Parameter: Age (day) Value: 14
  misc_feature: MA Experiment 20000173 PARAMETER Experiment Name: At_42deg_Heat_P Parameter: Organism Value: A. thaliana
  misc_feature: MA Experiment 20000173 PARAMETER Experiment Name: At_42deg_Heat_P Parameter: Plant Line Value: WS
  misc_feature: MA Experiment 20000173 PARAMETER Experiment Name: At_42deg_Heat_P Parameter: Temperature (deg C) Value: 42 vs. 22
  misc_feature: MA Experiment 20000173 PARAMETER Experiment Name: At_42deg_Heat_P Parameter: Timepoint (hr) Value: 6
  misc_feature: MA Experiment 20000173 PARAMETER Experiment Name: At_42deg_Heat_P Parameter: Tissue Value: Aerial
  misc_feature: MA Experiment ID: 20000184 Result: Down-regulated in Transcription
  misc_feature: MA Experiment 20000184 PARAMETER Experiment Name: At_Shoots__P Parameter: Age (day) Value: 7
  misc_feature: MA Experiment 20000184 PARAMETER Experiment Name: At_Shoots__P Parameter: Tissue Value: Shoots vs. Whole Plant
  misc_feature: MA Experiment ID: 20000185 Result: Down-regulated in Transcription
  misc_feature: MA Experiment 20000185 PARAMETER Experiment Name: At_Roots__P Parameter: Age (day) Value: 7 vs. 21
  misc_feature: MA Experiment 20000185 PARAMETER Experiment Name: At_Roots__P Parameter: Organism Value: A. thaliana
  misc_feature: MA Experiment 20000185 PARAMETER Experiment Name: At_Roots__P Parameter: Tissue Value: Roots vs. Whole Plant
  misc_feature: MA Experiment ID: 20000213 Result: Down-regulated in Transcription
  misc_feature: MA Experiment 20000213 PARAMETER Experiment Name: At_4deg_Cold_P Parameter: Timepoint (hr) Value: 2
  misc_feature: MA Experiment ID: 20000214 Result: Down-regulated in Transcription
  misc_feature: MA Experiment 20000214 PARAMETER Experiment Name: At_4deg_Cold_P Parameter: Timepoint (hr) Value: 6
  misc_feature: MA Experiment ID: 20000234 Result: Down-regulated in Transcription
  misc_feature: MA Experiment 20000234 PARAMETER Experiment Name: At_Siliques_P Parameter: Age (day) Value: 21
  misc_feature: MA Experiment 20000234 PARAMETER Experiment Name: At_Siliques_P Parameter: Organism Value: A. thaliana
  misc_feature: MA Experiment 20000234 PARAMETER Experiment Name: At_Siliques_P Parameter: Plant Line Value: WS
  misc_feature: MA Experiment 20000234 PARAMETER Experiment Name: At_Siliques_P Parameter: Tissue Value: Less Than 5mm Siliques vs. Whole Plant
  misc_feature: MA Experiment ID: 20000265 Result: Down-regulated in Transcription
  misc_feature: MA Experiment 20000265 PARAMETER Experiment Name: At_Open_Flower_P Parameter: Age (day) Value: 21
  misc_feature: MA Experiment 20000265 PARAMETER Experiment Name: At_Open_Flower_P Parameter: Plant Line Value: WS
  misc_feature: MA Experiment 20000265 PARAMETER Experiment Name: At_Open_Flower_P Parameter: Tissue Value: Closed Flower vs. Whole Plant
  misc_feature: MA Experiment ID: 20000286 Result: Down-regulated in Transcription
  misc_feature: MA Experiment 20000286 PARAMETER Experiment Name: At_Open_Flower_P Parameter: Age (day) Value: 21
  misc_feature: MA Experiment 20000286 PARAMETER Experiment Name: At_Open_Flower_P Parameter: Plant Line Value: WS
  misc_feature: MA Experiment 20000286 PARAMETER Experiment Name: At_Open_Flower_P Parameter: Tissue Value: Half Open vs. Whole Plant
  misc_feature: MA Experiment ID: 20000438 Result: Down-regulated in Transcription
  misc_feature: MA Experiment 20000438 PARAMETER Experiment Name: At_Shoots__P Parameter: Age (day) Value: 14
  misc_feature: MA Experiment 20000438 PARAMETER Experiment Name: At_Shoots__P Parameter: Tissue Value: Shoots vs. Whole Plant
  misc_feature: MA Experiment ID: 20000439 Result: Down-regulated in Transcription
  misc_feature: MA Experiment 20000439 PARAMETER Experiment Name: At_Roots__P Parameter: Age (day) Value: 14 vs. 21
  misc_feature: MA Experiment 20000439 PARAMETER Experiment Name: At_Roots__P Parameter: Organism Value: A. thaliana
  misc_feature: MA Experiment 20000439 PARAMETER Experiment Name: At_Roots__P Parameter: Tissue Value: Roots vs. Whole Plant
  misc_feature: MA Experiment ID: 20000495 Result: Down-regulated in Transcription
  misc_feature: MA Experiment 20000495 PARAMETER Experiment Name: At_Guard_Cells_P Parameter: Harvest Date Value: 8/2/2002
  misc_feature: MA Experiment 20000495 PARAMETER Experiment Name: At_Guard_Cells_P Parameter: Organism Value: A. thaliana
  misc_feature: MA Experiment 20000495 PARAMETER Experiment Name: At_Guard_Cells_P Parameter: Tissue Value: Guard Cells vs. Leaves
  misc_feature: MA Experiment ID: 20000573 Result: Up-regulated in Transcription
  misc_feature: MA Experiment 20000573 PARAMETER Experiment Name: At_100uM_ABA_Mutants__P Parameter: Organism Value: A. thaliana
  misc_feature: MA Experiment 20000573 PARAMETER Experiment Name: At_100uM_ABA_Mutants__P Parameter: Plant Line Value: CS22 vs. Ler wt
  misc_feature: MA Experiment 20000573 PARAMETER Experiment Name: At_100uM_ABA_Mutants__P Parameter: Timepoint (hr) Value: N/A
  misc_feature: MA Experiment 20000573 PARAMETER Experiment Name: At_100uM_ABA_Mutants__P Parameter: Tissue Value: Whole Plant
  misc_feature: MA Experiment 20000573 PARAMETER Experiment Name: At_100uM_ABA_Mutants__P Parameter: Treatment Value: None
  misc_feature: MA Experiment ID: 20000794 Result: Up-regulated in Transcription
  misc_feature: MA Experiment 20000794 PARAMETER Experiment Name: At_Petals_P Parameter: Age (day) Value: 23-25 days
  misc_feature: MA Experiment 20000794 PARAMETER Experiment Name: At_Petals_P Parameter: Plant Line Value: WS
  misc_feature: MA Experiment 20000794 PARAMETER Experiment Name: At_Petals_P Parameter: Tissue Value: Petals vs. Whole plant
  misc_feature: MA Experiment ID: 20001560 Result: Down-regulated in Transcription
  misc_feature: MA Experiment 20001560 PARAMETER Experiment Name: At_Drought_Soil_Dry_P Parameter: Age (day) Value: 28
  misc_feature: MA Experiment 20001560 PARAMETER Experiment Name: At_Drought_Soil_Dry_P Parameter: Organism Value: A. thaliana
  misc_feature: MA Experiment 20001560 PARAMETER Experiment Name: At_Drought_Soil_Dry_P Parameter: Plant Line Value: WS
  misc_feature: MA Experiment 20001560 PARAMETER Experiment Name: At_Drought_Soil_Dry_P Parameter: Post Timepoint (hr) Value: None
  misc_feature: MA Experiment 20001560 PARAMETER Experiment Name: At_Drought_Soil_Dry_P Parameter: Post-Treatment Value: None
  misc_feature: MA Experiment 20001560 PARAMETER Experiment Name: At_Drought_Soil_Dry_P Parameter: Timepoint (day) Value: 14
  misc_feature: MA Experiment 20001560 PARAMETER Experiment Name: At_Drought_Soil_Dry_P Parameter: Treatment Value: Drought vs. No Drought
ctgcttccgccattgctcgaaaatcgcgtcttctgacaatgtgctgaaactgagtcatcgtccgagttagcaaagtgaaacttcgaagtttctcttacactaatctcaggtttgggattttgtaagaaaccgcgtttacaaaatgttcaagttgaagcaatggttgatttatttggtgtgttcgttagtaataatgaacacagaaggactgtttgtcaatattacatttgttcgaaacgcagtcgctaaaggggccgtttgtttagatggaagtccaccagcttatcatttggatagaggttctggaactggaatcaatagttggttgatacagcttgagggaggaggatggtgcaataatgtaacaaattgcgttagtcggatgcatactcgattaggttcatcgaagaaaatggtggagaaccttgctttctcagctattcttagcaataagaaacaatataatcctgatttttacaattggaatagagtgaaagttagatactgtgacggggcatcattcacaggagatgtagaagcagtgaaccctgctactaatcttcacttcagaggtgctcgagtttggttagccgttatgcaagagctgctagctaaaggcatgataaacgccgagaatgctgttttgtctggctgttctgctggcgggttagcttcgctgatgcattgtgatagtttccgtgctctattaccgatgggaaccaaagtaaaatgtctttcagatgctggtttttttctcaacacaagagacgtctcaggagttcaatacattaaaacatacttcgaagatgttgttactcttcatggatcagcaaagaacttgccgaggtcatgcacatcaagattaactcctgcaatgtgtttctttccgcaatatgtggctcgccagattagaactcctctgttcattcttaatgccgcttatgactcttggcagataaagaacattttggctccgcgagcagctgatccttacggaaaatggcaaagttgtcaactagacatcaagaattgccatccaagtcagatcaaagttatgcaagatttcaggttagagttcttgagtgcagtgataggtttagggagatcttcatcaagagggatgttcatagattcttgctacactcactgccaaaccgagacacaaacttcatggttctggcaagattctccaattctaaaccgaacgacaatagcaaaagctgttggagattgggtttatgacagaacattgtttcagaagatagattgtccttacccttgtaaccctacttgccaccacagggttttcactcctctagatgctcctccaatttaagtgattctaccatatacagtatagatttattattattttgaaaagaaaatttgcttataaatgattcatttgttagatacatatagtgaaatattcctagggtttagctatagaagatgaaaaagaaaaagagtgtgattaattcttgagtgttgagaataagcaataggagtaattttcttcagcacttgtcttgtgtgctgtttaaattgctctgtttctcttctattctgatgtaaaatgcaaattgttacctttatcctatcaaataaagtataattcttttctc

SEQ ID NO: 104974 - protein, 397 aa, Arabidopsis thaliana
  peptide (1)..(397): Ceres Seq. ID no. 13616194
  misc_feature (11)..(374): Pfam Name: Pectinacetylesterase Pfam Description: Pectinacetylesterase
  misc_feature (1)..(397): Homolog of NCBI NO: 22328797 NR Description: pectinacetylesterase family [Arabidopsis thaliana]
  misc_feature (6)..(397): Homolog of NCBI NO: 7488883 NR Description: pectin acetylesterase (EC 3.1.1.-) precursor - bean >gi|1431629|emb|CAA67728.1| pectinacetylesterase precursor
  misc_feature (68)..(245): Homolog of NCBI NO: 7487998 NR Description: pectin acetylesterase homolog T5K18.200 - thaliana >gi|3080372|emb|CAA18629.1| putative [Arabidopsis thaliana] >gi|7268737|emb|CAB78944.1| putative
  misc_feature (356)..(397): Homolog of NCBI NO: 7487998 NR Description: pectin acetylesterase homolog T5K18.200 - thaliana >gi|3080372|emb|CAA18629.1| putative [Arabidopsis thaliana] >gi|7268737|emb|CAB78944.1| putative
  misc_feature (1)..(38): Homolog of NCBI NO: 7487998 NR Description: pectin acetylesterase homolog T5K18.200 - thaliana >gi|3080372|emb|CAA18629.1| putative [Arabidopsis thaliana] >gi|7268737|emb|CAB78944.1| putative
  misc_feature (1)..(384): Homolog of NCBI NO: 18415308 NR Description: pectinacetylesterase, putative [Arabidopsis >gi|15450902|gb|AAK96722.1| putative pectinacetylesterase protein thaliana] >gi|17978691|gb|AAL47339.1| putative
  misc_feature (6)..(387): Homolog of NCBI NO: 38344147 NR Description: OSJNBa0041A02.14 [Oryza sativa (japonica
  misc_feature (1)..(384): Homolog of NCBI NO: 21593445 NR Description: pectin acetylesterase [Arabidopsis thaliana]
  misc_feature (4)..(384): Homolog of NCBI NO: 15242357 NR Description: pectinacetylesterase, putative [Arabidopsis >gi|10176999|dbj|BAB10249.1| pectin acetylesterase [Arabidopsis >gi|16323123|gb|AAL15296.1| AT5g45280/K9E15_6 [Arabidopsis
  misc_feature (159)..(384): Homolog of NCBI NO: 7488140 NR Description: probable pectin acetylesterase (EC 3.1.1.-) - thaliana >gi|3080371|emb|CAA18628.1| putative protein [Arabidopsis thaliana] >gi|7268736|emb|CAB78943.1|
MFKLKQWLIYLVCSLVIMNTEGLFVNITFVRNAVAKGAVCLDGSPPAYHLDRGSGTGINSWLIQLEGGGWCNNVTNCVSRMHTRLGSSKKMVENLAFSAILSNKKQYNPDFYNWNRVKVRYCDGASFTGDVEAVNPATNLHFRGARVWLAVMQELLAKGMINAENAVLSGCSAGGLASLMHCDSFRALLPMGTKVKCLSDAGFFLNTRDVSGVQYIKTYFEDVVTLHGSAKNLPRSCTSRLTPAMCFFPQYVARQIRTPLFILNAAYDSWQIKNILAPRAADPYGKWQSCQLDIKNCHPSQIKVMQDFRLEFLSAVIGLGRSSSRGMFIDSCYTHCQTETQTSWFWQDSPILNRTTIAKAVGDWVYDRTLFQKIDCPYPCNPTCHHRVFTPLDAPPI

SEQ ID NO: 104975 - protein, 380 aa, Arabidopsis thaliana
  peptide (1)..(380): Ceres Seq. ID no. 13616195
  misc_feature (1)..(357): Pfam Name: Pectinacetylesterase Pfam Description: Pectinacetylesterase
  misc_feature (1)..(380): Homolog of NCBI NO: 22328797 NR Description: pectinacetylesterase family [Arabidopsis thaliana]
  misc_feature (1)..(380): Homolog of NCBI NO: 7488883 NR Description: pectin acetylesterase (EC 3.1.1.-) precursor - bean >gi|1431629|emb|CAA67728.1| pectinacetylesterase precursor
  misc_feature (51)..(228): Homolog of NCBI NO: 7487998 NR Description: pectin acetylesterase homolog T5K18.200 - thaliana >gi|3080372|emb|CAA18629.1| putative [Arabidopsis thaliana] >gi|7268737|emb|CAB78944.1| putative
  misc_feature (339)..(380): Homolog of NCBI NO: 7487998 NR Description: pectin acetylesterase homolog T5K18.200 - thaliana >gi|3080372|emb|CAA18629.1| putative [Arabidopsis thaliana] >gi|7268737|emb|CAB78944.1| putative
  misc_feature (1)..(21): Homolog of NCBI NO: 7487998 NR Description: pectin acetylesterase homolog T5K18.200 - thaliana >gi|3080372|emb|CAA18629.1| putative [Arabidopsis thaliana] >gi|7268737|emb|CAB78944.1| putative
  misc_feature (1)..(367): Homolog of NCBI NO: 18415308 NR Description: pectinacetylesterase, putative [Arabidopsis >gi|15450902|gb|AAK96722.1| putative pectinacetylesterase protein thaliana] >gi|17978691|gb|AAL47339.1| putative
  misc_feature (1)..(370): Homolog of NCBI NO: 38344147 NR Description: OSJNBa0041A02.14 [Oryza sativa (japonica
  misc_feature (1)..(367): Homolog of NCBI NO: 21593445 NR Description: pectin acetylesterase [Arabidopsis thaliana]
  misc_feature (1)..(367): Homolog of NCBI NO: 15242357 NR Description: pectinacetylesterase, putative [Arabidopsis >gi|10176999|dbj|BAB10249.1| pectin acetylesterase [Arabidopsis >gi|16323123|gb|AAL15296.1| AT5g45280/K9E15_6 [Arabidopsis
  misc_feature (142)..(367): Homolog of NCBI NO: 7488140 NR Description: probable pectin acetylesterase (EC 3.1.1.-) - thaliana >gi|3080371|emb|CAA18628.1| putative protein [Arabidopsis thaliana] >gi|7268736|emb|CAB78943.1|
MNTEGLFVNITFVRNAVAKGAVCLDGSPPAYHLDRGSGTGINSWLIQLEGGGWCNNVTNCVSRMHTRLGSSKKMVENLAFSAILSNKKQYNPDFYNWNRVKVRYCDGASFTGDVEAVNPATNLHFRGARVWLAVMQELLAKGMINAENAVLSGCSAGGLASLMHCDSFRALLPMGTKVKCLSDAGFFLNTRDVSGVQYIKTYFEDVVTLHGSAKNLPRSCTSRLTPAMCFFPQYVARQIRTPLFILNAAYDSWQIKNILAPRAADPYGKWQSCQLDIKNCHPSQIKVMQDFRLEFLSAVIGLGRSSSRGMFIDSCYTHCQTETQTSWFWQDSPILNRTTIAKAVGDWVYDRTLFQKIDCPYPCNPTCHHRVFTPLDAPPI

SEQ ID NO: 104976 - protein, 317 aa, Arabidopsis thaliana; identical to SEQ ID NO: 28624
  peptide (1)..(317): Ceres Seq. ID no. 13616196
  misc_feature (1)..(294): Pfam Name: Pectinacetylesterase Pfam Description: Pectinacetylesterase
  misc_feature (1)..(317): Homolog of NCBI NO: 22328797 NR Description: pectinacetylesterase family [Arabidopsis thaliana]
  misc_feature (1)..(317): Homolog of NCBI NO: 7488883 NR Description: pectin acetylesterase (EC 3.1.1.-) precursor - bean >gi|1431629|emb|CAA67728.1| pectinacetylesterase precursor
  misc_feature (1)..(165): Homolog of NCBI NO: 7487998 NR Description: pectin acetylesterase homolog T5K18.200 - thaliana >gi|3080372|emb|CAA18629.1| putative [Arabidopsis thaliana] >gi|7268737|emb|CAB78944.1| putative
  misc_feature (276)..(317): Homolog of NCBI NO: 7487998 NR Description: pectin acetylesterase homolog T5K18.200 - thaliana >gi|3080372|emb|CAA18629.1| putative [Arabidopsis thaliana] >gi|7268737|emb|CAB78944.1| putative
  misc_feature (1)..(304): Homolog of NCBI NO: 18415308 NR Description: pectinacetylesterase, putative [Arabidopsis >gi|15450902|gb|AAK96722.1| putative pectinacetylesterase protein thaliana] >gi|17978691|gb|AAL47339.1| putative
  misc_feature (1)..(307): Homolog of NCBI NO: 38344147 NR Description: OSJNBa0041A02.14 [Oryza sativa (japonica
  misc_feature (1)..(304): Homolog of NCBI NO: 21593445 NR Description: pectin acetylesterase [Arabidopsis thaliana]
  misc_feature (1)..(304): Homolog of NCBI NO: 15242357 NR Description: pectinacetylesterase, putative [Arabidopsis >gi|10176999|dbj|BAB10249.1| pectin acetylesterase [Arabidopsis >gi|16323123|gb|AAL15296.1| AT5g45280/K9E15_6 [Arabidopsis
  misc_feature (79)..(304): Homolog of NCBI NO: 7488140 NR Description: probable pectin acetylesterase (EC 3.1.1.-) - thaliana >gi|3080371|emb|CAA18628.1| putative protein [Arabidopsis thaliana] >gi|7268736|emb|CAB78943.1|
  misc_feature (1)..(57): Homolog of NCBI NO: 7488140 NR Description: probable pectin acetylesterase (EC 3.1.1.-) - thaliana >gi|3080371|emb|CAA18628.1| putative protein [Arabidopsis thaliana] >gi|7268736|emb|CAB78943.1|

SEQ ID NO: 104977 - DNA, 1981 bp, Arabidopsis thaliana
  misc_feature (1)..(1981): Ceres Seq. ID no. 13616205
  misc_feature: MA Experiment ID: 20000184 Result: Down-regulated in Transcription
  misc_feature: MA Experiment 20000184 PARAMETER Experiment Name: At_Shoots__P Parameter: Age (day) Value: 7
  misc_feature: MA Experiment 20000184 PARAMETER Experiment Name: At_Shoots__P Parameter: Tissue Value: Shoots vs. Whole Plant
gttctttcctttctcgcgtttcttctcctagggttagggttcgacgaacgcagctgttccacgcgtttagtttcaattctccatcgaagaagccataatccgattcctaaagagcttacatttgttactcaactttaaagttttgacgctagagattactatcctcttgctgggaactcaacgtgaccagactgtgtttgaaagatagcaatggctggagtattagctggggattgttcattcggtgagagtggtgtttcatcttactccaggaattccaatgaaaagcaggacgaggttgcccgctggtattttggaagaaaagaaattgaagaaaattcaccttcaaggttggatagtattgacttaaagaaggaaacatacctccgcaagtcatactgtacatttttgcaggatttaggcatgagattaaaagttcctcaggttacaatagctaccgcaattatcttctgtcatcgattcttcattcgccagtcacatgctaggaatgacagaaggacgattgctacagtctgcatgttccttgcgggaaaagtggaagaaactcctaggccgttaaaagatgttattgttgtctcctatgagataatacacaagaaggatcctactactgcacagaaaatcaagcaaaaggaagtatatgagcaacaaaaagagcttatactaaatggagaaaagattgtactttctacgctgggatttgacttcaatgtttatcatccttataagcctcttgtagaagcgataaagaaatttaaggtcgcacagaatgctctggcccaagttgcatggaattttgttaacgatggtctgcggacgtcactctgcctgcaatttaagcctcaccacattgcggcgggagcaatttttcttgctgcgaagttccttaaagtgaaattaccatcagatggagagaaggtctggtggcaagaatttgatgtcacacctcgacaactagaggatgttagcaaccaaatgcttgagctctatgagcaaaaccgtgttcctgcatctcaagtaagcgaagtcgaaagtagtgtaggtggaggatcagctcatcatgttgggtctaggccatcagcacgtctaactcatgaacattcaaattctgataatctcgggggctcgacaaaagctacacaaaaccggagcaatgataatgggagtggtgaggcaggtagtgtcatcaccgagcagaagggggaaagagatacagaaacgaaagatagcatgcatactgaaagtcatccagcccataagtctagatcgggagttgaggcacctggggaggataaaatagagaaagcaggtgcacattttccagaagatgataaatctagaattgttggtacagctgatgtcacggtcagccaatccccaaaagacataaaaatgtttagagataaggtgaaggccaaactagaggcgaagaaggtccaaggtgaaaagacgagaaagaaggatttggtggatgaggatgatttgatagaaagagaactggaagacgtggaattagctgttgaggatgacaaagatatacaaaacaaaagctccatgggtacagaacatggcgagattcttgatggaaacaacttggtggtcaataccgaggaaggtgaaatgatagatgatgtttcttcaacaatgcctagccggaagagaaaaatggaaagtccttgtgaaaaacagttaggagaaggaaagagacgacacgacaacagtgagaatgtggaagaaggtcagaagacaaacccaggaggaagtagtcatagttatggtgacagagagccaagaagacactcccaagagaggtagatgatcaaaaccttctcatggtctattagagacatttcccaaccatgatgcgaaatgagtccactgtatttacaatgttggttatcttttcattttccttggcacttgtattcaacagttgagaaactaaatcaggtttccatcc

SEQ ID NO: 104978 - protein, 541 aa, Arabidopsis thaliana
  peptide (1)..(541): Ceres Seq. ID no. 13616206
  misc_feature (30)..(174): Pfam Name: Cyclin, N-terminal domain Pfam Description: Cyclin, N-terminal domain
  misc_feature (1)..(541): Homolog of NCBI NO: 30684822 NR Description: cyclin family [Arabidopsis thaliana]
  misc_feature (1)..(541): Homolog of NCBI NO: 7486085 NR Description: hypothetical protein F24J7.161 - Arabidopsis >gi|4582488|emb|CAB40377.1| putative protein [Arabidopsis >gi|7268756|emb|CAB78962.1| putative protein [Arabidopsis
  misc_feature (1)..(365): Homolog of NCBI NO: 30694715 NR Description: cyclin family [Arabidopsis thaliana]
  misc_feature (1)..(365): Homolog of NCBI NO: 9759604 NR Description: contains similarity to cyclin~gene_id:K18C1.7
  misc_feature (1)..(474): Homolog of NCBI NO: 15235087 NR Description: cyclin family [Arabidopsis thaliana]
  misc_feature (291)..(540): Homolog of NCBI NO: 9759604 NR Description: contains similarity to cyclin~gene_id:K18C1.7
  misc_feature (291)..(540): Homolog of NCBI NO: 30694715 NR Description: cyclin family [Arabidopsis thaliana]
  misc_feature (29)..(272): Homolog of NCBI NO: 15219592 NR Description: cyclin family [Arabidopsis thaliana]
  misc_feature (27)..(271): Homolog of NCBI NO: 15217663 NR Description: cyclin family [Arabidopsis thaliana] Contains similarity to gb|AF113001 silencing mediator of retinoic and thyroid hormone receptor alpha and gb|AF109179 cyclin T1 from
  misc_feature (27)..(271): Homolog of NCBI NO: 21618277 NR Description: putative cyclin [Arabidopsis thaliana]
MAGVLAGDCSFGESGVSSYSRNSNEKQDEVARWYFGRKEIEENSPSRLDSIDLKKETYLRKSYCTFLQDLGMRLKVPQVTIATAIIFCHRFFIRQSHARNDRRTIATVCMFLAGKVEETPRPLKDVIVVSYEIIHKKDPTTAQKIKQKEVYEQQKELILNGEKIVLSTLGFDFNVYHPYKPLVEAIKKFKVAQNALAQVAWNFVNDGLRTSLCLQFKPHHIAAGAIFLAAKFLKVKLPSDGEKVWWQEFDVTPRQLEDVSNQMLELYEQNRVPASQVSEVESSVGGGSAHHVGSRPSARLTHEHSNSDNLGGSTKATQNRSNDNGSGEAGSVITEQKGERDTETKDSMHTESHPAHKSRSGVEAPGEDKIEKAGAHFPEDDKSRIVGTADVTVSQSPKDIKMFRDKVKAKLEAKKVQGEKTRKKDLVDEDDLIERELEDVELAVEDDKDIQNKSSMGTEHGEILDGNNLVVNTEEGEMIDDVSSTMPSRKRKMESPCEKQLGEGKRRHDNSENVEEGQKTNPGGSSHSYGDREPRRHSQER

SEQ ID NO: 104979 - protein, 470 aa, Arabidopsis thaliana
  peptide (1)..(470): Ceres Seq. ID no. 13616207
  misc_feature (1)..(103): Pfam Name: Cyclin, N-terminal domain Pfam Description: Cyclin, N-terminal domain
  misc_feature (1)..(470): Homolog of NCBI NO: 30684822 NR Description: cyclin family [Arabidopsis thaliana]
  misc_feature (1)..(470): Homolog of NCBI NO: 7486085 NR Description: hypothetical protein F24J7.161 - Arabidopsis >gi|4582488|emb|CAB40377.1| putative protein [Arabidopsis >gi|7268756|emb|CAB78962.1| putative protein [Arabidopsis
  misc_feature (1)..(294): Homolog of NCBI NO: 30694715 NR Description: cyclin family [Arabidopsis thaliana]
  misc_feature (1)..(294): Homolog of NCBI NO: 9759604 NR Description: contains similarity to cyclin~gene_id:K18C1.7
  misc_feature (1)..(403): Homolog of NCBI NO: 15235087 NR Description: cyclin family [Arabidopsis thaliana]
  misc_feature (220)..(469): Homolog of NCBI NO: 9759604 NR Description: contains similarity to cyclin~gene_id:K18C1.7
  misc_feature (220)..(469): Homolog of NCBI NO: 30694715 NR Description: cyclin family [Arabidopsis thaliana]
  misc_feature (1)..(201): Homolog of NCBI NO: 15219592 NR Description: cyclin family [Arabidopsis thaliana]
  misc_feature (1)..(200): Homolog of NCBI NO: 15217663 NR Description: cyclin family [Arabidopsis thaliana] Contains similarity to gb|AF113001 silencing mediator of retinoic and thyroid hormone receptor alpha and gb|AF109179 cyclin T1 from
  misc_feature (1)..(200): Homolog of NCBI NO: 21618277 NR Description: putative cyclin [Arabidopsis thaliana]
MRLKVPQVTIATAIIFCHRFFIRQSHARNDRRTIATVCMFLAGKVEETPRPLKDVIVVSYEIIHKKDPTTAQKIKQKEVYEQQKELILNGEKIVLSTLGFDFNVYHPYKPLVEAIKKFKVAQNALAQVAWNFVNDGLRTSLCLQFKPHHIAAGAIFLAAKFLKVKLPSDGEKVWWQEFDVTPRQLEDVSNQMLELYEQNRVPASQVSEVESSVGGGSAHHVGSRPSARLTHEHSNSDNLGGSTKATQNRSNDNGSGEAGSVITEQKGERDTETKDSMHTESHPAHKSRSGVEAPGEDKIEKAGAHFPEDDKSRIVGTADVTVSQSPKDIKMFRDKVKAKLEAKKVQGEKTRKKDLVDEDDLIERELEDVELAVEDDKDIQNKSSMGTEHGEILDGNNLVVNTEEGEMIDDVSSTMPSRKRKMESPCEKQLGEGKRRHDNSENVEEGQKTNPGGSSHSYGDREPRRHSQER

SEQ ID NO: 104980 - protein, 432 aa, Arabidopsis thaliana
  peptide (1)..(432): Ceres Seq. ID no. 13616208
  misc_feature (1)..(65): Pfam Name: Cyclin, N-terminal domain Pfam Description: Cyclin, N-terminal domain
  misc_feature (1)..(432): Homolog of NCBI NO: 30684822 NR Description: cyclin family [Arabidopsis thaliana]
  misc_feature (1)..(432): Homolog of NCBI NO: 7486085 NR Description: hypothetical protein F24J7.161 - Arabidopsis >gi|4582488|emb|CAB40377.1| putative protein [Arabidopsis >gi|7268756|emb|CAB78962.1| putative protein [Arabidopsis
  misc_feature (1)..(256): Homolog of NCBI NO: 30694715 NR Description: cyclin family [Arabidopsis thaliana]
  misc_feature (1)..(256): Homolog of NCBI NO: 9759604 NR Description: contains similarity to cyclin~gene_id:K18C1.7
  misc_feature (1)..(365): Homolog of NCBI NO: 15235087 NR Description: cyclin family [Arabidopsis thaliana]
  misc_feature (182)..(431): Homolog of NCBI NO: 9759604 NR Description: contains similarity to cyclin~gene_id:K18C1.7
  misc_feature (182)..(431): Homolog of NCBI NO: 30694715 NR Description: cyclin family [Arabidopsis thaliana]
  misc_feature (1)..(163): Homolog of NCBI NO: 15219592 NR Description: cyclin family [Arabidopsis thaliana]
  misc_feature (1)..(162): Homolog of NCBI NO: 15217663 NR Description: cyclin family [Arabidopsis thaliana] Contains similarity to gb|AF113001 silencing mediator of retinoic and thyroid hormone receptor alpha and gb|AF109179 cyclin T1 from
  misc_feature (1)..(162): Homolog of NCBI NO: 21618277 NR Description: putative cyclin [Arabidopsis thaliana]
MFLAGKVEETPRPLKDVIVVSYEIIHKKDPTTAQKIKQKEVYEQQKELILNGEKIVLSTLGFDFNVYHPYKPLVEAIKKFKVAQNALAQVAWNFVNDGLRTSLCLQFKPHHIAAGAIFLAAKFLKVKLPSDGEKVWWQEFDVTPRQLEDVSNQMLELYEQNRVPASQVSEVESSVGGGSAHHVGSRPSARLTHEHSNSDNLGGSTKATQNRSNDNGSGEAGSVITEQKGERDTETKDSMHTESHPAHKSRSGVEAPGEDKIEKAGAHFPEDDKSRIVGTADVTVSQSPKDIKMFRDKVKAKLEAKKVQGEKTRKKDLVDEDDLIERELEDVELAVEDDKDIQNKSSMGTEHGEILDGNNLVVNTEEGEMIDDVSSTMPSRKRKMESPCEKQLGEGKRRHDNSENVEEGQKTNPGGSSHSYGDREPRRHSQER

SEQ ID NO: 104981 - DNA, 1156 bp, Arabidopsis thaliana
  misc_feature (1)..(1156): Ceres Seq. ID no. 13616224
  misc_feature: MA Experiment ID: 20001450 Result: Up-regulated in Transcription
  misc_feature: MA Experiment 20001450 PARAMETER Experiment Name: At_Far-red-induction_P Parameter: Age (day) Value: 7
  misc_feature: MA Experiment 20001450 PARAMETER Experiment Name: At_Far-red-induction_P Parameter: Light Value: Far-red vs. White
  misc_feature: MA Experiment 20001450 PARAMETER Experiment Name: At_Far-red-induction_P Parameter: Organism Value: A. thaliana
  misc_feature: MA Experiment 20001450 PARAMETER Experiment Name: At_Far-red-induction_P Parameter: Plant Line Value: Columbia
  misc_feature: MA Experiment 20001450 PARAMETER Experiment Name: At_Far-red-induction_P Parameter: Timepoint (hr) Value: 8
  misc_feature: MA Experiment 20001450 PARAMETER Experiment Name: At_Far-red-induction_P Parameter: Tissue Value: Whole Plant
agaatcagttcatccatggaaacagcgtcgagagtggaactgattgttaaaggcaacttaccggagttccttctcagtacaatccagccaaccggaagctcgacctaatctcccattaccacggcgatgaagcttcgatcccaaccgtcgatctctcgagctccgattccgcgagagaagccatcggtgaccttgtcgcgactggggagccttccacgtaatcaaccatggtgttccaatccatctccttgatcggatgaggtctttaggtctctctttcttccaagactctcccatggaagagaagctacgttacgcctgcgactctacctccgccgcatctgaaggttacggtagccgtatgttgcttggtgctaaagatgacgtcgttttggattggagagattactttgatcatcacacgtttccttcctctcgtcgtaacccttctcattggccgattcatccttctgactacagacaagttgttggagaatatggtgatgagatgaagaaactagctcagatgctattagggctaatctcagagagtttgggtcttccttgttcatctatagaagaagcagtaggtgaaatctatcagaacattactgtaaccaattaccctccttgtcctcagcctgacctcactcttggtcttcagtctcattccgattttggtgccattactctcttgattcaagatgatgttgaaggtcttcagctttacaaggatgctcaatggctcactgttcctcctatctctgatgctattctcattcttattgccgatcaaaccgagatcattaccaatggaagatacaaaagtgctcaacatagagctgtgactaatgcgaatcgggcgcggttatcagtcgctacctttcatgatccctccaagactgcaaggatagcaccagtttctcaactctccccaccgtcttacaaggaagttgtgtatggtcaatatgtttcttcctggtactctaaaggtcctgagggtaaacgaaacctcgatgctcttctctactaagtttatgctaatgagtatgtggacgccaattgccacggctgaaaagtggtttcacaatagtggctgtaaaaactcaaaagacacaaacgataaataataataaactgaatgaatcctagtcgc

SEQ ID NO: 104982 - protein, 258 aa, Arabidopsis thaliana
  peptide (1)..(258): Ceres Seq. ID no. 13616225
  misc_feature (114)..(213): Pfam Name: 2OG-Fe(II) oxygenase superfamily Pfam Description: 2OG-Fe(II) oxygenase superfamily
  misc_feature (1)..(258): Homolog of NCBI NO: 20260150 NR Description: strong similarity to naringenin 3-dioxygenase
  misc_feature (1)..(258): Homolog of NCBI NO: 18414636 NR Description: oxidoreductase, 2OG-Fe(II) oxygenase family
  misc_feature (14)..(258): Homolog of NCBI NO: 7433202 NR Description: hypothetical protein - Arabidopsis thaliana
  misc_feature (14)..(258): Homolog of NCBI NO: 21593639 NR Description: naringenin 3-dioxygenase like protein
  misc_feature (1)..(257): Homolog of NCBI NO: 11045078 NR Description: naringenin 3-dioxygenase like protein [Brassica
  misc_feature (1)..(257): Homolog of NCBI NO: 34898354 NR Description: Similar to leucoanthocyanidin
  misc_feature (1)..(257): Homolog of NCBI NO: 15224472 NR Description: oxidoreductase, 2OG-Fe(II) oxygenase family
  misc_feature (1)..(257): Homolog of NCBI NO: 21554535 NR Description: putative anthocyanidin synthase [Arabidopsis
  misc_feature (1)..(255): Homolog of NCBI NO: 15229694 NR Description: oxidoreductase, 2OG-Fe(II) oxygenase family thaliana] >gi|6016680|gb|AAF01507.1|AC009991_3 putative dioxygenase [Arabidopsis thaliana]
  misc_feature (1)..(182): Homolog of NCBI NO: 34907994 NR Description: leucoanthocyanidin dioxygenase-like protein
MRSLGLSFFQDSPMEEKLRYACDSTSAASEGYGSRMLLGAKDDVVLDWRDYFDHHTFPSSRRNPSHWPIHPSDYRQVVGEYGDEMKKLAQMLLGLISESLGLPCSSIEEAVGEIYQNITVTNYPPCPQPDLTLGLQSHSDFGAITLLIQDDVEGLQLYKDAQWLTVPPISDAILILIADQTEIITNGRYKSAQHRAVTNANRARLSVATFHDPSKTARIAPVSQLSPPSYKEVVYGQYVSSWYSKGPEGKRNLDALLY

SEQ ID NO: 104983 - protein, 245 aa, Arabidopsis thaliana
  peptide (1)..(245): Ceres Seq. ID no. 13616226
  misc_feature (101)..(200): Pfam Name: 2OG-Fe(II) oxygenase superfamily Pfam Description: 2OG-Fe(II) oxygenase superfamily
  misc_feature (1)..(245): Homolog of NCBI NO: 20260150 NR Description: strong similarity to naringenin 3-dioxygenase
  misc_feature (1)..(245): Homolog of NCBI NO: 18414636 NR Description: oxidoreductase, 2OG-Fe(II) oxygenase family
  misc_feature (1)..(245): Homolog of NCBI NO: 7433202 NR Description: hypothetical protein - Arabidopsis thaliana
  misc_feature (1)..(245): Homolog of NCBI NO: 21593639 NR Description: naringenin 3-dioxygenase like protein
  misc_feature (1)..(244): Homolog of NCBI NO: 11045078 NR Description: naringenin 3-dioxygenase like protein [Brassica
  misc_feature (1)..(244): Homolog of NCBI NO: 34898354 NR Description: Similar to leucoanthocyanidin
  misc_feature (1)..(244): Homolog of NCBI NO: 15224472 NR Description: oxidoreductase, 2OG-Fe(II) oxygenase family
  misc_feature (1)..(244): Homolog of NCBI NO: 21554535 NR Description: putative anthocyanidin synthase [Arabidopsis
  misc_feature (1)..(242): Homolog of NCBI NO: 15229694 NR Description: oxidoreductase, 2OG-Fe(II) oxygenase family thaliana] >gi|6016680|gb|AAF01507.1|AC009991_3 putative dioxygenase [Arabidopsis thaliana]
  misc_feature (1)..(169): Homolog of NCBI NO: 34907994 NR Description: leucoanthocyanidin dioxygenase-like protein
MEEKLRYACDSTSAASEGYGSRMLLGAKDDVVLDWRDYFDHHTFPSSRRNPSHWPIHPSDYRQVVGEYGDEMKKLAQMLLGLISESLGLPCSSIEEAVGEIYQNITVTNYPPCPQPDLTLGLQSHSDFGAITLLIQDDVEGLQLYKDAQWLTVPPISDAILILIADQTEIITNGRYKSAQHRAVTNANRARLSVATFHDPSKTARIAPVSQLSPPSYKEVVYGQYVSSWYSKGPEGKRNLDALLY

SEQ ID NO: 104984 - protein, 223 aa, Arabidopsis thaliana
  peptide (1)..(223): Ceres Seq. ID no. 13616227
  misc_feature (79)..(178): Pfam Name: 2OG-Fe(II) oxygenase superfamily Pfam Description: 2OG-Fe(II) oxygenase superfamily
  misc_feature (1)..(223): Homolog of NCBI NO: 20260150 NR Description: strong similarity to naringenin 3-dioxygenase
  misc_feature (1)..(223): Homolog of NCBI NO: 18414636 NR Description: oxidoreductase, 2OG-Fe(II) oxygenase family
  misc_feature (1)..(223): Homolog of NCBI NO: 7433202 NR Description: hypothetical protein - Arabidopsis thaliana
  misc_feature (1)..(223): Homolog of NCBI NO: 21593639 NR Description: naringenin 3-dioxygenase like protein
  misc_feature (1)..(222): Homolog of NCBI NO: 11045078 NR Description: naringenin 3-dioxygenase like protein [Brassica
  misc_feature (1)..(222): Homolog of NCBI NO: 34898354 NR Description: Similar to leucoanthocyanidin
  misc_feature (1)..(222): Homolog of NCBI NO: 15224472 NR Description: oxidoreductase, 2OG-Fe(II) oxygenase family
  misc_feature (1)..(222): Homolog of NCBI NO: 21554535 NR Description: putative anthocyanidin synthase [Arabidopsis
  misc_feature (1)..(220): Homolog of NCBI NO: 15229694 NR Description: oxidoreductase, 2OG-Fe(II) oxygenase family thaliana] >gi|6016680|gb|AAF01507.1|AC009991_3 putative dioxygenase [Arabidopsis thaliana]
  misc_feature (1)..(147): Homolog of NCBI NO: 34907994 NR Description: leucoanthocyanidin dioxygenase-like protein
MLLGAKDDVVLDWRDYFDHHTFPSSRRNPSHWPIHPSDYRQVVGEYGDEMKKLAQMLLGLISESLGLPCSSIEEAVGEIYQNITVTNYPPCPQPDLTLGLQSHSDFGAITLLIQDDVEGLQLYKDAQWLTVPPISDAILILIADQTEIITNGRYKSAQHRAVTNANRARLSVATFHDPSKTARIAPVSQLSPPSYKEVVYGQYVSSWYSKGPEGKRNLDALLY

SEQ ID NO: 104985 - DNA, 1624 bp, Arabidopsis thaliana
  misc_feature (1)..(1624): Ceres Seq. ID no. 13616228
  misc_feature: MA Experiment ID: 108434 Result: Up-regulated in Transcription
  misc_feature: MA Experiment 108434 PARAMETER Experiment Name: At_Root_Tips_cDNA_P Parameter: Tissue Value: Root Tips
  misc_feature: MA Experiment ID: 108576 Result: Down-regulated in Transcription
  misc_feature: MA Experiment 108576 PARAMETER Experiment Name: At_42deg_Heat_cDNA_P Parameter: Temperature (deg C) Value: 42 vs. 22
  misc_feature: MA Experiment 108576 PARAMETER Experiment Name: At_42deg_Heat_cDNA_P Parameter: Timepoint (hr) Value: 1
  misc_feature: MA Experiment 108576 PARAMETER Experiment Name: At_42deg_Heat_cDNA_P Parameter: Tissue Value: Aerial
  misc_feature: MA Experiment ID: 20000069 Result: Down-regulated in Transcription
  misc_feature: MA Experiment 20000069 PARAMETER Experiment Name: At_100uM_ABA_Mutants_cDNA_P Parameter: Plant Line Value: CS23
  misc_feature: MA Experiment 20000069 PARAMETER Experiment Name: At_100uM_ABA_Mutants_cDNA_P Parameter: Timepoint (hr) Value: 6
  misc_feature: MA Experiment 20000069 PARAMETER Experiment Name: At_100uM_ABA_Mutants_cDNA_P Parameter: Tissue Value: Aerial
  misc_feature: MA Experiment 20000069 PARAMETER Experiment Name: At_100uM_ABA_Mutants_cDNA_P Parameter: Treatment Value: 100uM ABA vs. No Treatment
  misc_feature: MA Experiment ID: 20000087 Result: Down-regulated in Transcription
  misc_feature: MA Experiment 20000087 PARAMETER Experiment Name: At_100uM_ABA_Mutants_cDNA_P Parameter: Plant Line Value: WS
  misc_feature: MA Experiment 20000087 PARAMETER Experiment Name: At_100uM_ABA_Mutants_cDNA_P Parameter: Timepoint (hr) Value: 6
  misc_feature: MA Experiment 20000087 PARAMETER Experiment Name: At_100uM_ABA_Mutants_cDNA_P Parameter: Tissue Value: Aerial
  misc_feature: MA Experiment 20000087 PARAMETER Experiment Name: At_100uM_ABA_Mutants_cDNA_P Parameter: Treatment Value: 100uM ABA vs. No Treatment
  misc_feature: MA Experiment ID: 20000111 Result: Down-regulated in Transcription
  misc_feature: MA Experiment 20000111 PARAMETER Experiment Name: At_42deg_Heat_cDNA_P Parameter: Temperature (deg C) Value: 42 vs. 22
  misc_feature: MA Experiment 20000111 PARAMETER Experiment Name: At_42deg_Heat_cDNA_P Parameter: Timepoint (hr) Value: 6
  misc_feature: MA Experiment 20000111 PARAMETER Experiment Name: At_42deg_Heat_cDNA_P Parameter: Tissue Value: Aerial
  misc_feature: MA Experiment ID: 20000171 Result: Down-regulated in Transcription
  misc_feature: MA Experiment 20000171 PARAMETER Experiment Name: At_42deg_Heat_P Parameter: Age (day) Value: 14
  misc_feature: MA Experiment 20000171 PARAMETER Experiment Name: At_42deg_Heat_P Parameter: Organism Value: A. thaliana
  misc_feature: MA Experiment 20000171 PARAMETER Experiment Name: At_42deg_Heat_P Parameter: Plant Line Value: WS
  misc_feature: MA Experiment 20000171 PARAMETER Experiment Name: At_42deg_Heat_P Parameter: Temperature (deg C) Value: 42 vs. 22
  misc_feature: MA Experiment 20000171 PARAMETER Experiment Name: At_42deg_Heat_P Parameter: Timepoint (hr) Value: 1
  misc_feature: MA Experiment 20000171 PARAMETER Experiment Name: At_42deg_Heat_P Parameter: Tissue Value: Aerial
  misc_feature: MA Experiment ID: 20000173 Result: Down-regulated in Transcription
  misc_feature: MA Experiment 20000173 PARAMETER Experiment Name: At_42deg_Heat_P Parameter: Age (day) Value: 14
  misc_feature: MA Experiment 20000173 PARAMETER Experiment Name: At_42deg_Heat_P Parameter: Organism Value: A. thaliana
  misc_feature: MA Experiment 20000173 PARAMETER Experiment Name: At_42deg_Heat_P Parameter: Plant Line Value: WS
  misc_feature: MA Experiment 20000173 PARAMETER Experiment Name: At_42deg_Heat_P Parameter: Temperature (deg C) Value: 42 vs. 22
  misc_feature: MA Experiment 20000173 PARAMETER Experiment Name: At_42deg_Heat_P Parameter: Timepoint (hr) Value: 6
  misc_feature: MA Experiment 20000173 PARAMETER Experiment Name: At_42deg_Heat_P Parameter: Tissue Value: Aerial
  misc_feature: MA Experiment ID: 20000264 Result: Up-regulated in Transcription
  misc_feature: MA Experiment 20000264 PARAMETER Experiment Name: At_Open_Flower_P Parameter: Age (day) Value: 21
  misc_feature: MA Experiment 20000264 PARAMETER Experiment Name: At_Open_Flower_P Parameter: Plant Line Value: WS
  misc_feature: MA Experiment 20000264 PARAMETER Experiment Name: At_Open_Flower_P Parameter: Tissue Value: Open Flower vs. Whole Plant
  misc_feature: MA Experiment ID: 20000286 Result: Up-regulated in Transcription
  misc_feature: MA Experiment 20000286 PARAMETER Experiment Name: At_Open_Flower_P Parameter: Age (day) Value: 21
  misc_feature: MA Experiment 20000286 PARAMETER Experiment Name: At_Open_Flower_P Parameter: Plant Line Value: WS
  misc_feature: MA Experiment 20000286 PARAMETER Experiment Name: At_Open_Flower_P Parameter: Tissue Value: Half Open vs. Whole Plant
  misc_feature: MA Experiment ID: 20000794 Result: Up-regulated in Transcription
  misc_feature: MA Experiment 20000794 PARAMETER Experiment Name: At_Petals_P Parameter: Age (day) Value: 23-25 days
  misc_feature: MA Experiment 20000794 PARAMETER Experiment Name: At_Petals_P Parameter: Plant Line Value: WS
  misc_feature: MA Experiment 20000794 PARAMETER Experiment Name: At_Petals_P Parameter: Tissue Value: Petals vs. Whole plant
  misc_feature: MA Experiment ID: 20001911 Result: Down-regulated in Transcription
  misc_feature: MA Experiment 20001911 PARAMETER Experiment Name: At_Drought_Reproduction_P Parameter: Age (day) Value: 40
  misc_feature: MA Experiment 20001911 PARAMETER Experiment Name: At_Drought_Reproduction_P Parameter: Organism Value: A. thaliana
  misc_feature: MA Experiment 20001911 PARAMETER Experiment Name: At_Drought_Reproduction_P Parameter: Plant Line Value: WS
  misc_feature: MA Experiment 20001911 PARAMETER Experiment Name: At_Drought_Reproduction_P Parameter: Timepoint (day) Value: 10
  misc_feature: MA Experiment 20001911 PARAMETER Experiment Name: At_Drought_Reproduction_P Parameter: Tissue Value: Flowers
  misc_feature: MA Experiment 20001911 PARAMETER Experiment Name: At_Drought_Reproduction_P Parameter: Treatment Value: Drought vs. No Drought
aattgatgctatgacaaacaacaacagcaagaaatttgtgtgagagtagagagtcttgcttcagttgaatcaaagattggtcctttttttttcgttttctctttcctgctttttttgtttgtagtttctgatctctcaggaaggctttttataaatttgccctcaatttctccgtccctactactctttttgatcaatttctacgggaaaaagcaccaatctttaaacccgggcatgtccttgtaatcgagtatgttgtgtaagtgatgaatttgtggtgagatctggtgagaagtttcctcttttttctcagattgcggtaaaaaaaaagagtttttaataaggaagagattgagattagattttatcgcttttgtttgtgtgatatgggtaacgtgaacgccaaaagaaaaccgaaatagtaacaacgcttctgctgttgaaagacgaagacgctgagatttgttcctcgtgaagctatgtctgctgcttctgatggtaaccatgtcgctcctcctgagcttatgggtcaatctcctcctcatagccctcgagctactcagtctcctctcatgtttgctcctcaggttccggtgcttccacttcaaagacctgatgaaattcatatccctaatccttcgtggatgcaatcgccatcttcgttgtatgaagaagcttctaacgaacaaggaatccctacgatgatcacttggtgtcatggaggcaaggagattgctgtggagggatcatgggataattggaagacaagaagtcggctgcagagatctgggaaggacttcactatcatgaaagtgttaccttcaggagtctatgagtacaggttcattgtggatggacagtggaggcatgcccctgagctccccttagctagagatgatgctgggaacactttcaacattttggatcttcaggactatgttcctgaagacattcaaagcatatctgggtttgaccctccgcaatctccagagaatagttacagcaacttgcttctcggagctgaggactactctaaagaaccgcctgtggttcccccgcacctacaaatgacactgctgaacttgccggcagccaatcctgacattccatctccgctgccgagacctcagcatgtcattctcaatcatctttacatgcagaagggcaaaagtggtccttctgtggttgcgcttggttccactcaccgatttctagcaaagtatgtaactgtggtgctctacaaatccctgcagaggtgagtgaagatgatgcaattccaatgggtagttagcatgtggatcctcggcatgctcttatctattttggtgttaaaacgttaactcatggagtatgggtgaggctatatagaaaggagacacacgaagagagttatttccaggcaaagtattccctcgatacagcgaattttgttgtctttaaaagttgtcaataaggtttaccaacagaatgaagatgcagtattcagtcagtgtctgtgtaatcttttgatttgaagacttcatcatctgttttttttttagcatagaagaatgcaggaacgacttcacttgtaaaaccggcaaatcttttttatggttttgttttggggctttcaagttttcac

SEQ ID NO: 104986 - protein, 259 aa, Arabidopsis thaliana
  peptide (1)..(259): Ceres Seq. ID no. 13616229
  misc_feature (0)..(0): Pfam Name: 5'-AMP-activated protein kinase, beta subunit, Pfam Description: 5'-AMP-activated protein kinase, beta subunit,
  misc_feature (1)..(259): Homolog of NCBI NO: 6686784 NR Description: AKIN beta2 [Arabidopsis thaliana]
  misc_feature (1)..(259): Homolog of NCBI NO: 15234895 NR Description: kinase like protein [Arabidopsis thaliana]
  misc_feature (1)..(259): Homolog of NCBI NO: 32364488 NR Description: AKIN beta2 [Medicago truncatula]
  misc_feature (32)..(259): Homolog of NCBI NO: 11935162 NR Description: SNF1-related kinase complex anchoring protein
  misc_feature (8)..(259): Homolog of NCBI NO: 5702015 NR Description: GAL83 protein [Solanum tuberosum]
  misc_feature (9)..(259): Homolog of NCBI NO: 32364486 NR Description: AKIN beta1 [Medicago truncatula]
  misc_feature (9)..(259): Homolog of NCBI NO: 15242175 NR Description: AMPKBI (5'-AMP-activated protein kinase, beta
  misc_feature (9)..(259): Homolog of NCBI NO: 6686782 NR Description: AKIN gamma [Arabidopsis thaliana]
  misc_feature (8)..(217): Homolog of NCBI NO: 29725558 NR Description: SNF1 kinase complex anchoring protein
  misc_feature (36)..(259): Homolog of NCBI NO: 32364492 NR Description: AKIN beta4 [Medicago truncatula]
MSAASDGNHVAPPELMGQSPPHSPRATQSPLMFAPQVPVLPLQRPDEIHIPNPSWMQSPSSLYEEASNEQGIPTMITWCHGGKEIAVEGSWDNWKTRSRLQRSGKDFTIMKVLPSGVYEYRFIVDGQWRHAPELPLARDDAGNTFNILDLQDYVPEDIQSISGFDPPQSPENSYSNLLLGAEDYSKEPPVVPPHLQMTLLNLPAANPDIPSPLPRPQHVILNHLYMQKGKSGPSVVALGSTHRFLAKYVTVVLYKSLQR

SEQ ID NO: 104987 - protein, 244 aa, Arabidopsis thaliana
  peptide (1)..(244): Ceres Seq. ID no. 13616230
  misc_feature (0)..(0): Pfam Name: 5'-AMP-activated protein kinase, beta subunit, Pfam Description: 5'-AMP-activated protein kinase, beta subunit,
  misc_feature (1)..(244): Homolog of NCBI NO: 6686784 NR Description: AKIN beta2 [Arabidopsis thaliana]
  misc_feature (1)..(244): Homolog of NCBI NO: 15234895 NR Description: kinase like protein [Arabidopsis thaliana]
  misc_feature (1)..(244): Homolog of NCBI NO: 32364488 NR Description: AKIN beta2 [Medicago truncatula]
  misc_feature (17)..(244): Homolog of NCBI NO: 11935162 NR Description: SNF1-related kinase complex anchoring protein
  misc_feature (1)..(244): Homolog of NCBI NO: 5702015 NR Description: GAL83 protein [Solanum tuberosum]
  misc_feature (1)..(244): Homolog of NCBI NO: 32364486 NR Description: AKIN beta1 [Medicago truncatula]
  misc_feature (1)..(244): Homolog of NCBI NO: 15242175 NR Description: AMPKBI (5'-AMP-activated protein kinase, beta
  misc_feature (1)..(244): Homolog of NCBI NO: 6686782 NR Description: AKIN gamma [Arabidopsis thaliana]
  misc_feature (1)..(202): Homolog of NCBI NO: 29725558 NR Description: SNF1 kinase complex anchoring protein
  misc_feature (21)..(244): Homolog of NCBI NO: 32364492 NR Description: AKIN beta4 [Medicago truncatula]
MGQSPPHSPRATQSPLMFAPQVPVLPLQRPDEIHIPNPSWMQSPSSLYEEASNEQGIPTMITWCHGGKEIAVEGSWDNWKTRSRLQRSGKDFTIMKVLPSGVYEYRFIVDGQWRHAPELPLARDDAGNTFNILDLQDYVPEDIQSISGFDPPQSPENSYSNLLLGAEDYSKEPPVVPPHLQMTLLNLPAANPDIPSPLPRPQHVILNHLYMQKGKSGPSVVALGSTHRFLAKYVTVVLYKSLQR

SEQ ID NO: 104988 - protein, 228 aa, Arabidopsis thaliana
  peptide (1)..(228): Ceres Seq. ID no. 13616231
  misc_feature (0)..(0): Pfam Name: 5'-AMP-activated protein kinase, beta subunit, Pfam Description: 5'-AMP-activated protein kinase, beta subunit,
  misc_feature (1)..(228): Homolog of NCBI NO: 6686784 NR Description: AKIN beta2 [Arabidopsis thaliana]
  misc_feature (1)..(228): Homolog of NCBI NO: 15234895 NR Description: kinase like protein [Arabidopsis thaliana]
  misc_feature (1)..(228): Homolog of NCBI NO: 32364488 NR Description: AKIN beta2 [Medicago truncatula]
  misc_feature (1)..(228): Homolog of NCBI NO: 11935162 NR Description: SNF1-related kinase complex anchoring protein
  misc_feature (1)..(228): Homolog of NCBI NO: 5702015 NR Description: GAL83 protein [Solanum tuberosum]
  misc_feature (1)..(228): Homolog of NCBI NO: 32364486 NR Description: AKIN beta1 [Medicago truncatula]
  misc_feature (1)..(228): Homolog of NCBI NO: 15242175 NR Description: AMPKBI (5'-AMP-activated protein kinase, beta
  misc_feature (1)..(228): Homolog of NCBI NO: 6686782 NR Description: AKIN gamma [Arabidopsis thaliana]
  misc_feature (1)..(186): Homolog of NCBI NO: 29725558 NR Description: SNF1 kinase complex anchoring protein
  misc_feature (5)..(228): Homolog of NCBI NO: 32364492 NR Description: AKIN beta4 [Medicago truncatula]
MFAPQVPVLPLQRPDEIHIPNPSWMQSPSSLYEEASNEQGIPTMITWCHGGKEIAVEGSWDNWKTRSRLQRSGKDFTIMKVLPSGVYEYRFIVDGQWRHAPELPLARDDAGNTFNILDLQDYVPEDIQSISGFDPPQSPENSYSNLLLGAEDYSKEPPVVPPHLQMTLLNLPAANPDIPSPLPRPQHVILNHLYMQKGKSGPSVVALGSTHRFLAKYVTVVLYKSLQR

SEQ ID NO: 104989 - DNA, 2843 bp, Arabidopsis thaliana
  misc_feature (1)..(2843): Ceres Seq. ID no. 13616241
  misc_feature: MA Experiment ID: 20000169 Result: Down-regulated in Transcription
  misc_feature: MA Experiment 20000169 PARAMETER Experiment Name: At_100uM_ABA_P Parameter: Age (day) Value: 14
  misc_feature: MA Experiment 20000169 PARAMETER Experiment Name: At_100uM_ABA_P Parameter: Organism Value: A. thaliana
  misc_feature: MA Experiment 20000169 PARAMETER Experiment Name: At_100uM_ABA_P Parameter: Plant Line Value: WS
  misc_feature: MA Experiment 20000169 PARAMETER Experiment Name: At_100uM_ABA_P Parameter: Timepoint (hr) Value: 6
  misc_feature: MA Experiment 20000169 PARAMETER Experiment Name: At_100uM_ABA_P Parameter: Tissue Value: Aerial
  misc_feature: MA Experiment 20000169 PARAMETER Experiment Name: At_100uM_ABA_P Parameter: Treatment Value: 100uM ABA vs. No Treatment
  misc_feature: MA Experiment ID: 20000179 Result: Down-regulated in Transcription
  misc_feature: MA Experiment 20000179 PARAMETER Experiment Name: At_Germinating_Seeds_P Parameter: Age (hr) Value: 6 vs. 0
  misc_feature: MA Experiment 20000179 PARAMETER Experiment Name: At_Germinating_Seeds_P Parameter: Tissue Value: Germinating Seeds
  misc_feature: MA Experiment ID: 20000180 Result: Down-regulated in Transcription
  misc_feature: MA Experiment 20000180 PARAMETER Experiment Name: At_Germinating_Seeds_P Parameter: Age (hr) Value: 24 vs. 0
  misc_feature: MA Experiment 20000180 PARAMETER Experiment Name: At_Germinating_Seeds_P Parameter: Tissue Value: Germinating Seeds
  misc_feature: MA Experiment ID: 20000184 Result: Down-regulated in Transcription
  misc_feature: MA Experiment 20000184 PARAMETER Experiment Name: At_Shoots__P Parameter: Age (day) Value: 7
  misc_feature: MA Experiment 20000184 PARAMETER Experiment Name: At_Shoots__P Parameter: Tissue Value: Shoots vs. Whole Plant
  misc_feature: MA Experiment ID: 20000227 Result: Up-regulated in Transcription
  misc_feature: MA Experiment 20000227 PARAMETER Experiment Name: At_Root-Tips-vs-Tops_P Parameter: Tissue Value: Root Tips vs. Root Tops
  misc_feature: MA Experiment ID: 20000234 Result: Up-regulated in Transcription
  misc_feature: MA Experiment 20000234 PARAMETER Experiment Name: At_Siliques_P Parameter: Age (day) Value: 21
  misc_feature: MA Experiment 20000234 PARAMETER Experiment Name: At_Siliques_P Parameter: Organism Value: A. thaliana
  misc_feature: MA Experiment 20000234 PARAMETER Experiment Name: At_Siliques_P Parameter: Plant Line Value: WS
  misc_feature: MA Experiment 20000234 PARAMETER Experiment Name: At_Siliques_P Parameter: Tissue Value: Less Than 5mm Siliques vs. Whole Plant
  misc_feature: MA Experiment ID: 20000264 Result: Up-regulated in Transcription
  misc_feature: MA Experiment 20000264 PARAMETER Experiment Name: At_Open_Flower_P Parameter: Age (day) Value: 21
  misc_feature: MA Experiment 20000264 PARAMETER Experiment Name: At_Open_Flower_P Parameter: Plant Line Value: WS
  misc_feature: MA Experiment 20000264 PARAMETER Experiment Name: At_Open_Flower_P Parameter: Tissue Value: Open Flower vs. Whole Plant
  misc_feature: MA Experiment ID: 20000438 Result: Down-regulated in Transcription
  misc_feature: MA Experiment 20000438 PARAMETER Experiment Name: At_Shoots__P Parameter: Age (day) Value: 14
  misc_feature: MA Experiment 20000438 PARAMETER Experiment Name: At_Shoots__P Parameter: Tissue Value: Shoots vs. Whole Plant
  misc_feature: MA Experiment ID: 20000794 Result: Up-regulated in Transcription
  misc_feature: MA Experiment 20000794 PARAMETER Experiment Name: At_Petals_P Parameter: Age (day) Value: 23-25 days
  misc_feature: MA Experiment 20000794 PARAMETER Experiment Name: At_Petals_P Parameter: Plant Line Value: WS
  misc_feature: MA Experiment 20000794 PARAMETER Experiment Name: At_Petals_P Parameter: Tissue Value: Petals vs. Whole plant
  misc_feature: MA Experiment ID: 20001248 Result: Up-regulated in Transcription
  misc_feature: MA Experiment 20001248 PARAMETER Experiment Name: At_Far-red-induction_P Parameter: Age (day) Value: 7
  misc_feature: MA Experiment 20001248 PARAMETER Experiment Name: At_Far-red-induction_P Parameter: Light Value: Far-red vs. White
  misc_feature: MA Experiment 20001248 PARAMETER Experiment Name: At_Far-red-induction_P Parameter: Organism Value: A. thaliana
  misc_feature: MA Experiment 20001248 PARAMETER Experiment Name: At_Far-red-induction_P Parameter: Plant Line Value: Columbia
  misc_feature: MA Experiment 20001248 PARAMETER Experiment Name: At_Far-red-induction_P Parameter: Timepoint (hr) Value: 4
  misc_feature: MA Experiment 20001248 PARAMETER Experiment Name: At_Far-red-induction_P Parameter: Tissue Value: Whole Plant
  misc_feature: MA Experiment ID: 20001556 Result: Up-regulated in Transcription
  misc_feature: MA Experiment 20001556 PARAMETER Experiment Name: At_Drought_Soil_Dry_P Parameter: Age (day) Value: 26
  misc_feature: MA Experiment 20001556 PARAMETER Experiment Name: At_Drought_Soil_Dry_P Parameter: Organism Value: A. thaliana
  misc_feature: MA Experiment 20001556 PARAMETER Experiment Name: At_Drought_Soil_Dry_P Parameter: Plant Line Value: WS
  misc_feature: MA Experiment 20001556 PARAMETER Experiment Name: At_Drought_Soil_Dry_P Parameter: Post Timepoint (hr) Value: None
  misc_feature: MA Experiment 20001556 PARAMETER Experiment Name: At_Drought_Soil_Dry_P Parameter: Post-Treatment Value: None
  misc_feature: MA Experiment 20001556 PARAMETER Experiment Name: At_Drought_Soil_Dry_P Parameter: Timepoint (day) Value: 12
  misc_feature: MA Experiment 20001556 PARAMETER Experiment Name: At_Drought_Soil_Dry_P Parameter: Treatment Value: Drought vs. No Drought
  misc_feature: MA Experiment ID: 20001557 Result: Up-regulated in Transcription
  misc_feature: MA Experiment 20001557 PARAMETER Experiment Name: At_Drought_Soil_Dry_P Parameter: Age (day) Value: 27
  misc_feature: MA Experiment 20001557 PARAMETER Experiment Name: At_Drought_Soil_Dry_P Parameter: Organism Value: A. thaliana
  misc_feature: MA Experiment 20001557 PARAMETER Experiment Name: At_Drought_Soil_Dry_P Parameter: Plant Line Value: WS
  misc_feature: MA Experiment 20001557 PARAMETER Experiment Name: At_Drought_Soil_Dry_P Parameter: Post Timepoint (hr) Value: 3
  misc_feature: MA Experiment 20001557 PARAMETER Experiment Name: At_Drought_Soil_Dry_P Parameter: Post-Treatment Value: Re-Water vs. No Drought
  misc_feature: MA Experiment 20001557 PARAMETER Experiment Name: At_Drought_Soil_Dry_P Parameter: Timepoint (day) Value: 13
  misc_feature: MA Experiment 20001557 PARAMETER Experiment Name: At_Drought_Soil_Dry_P Parameter: Treatment Value: Drought vs. No Drought
  misc_feature: MA Experiment ID: 20001558 Result: Up-regulated in Transcription
  misc_feature: MA Experiment 20001558 PARAMETER Experiment Name: At_Drought_Soil_Dry_P Parameter: Age (day) Value: 27
  misc_feature: MA Experiment 20001558 PARAMETER Experiment Name: At_Drought_Soil_Dry_P Parameter: Organism Value: A. thaliana
  misc_feature: MA Experiment 20001558 PARAMETER Experiment Name: At_Drought_Soil_Dry_P Parameter: Plant Line Value: WS
  misc_feature: MA Experiment 20001558 PARAMETER Experiment Name: At_Drought_Soil_Dry_P Parameter: Post Timepoint (hr) Value: 6
  misc_feature: MA Experiment 20001558 PARAMETER Experiment Name: At_Drought_Soil_Dry_P Parameter: Post-Treatment Value: Re-Water vs. No Drought
  misc_feature: MA Experiment 20001558 PARAMETER Experiment Name: At_Drought_Soil_Dry_P Parameter: Timepoint (day) Value: 13
  misc_feature: MA Experiment 20001558 PARAMETER Experiment Name: At_Drought_Soil_Dry_P Parameter: Treatment Value: Drought vs. No Drought
  misc_feature: MA Experiment ID: 20001560 Result: Up-regulated in Transcription
  misc_feature: MA Experiment 20001560 PARAMETER Experiment Name: At_Drought_Soil_Dry_P Parameter: Age (day) Value: 28
  misc_feature: MA Experiment 20001560 PARAMETER Experiment Name: At_Drought_Soil_Dry_P Parameter: Organism Value: A. thaliana
  misc_feature: MA Experiment 20001560 PARAMETER Experiment Name: At_Drought_Soil_Dry_P Parameter: Plant Line Value: WS
  misc_feature: MA Experiment 20001560 PARAMETER Experiment Name: At_Drought_Soil_Dry_P Parameter: Post Timepoint (hr) Value: None
  misc_feature: MA Experiment 20001560 PARAMETER Experiment Name: At_Drought_Soil_Dry_P Parameter: Post-Treatment Value: None
  misc_feature: MA Experiment 20001560 PARAMETER Experiment Name: At_Drought_Soil_Dry_P Parameter: Timepoint (day) Value: 14
  misc_feature: MA Experiment 20001560 PARAMETER Experiment Name: At_Drought_Soil_Dry_P Parameter: Treatment Value: Drought vs. No Drought
  misc_feature: MA Experiment ID: 20001911 Result: Up-regulated in Transcription
  misc_feature: MA Experiment 20001911 PARAMETER Experiment Name: At_Drought_Reproduction_P Parameter: Age (day) Value: 40
  misc_feature: MA Experiment 20001911 PARAMETER Experiment Name: At_Drought_Reproduction_P Parameter: Organism Value: A. thaliana
  misc_feature: MA Experiment 20001911 PARAMETER Experiment Name: At_Drought_Reproduction_P Parameter: Plant Line Value: WS
  misc_feature: MA Experiment 20001911 PARAMETER Experiment Name: At_Drought_Reproduction_P Parameter: Timepoint (day) Value: 10
  misc_feature: MA Experiment 20001911 PARAMETER Experiment Name: At_Drought_Reproduction_P Parameter: Tissue Value: Flowers
  misc_feature: MA Experiment 20001911 PARAMETER Experiment Name: At_Drought_Reproduction_P Parameter: Treatment Value: Drought vs. No Drought
tttctttaacatcattatacaaagttacaacaacttgaaaaaattaattatataagcccattaaatcttgtatcataagcccagcccaaagttataaacttttcaaaatgcaaggagctaaaaaacaagttggttttgttggtttcaaatcaaaccaaaccgtttttttaagattacgaatcgaatggtttatttttgctaaatcggttcggttttttctccagacctattagtaaacctcttgcttcgattaggcggtcgtctctctgaaattttctgaaacctcttaaaccctagcaatgccgtcgagtttcttctttgaggatgctagtgacgacgagctcgaattaatacgcaatcaagaggacagtagtgaggaagacgtaaaggaaggcgaagcagaagagcatgaagctggagaagacgaagatggagaagaggaatatgaagaagaagatgacgacgaagaagaagaagatgagaagcggaaacgagatgctgatgctcaatctccttgggattttgcatcttactcaagctccgttggtgaagaacacgcccgccgtcacacaacgtctattgatgaaaagatctctaaagctattcagcatcgtccagttcccatttcaataaatgaagaagaagaagaggaagaagaagaagaagatgcctccgatgctgaaactgacaaacaagaggagtatctttcggaagacgatgaggcagctgagtacaaaccagaagatgctactcccaagccgttcttctctacagtggatggagtttcatttcatgctgatactttcatggagcttaatctctctcgtccattgcttcgagcttgtgaaactctcggatacaagaaacctactccgattcaggcagcttgtatacctttagcacttacagggcgtgatctttgtgccagtgccatcactgggtcagggaagactgctgcattcgctttacctactcttgagaggttgctgttccgtcccaagcgggtctttgctactagagttcttattctcactccgactagggagttggccgtccagattcacagtatgattcagaatcttgcacagtttactgatatcaagtgtggattgattgtaggagggctttctgtaagggagcaagaggtggttctgaggtctatgccagatattgttgtggcgactcctggacgtatgatagatcatttgcgtaattctatgtctgttgatttggatgatctagcggttttaatccttgatgaggcagaccgccttctacagactgggtttgccactgaaatcacagagctggttcgcttatgtcccaagagaaggcaaacaatgctcttctcagccacaatgactgaagaagttaaagagctagtcaaactttccttgaacaaaccgttgcggctctcagctgatccatcagctagaaggccaccaggcttgactgaggaggtggtaagaatacgcaggactcgtgaggcaaatcaggaagctgttcttctatcattgtgcacaaggacttttaaatcaaaagtcattatctttagtggaacaaaacaagctgcacatagactgaaaattttattcggattagctggcctcaaagcagctgagcttcatggaaacctaactcaagcacaacgtcttgattctctggagcttttcagaaagcaggaggtcgattttctcattgctaccgatgtagccgctcgaggacttgacatcattggtgttcaaacagttataaattatgcttgtcctcgggaaatagacagttatgttcacagagttggtagaacagctagggctggaagggaaggttatgctgtaacgtttgtgactgatagtgaccgatcccttttgaaagtcattgcaaagaaggtgggttcaaagttgaagagccgagtcatcccagagcagtcaatcgtcaagtggtctcagataatcgatgaaatggaagatcaatattccgctgttatttcagcagagagggatgagcgagctctaaggaaagctgaaatggaatttgcaaaggcggagaacatgcttgagcacagagatgaaatatatgcacgcccaaaaaggacttggttcatgacagagaaggagaagaagctcgtggcacaggctgaaaaggattctgcagggaaccctgctggaggcgaactagttagtgctgatagagcagaggacctcaagatgaaggagaagagaaaacgtgaacgcgagaagaatcttcctaggaaaaaacgtagaaagctagaagctgccagagagatgctagaagataacgaaggagaagaagaggaagaagacgaagaaggagacgaaaagagaggaagatcaagagggaaagacaagaaaaaacaggagacagataagaagggattgacactaaaggatcttggttacatgagagcaaaagcggtgaaagcaaaacagagagcaattgattccggtaagatggagagaccaaagccggacaagaaacaaagccggagtaaaccaagaaaccagcctcgtggtgaagagatgaaagatctgttcaagagtgatatgggcgagaagaaacagggcagaggcggtgccgcggctgcagcaaaacctcggacgaagtcgaagaactcattcaagagcaaagccagatataagcgtaggtaaaaggaaaaagcatttttgagaagatatcgaaggacaatcccacgagaagaaggacatttcattgagaagggtttaaacaatttaaattattgttgtaatatcataatttagaacaaaactggttaagatgttcgaaattttgttttctttgtcctatggtttttataatctttc

SEQ ID NO: 104990 - protein, 789 aa, Arabidopsis thaliana; identical to SEQ ID NO: 100733
  peptide (1)..(789): Ceres Seq. ID no. 13616242
  misc_feature (180)..(388): Pfam Name: DEAD/DEAH box helicase Pfam Description: DEAD/DEAH box helicase
  misc_feature (20)..(651): Homolog of NCBI NO: 7485103 NR Description: hypothetical protein - Arabidopsis thaliana RNA helicase like protein [Arabidopsis thaliana]
  misc_feature (16)..(699): Homolog of NCBI NO: 32403416 NR Description: hypothetical protein [Neurospora crassa]
  misc_feature (88)..(700): Homolog of NCBI NO: 13274192 NR Description: dJ686N3.1 (novel ATP dependent RNA helicase
  misc_feature (88)..(700): Homolog of NCBI NO: 19743937 NR Description: DEAD/H (Asp-Glu-Ala-Asp/His) box polypeptide 27;
  misc_feature (88)..(700): Homolog of NCBI NO: 29427946 NR Description: Probable ATP-dependent RNA helicase DDX27
  misc_feature (12)..(66): Homolog of NCBI NO: 13274192 NR Description: dJ686N3.1 (novel ATP dependent RNA helicase
  misc_feature (12)..(66): Homolog of NCBI NO: 29427946 NR Description: Probable ATP-dependent RNA helicase DDX27
  misc_feature (12)..(66): Homolog of NCBI NO: 19743937 NR Description: DEAD/H (Asp-Glu-Ala-Asp/His) box polypeptide 27;
  misc_feature (88)..(700): Homolog of NCBI NO: 32425487 NR Description: Unknown (protein for IMAGE:4128730) [Homo sapiens]
  misc_feature (12)..(66): Homolog of NCBI NO: 32425487 NR Description: Unknown (protein for IMAGE:4128730) [Homo sapiens]

SEQ ID NO: 104991 - protein, 620 aa, Arabidopsis thaliana; identical to SEQ ID NO: 100734
  peptide (1)..(620): Ceres Seq. ID no. 13616243
  misc_feature (11)..(219): Pfam Name: DEAD/DEAH box helicase Pfam Description: DEAD/DEAH box helicase
  misc_feature (1)..(482): Homolog of NCBI NO: 7485103 NR Description: hypothetical protein - Arabidopsis thaliana RNA helicase like protein [Arabidopsis thaliana]
  misc_feature (1)..(530): Homolog of NCBI NO: 32403416 NR Description: hypothetical protein [Neurospora crassa]
  misc_feature (1)..(531): Homolog of NCBI NO: 13274192 NR Description: dJ686N3.1 (novel ATP dependent RNA helicase
  misc_feature (1)..(531): Homolog of NCBI NO: 19743937 NR Description: DEAD/H (Asp-Glu-Ala-Asp/His) box polypeptide 27;
  misc_feature (1)..(531): Homolog of NCBI NO: 29427946 NR Description: Probable ATP-dependent RNA helicase DDX27
  misc_feature (1)..(531): Homolog of NCBI NO: 32425487 NR Description: Unknown (protein for IMAGE:4128730) [Homo sapiens]
  misc_feature (1)..(531): Homolog of NCBI NO: 16359192 NR Description: DDX27 protein [Homo sapiens]
  misc_feature (1)..(531): Homolog of NCBI NO: 40225538 NR Description: DDX27 protein [Homo sapiens]
  misc_feature (1)..(531): Homolog of NCBI NO: 10434683 NR Description: unnamed protein product [Homo sapiens]
  misc_feature (1)..(531): Homolog of NCBI NO: 15422163 NR Description: RNA helicase-like protein [Homo sapiens]

SEQ ID NO: 104992 - protein, 533 aa, Arabidopsis thaliana; identical to SEQ ID NO: 100735
  peptide (1)..(533): Ceres Seq. ID no. 13616244
  misc_feature (1)..(132): Pfam Name: DEAD/DEAH box helicase Pfam Description: DEAD/DEAH box helicase
  misc_feature (1)..(395): Homolog of NCBI NO: 7485103 NR Description: hypothetical protein - Arabidopsis thaliana RNA helicase like protein [Arabidopsis thaliana]
  misc_feature (1)..(443): Homolog of NCBI NO: 32403416 NR Description: hypothetical protein [Neurospora crassa]
  misc_feature (1)..(444): Homolog of NCBI NO: 13274192 NR Description: dJ686N3.1 (novel ATP dependent RNA helicase
  misc_feature (1)..(444): Homolog of NCBI NO: 29427946 NR Description: Probable ATP-dependent RNA helicase DDX27
  misc_feature (1)..(444): Homolog of NCBI NO: 19743937 NR Description: DEAD/H (Asp-Glu-Ala-Asp/His) box polypeptide 27;
  misc_feature (1)..(444): Homolog of NCBI NO: 32425487 NR Description: Unknown (protein for IMAGE:4128730) [Homo sapiens]
  misc_feature (1)..(444): Homolog of NCBI NO: 16359192 NR Description: DDX27 protein [Homo sapiens]
  misc_feature (1)..(444): Homolog of NCBI NO: 40225538 NR Description: DDX27 protein [Homo sapiens]
  misc_feature (1)..(444): Homolog of NCBI NO: 10434683 NR Description: unnamed protein product [Homo sapiens]
  misc_feature (1)..(444): Homolog of NCBI NO: 15422163 NR Description: RNA helicase-like protein [Homo sapiens]

SEQ ID NO: 104993 - DNA, 1251 bp, Arabidopsis thaliana
  misc_feature (1)..(1251): Ceres Seq. ID no. 13616245
  misc_feature: MA Experiment ID: 20001756 Result: Down-regulated in Transcription
  misc_feature: MA Experiment 20001756 PARAMETER Experiment Name: At_50mM_NH4NO3_L-to-H_P Parameter: Timepoint (hr) Value: 4
  misc_feature: MA Experiment 20001756 PARAMETER Experiment Name: At_50mM_NH4NO3_L-to-H_P Parameter: Tissue Value: Leaf
  misc_feature: MA Experiment 20001756 PARAMETER Experiment Name: At_50mM_NH4NO3_L-to-H_P Parameter: Treatment Value: 50mM NH4NO3 vs 100mM Mannitol
  misc_feature: MA Experiment ID: 20001757 Result: Down-regulated in Transcription
  misc_feature: MA Experiment 20001757 PARAMETER Experiment Name: At_50mM_NH4NO3_L-to-H_P Parameter: Timepoint (hr) Value: 6
  misc_feature: MA Experiment 20001757 PARAMETER Experiment Name: At_50mM_NH4NO3_L-to-H_P Parameter: Tissue Value: Leaf
  misc_feature: MA Experiment 20001757 PARAMETER Experiment Name: At_50mM_NH4NO3_L-to-H_P Parameter: Treatment Value: 50mM NH4NO3 vs 100mM Mannitol
  misc_feature: MA Experiment ID: 20001761 Result: Down-regulated in Transcription
  misc_feature: MA Experiment 20001761 PARAMETER Experiment Name: At_50mM_NH4NO3_L-to-H_P Parameter: Timepoint (hr) Value: 4
  misc_feature: MA Experiment 20001761 PARAMETER Experiment Name: At_50mM_NH4NO3_L-to-H_P Parameter: Tissue Value: Siliques
  misc_feature: MA Experiment 20001761 PARAMETER Experiment Name: At_50mM_NH4NO3_L-to-H_P Parameter: Treatment Value: 50mM NH4NO3 vs 100mM Mannitol
  misc_feature: MA Experiment ID: 20001904 Result: Up-regulated in Transcription
  misc_feature: MA Experiment 20001904 PARAMETER Experiment Name: At_Drought_Reproduction_P Parameter: Age (day) Value: 37
  misc_feature: MA Experiment 20001904 PARAMETER Experiment Name: At_Drought_Reproduction_P Parameter: Organism Value: A. thaliana
  misc_feature: MA Experiment 20001904 PARAMETER Experiment Name: At_Drought_Reproduction_P Parameter: Plant Line Value: WS
  misc_feature: MA Experiment 20001904 PARAMETER Experiment Name: At_Drought_Reproduction_P Parameter: Timepoint (day) Value: 7
  misc_feature: MA Experiment 20001904 PARAMETER Experiment Name: At_Drought_Reproduction_P Parameter: Tissue Value: Rosettes
  misc_feature: MA Experiment 20001904 PARAMETER Experiment Name: At_Drought_Reproduction_P Parameter: Treatment Value: Drought vs. No Drought
  misc_feature: MA Experiment ID: 20001905 Result: Up-regulated in Transcription
  misc_feature: MA Experiment 20001905 PARAMETER Experiment Name: At_Drought_Reproduction_P Parameter: Age (day) Value: 40
  misc_feature: MA Experiment 20001905 PARAMETER Experiment Name: At_Drought_Reproduction_P Parameter: Organism Value: A. thaliana
  misc_feature: MA Experiment 20001905 PARAMETER Experiment Name: At_Drought_Reproduction_P Parameter: Plant Line Value: WS
  misc_feature: MA Experiment 20001905 PARAMETER Experiment Name: At_Drought_Reproduction_P Parameter: Timepoint (day) Value: 10
  misc_feature: MA Experiment 20001905 PARAMETER Experiment Name: At_Drought_Reproduction_P Parameter: Tissue Value: Rosettes
  misc_feature: MA Experiment 20001905 PARAMETER Experiment Name: At_Drought_Reproduction_P Parameter: Treatment Value: Drought vs. No Drought
  misc_feature: MA Experiment ID: 20001906 Result: Up-regulated in Transcription
  misc_feature: MA Experiment 20001906 PARAMETER Experiment Name: At_Drought_Reproduction_P Parameter: Age (day) Value: 35
  misc_feature: MA Experiment 20001906 PARAMETER Experiment Name: At_Drought_Reproduction_P Parameter: Organism Value: A. thaliana
  misc_feature: MA Experiment 20001906 PARAMETER Experiment Name: At_Drought_Reproduction_P Parameter: Plant Line Value: WS
  misc_feature: MA Experiment 20001906 PARAMETER Experiment Name: At_Drought_Reproduction_P Parameter: Timepoint (day) Value: 5
  misc_feature: MA Experiment 20001906 PARAMETER Experiment Name: At_Drought_Reproduction_P Parameter: Tissue Value: Siliques
  misc_feature: MA Experiment 20001906 PARAMETER Experiment Name: At_Drought_Reproduction_P Parameter: Treatment Value: Drought vs. No Drought
  misc_feature: MA Experiment ID: 20001908 Result: Up-regulated in Transcription
  misc_feature: MA Experiment 20001908 PARAMETER Experiment Name: At_Drought_Reproduction_P Parameter: Age (day) Value: 40
  misc_feature: MA Experiment 20001908 PARAMETER Experiment Name: At_Drought_Reproduction_P Parameter: Organism Value: A. thaliana
  misc_feature: MA Experiment 20001908 PARAMETER Experiment Name: At_Drought_Reproduction_P Parameter: Plant Line Value: WS
  misc_feature: MA Experiment 20001908 PARAMETER Experiment Name: At_Drought_Reproduction_P Parameter: Timepoint (day) Value: 10
  misc_feature: MA Experiment 20001908 PARAMETER Experiment Name: At_Drought_Reproduction_P Parameter: Tissue Value: Siliques
  misc_feature: MA Experiment 20001908 PARAMETER Experiment Name: At_Drought_Reproduction_P Parameter: Treatment Value: Drought vs. No Drought
  misc_feature: MA Experiment ID: 20001911 Result: Down-regulated in Transcription
  misc_feature: MA Experiment 20001911 PARAMETER Experiment Name: At_Drought_Reproduction_P Parameter: Age (day) Value: 40
  misc_feature: MA Experiment 20001911 PARAMETER Experiment Name: At_Drought_Reproduction_P Parameter: Organism Value: A. thaliana
  misc_feature: MA Experiment 20001911 PARAMETER Experiment Name: At_Drought_Reproduction_P Parameter: Plant Line Value: WS
  misc_feature: MA Experiment 20001911 PARAMETER Experiment Name: At_Drought_Reproduction_P Parameter: Timepoint (day) Value: 10
  misc_feature: MA Experiment 20001911 PARAMETER Experiment Name: At_Drought_Reproduction_P Parameter: Tissue Value: Flowers
  misc_feature: MA Experiment 20001911 PARAMETER Experiment Name: At_Drought_Reproduction_P Parameter: Treatment Value: Drought vs. No Drought
acgcaggcaaatgtctcgtaatttaatctatagaagaaacagagctctctgttttgttttaatcttgttctgcttcccttaccggtttggcgctagaaacacgccggaggcggaacaatccacagcaaaagcaactcaaataatacacgtcagcaattccacgtggcatgatttctctcgtcttgtagatgtccaaataggtagccacgtcagcggcgtatcagagctcaaaagatacctccaccgattcggttacgtcaatgatggctccgaaatattttccgacgtgttcgatggtcctctggaatcggcaatctctctgtatcaagaaaatctcggtttaccaataaccggaagactcgacacgagtacagttactctcatgtcgttaccgcgatgtggcgttagcgatacgcacatgaccatcaacaacgatttcctccacacaacggcgcattatacgtatttcaacggtaaaccgaaatggaaccgtgatacgctaacctacgctatctccaaaactcacaaactcgattacttgacgtcagaagacgtcaaaaccgttttccggcgagctttttcacagtggtcaagcgtgattccggtgagtttcgaggaagtcgacgatttcacgacggctgatttaaagatcggattctacgctggtgatcacggtgacgggcttccgtttgacggtgtacttggaactttagcacacgcttttgcgccggagaacgggaggcttcacctcgacgcggcggagacgtggatcgtcgacgatgacttgaaaggatcttcagaggtggccgttgacttggagtctgtggcgactcacgagatcggtcacttgttgggattaggacatagctcgcaggagtcggcggttatgtatccgagtctccgaccgaggaccaagaaagttgaccttacggttgatgacgtggcaggtgtacttaagctatatggtccgaatcctaaactacggttggattcactaacgcagtcggaagattctattaaaaacggcaccgtatcacatagattcttgtcggggaattttatcggttatgttctgttggttgttggtttgattcttttcctataggtttataggcataaaaaatactgtttttattcatttatttttaattaaatgtacatatatttttcaactatgtaaatgtaaatatatagttgaacaaaaaaagatgtacatatatagttaggcttataattaggtttatggtcttg

SEQ ID NO: 104994 - protein, 367 aa, Arabidopsis thaliana
  peptide (1)..(367): Ceres Seq. ID no. 13616246
  misc_feature (155)..(261): Pfam Name: Matrixin Pfam Description: Matrixin
  misc_feature (4)..(367): Homolog of NCBI NO: 15235820 NR Description: proteinase like protein [Arabidopsis thaliana]
  misc_feature (4)..(367): Homolog of NCBI NO: 28393482 NR Description: putative proteinase [Arabidopsis thaliana]
  misc_feature (4)..(367): Homolog of NCBI NO: 21553383 NR Description: proteinase like protein [Arabidopsis thaliana]
  misc_feature (47)..(352): Homolog of NCBI NO: 37536782 NR Description: putative metalloproteinase [Oryza sativa cultivar- group)] >gi|14165321|gb|AAK55453.1| putative
  misc_feature (73)..(367): Homolog of NCBI NO: 15225398 NR Description: metallo proteinase -related [Arabidopsis thaliana]
  misc_feature (73)..(367): Homolog of NCBI NO: 25455788 NR Description: metalloproteinase (EC 3.4.24.-) [imported] - thaliana >gi|3128477|gb|AAC31167.1| metalloproteinase
  misc_feature (40)..(325): Homolog of NCBI NO: 15223067 NR Description: matrix metallo proteinase -related [Arabidopsis
  misc_feature (14)..(367): Homolog of NCBI NO: 15218963 NR Description: metallo proteinase -related [Arabidopsis >gi|4249376|gb|AAD14473.1|AAD14473 Strong similarity to F3I6.6 zinc metalloproteinase homolog from Arabidopsis thaliana
  misc_feature (49)..(367): Homolog of NCBI NO: 7488435 NR Description: zinc metalloproteinase homolog F3I6.6 - thaliana >gi|2829864|gb|AAC00572.1| similar to zinc
  misc_feature (49)..(367): Homolog of NCBI NO: 30688744 NR Description: metallo proteinase -related [Arabidopsis thaliana]
RRQMSRNLIYRRNRALCFVLILFCFPYRFGARNTPEAEQSTAKATQIIHVSNSTWHDFSRLVDVQIGSHVSGVSELKRYLHRFGYVNDGSEIFSDVFDGPLESAISLYQENLGLPITGRLDTSTVTLMSLPRCGVSDTHMTINNDFLHTTAHYTYFNGKPKWNRDTLTYAISKTHKLDYLTSEDVKTVFRRAFSQWSSVIPVSFEEVDDFTTADLKIGFYAGDHGDGLPFDGVLGTLAHAFAPENGRLHLDAAETWIVDDDLKGSSEVAVDLESVATHEIGHLLGLGHSSQESAVMYPSLRPRTKKVDLTVDDVAGVLKLYGPNPKLRLDSLTQSEDSIKNGTVSHRFLSGNFIGYVLLVVGLILFL

SEQ ID NO: 104995 - protein, 364 aa, Arabidopsis thaliana
  peptide (1)..(364): Ceres Seq. ID no. 13616247
  misc_feature (152)..(258): Pfam Name: Matrixin Pfam Description: Matrixin
  misc_feature (1)..(364): Homolog of NCBI NO: 15235820 NR Description: proteinase like protein [Arabidopsis thaliana]
  misc_feature (1)..(364): Homolog of NCBI NO: 28393482 NR Description: putative proteinase [Arabidopsis thaliana]
  misc_feature (1)..(364): Homolog of NCBI NO: 21553383 NR Description: proteinase like protein [Arabidopsis thaliana]
  misc_feature (44)..(349): Homolog of NCBI NO: 37536782 NR Description: putative metalloproteinase [Oryza sativa cultivar- group)] >gi|14165321|gb|AAK55453.1| putative
  misc_feature (70)..(364): Homolog of NCBI NO: 15225398 NR Description: metallo proteinase -related [Arabidopsis thaliana]
  misc_feature (70)..(364): Homolog of NCBI NO: 25455788 NR Description: metalloproteinase (EC 3.4.24.-) [imported] - thaliana >gi|3128477|gb|AAC31167.1| metalloproteinase
  misc_feature (37)..(322): Homolog of NCBI NO: 15223067 NR Description: matrix metallo proteinase -related [Arabidopsis
  misc_feature (11)..(364): Homolog of NCBI NO: 15218963 NR Description: metallo proteinase -related [Arabidopsis >gi|4249376|gb|AAD14473.1|AAD14473 Strong similarity to F3I6.6 zinc metalloproteinase homolog from Arabidopsis thaliana
  misc_feature (46)..(364): Homolog of NCBI NO: 7488435 NR Description: zinc metalloproteinase homolog F3I6.6 - thaliana >gi|2829864|gb|AAC00572.1| similar to zinc
  misc_feature (46)..(364): Homolog of NCBI NO: 30688744 NR Description: metallo proteinase -related [Arabidopsis thaliana]
MSRNLIYRRNRALCFVLILFCFPYRFGARNTPEAEQSTAKATQIIHVSNSTWHDFSRLVDVQIGSHVSGVSELKRYLHRFGYVNDGSEIFSDVFDGPLESAISLYQENLGLPITGRLDTSTVTLMSLPRCGVSDTHMTINNDFLHTTAHYTYFNGKPKWNRDTLTYAISKTHKLDYLTSEDVKTVFRRAFSQWSSVIPVSFEEVDDFTTADLKIGFYAGDHGDGLPFDGVLGTLAHAFAPENGRLHLDAAETWIVDDDLKGSSEVAVDLESVATHEIGHLLGLGHSSQESAVMYPSLRPRTKKVDLTVDDVAGVLKLYGPNPKLRLDSLTQSEDSIKNGTVSHRFLSGNFIGYVLLVVGLILFL

SEQ ID NO: 104996 - protein, 240 aa, Arabidopsis thaliana; identical to SEQ ID NO: 29469
  peptide (1)..(240): Ceres Seq. ID no. 13616248
  misc_feature (28)..(134): Pfam Name: Matrixin Pfam Description: Matrixin
  misc_feature (1)..(240): Homolog of NCBI NO: 15235820 NR Description: proteinase like protein [Arabidopsis thaliana]
  misc_feature (1)..(240): Homolog of NCBI NO: 28393482 NR Description: putative proteinase [Arabidopsis thaliana]
  misc_feature (1)..(240): Homolog of NCBI NO: 21553383 NR Description: proteinase like protein [Arabidopsis thaliana]
  misc_feature (1)..(225): Homolog of NCBI NO: 37536782 NR Description: putative metalloproteinase [Oryza sativa cultivar- group)] >gi|14165321|gb|AAK55453.1| putative
  misc_feature (1)..(240): Homolog of NCBI NO: 15225398 NR Description: metallo proteinase -related [Arabidopsis thaliana]
  misc_feature (1)..(240): Homolog of NCBI NO: 25455788 NR Description: metalloproteinase (EC 3.4.24.-) [imported] - thaliana >gi|3128477|gb|AAC31167.1| metalloproteinase
  misc_feature (1)..(198): Homolog of NCBI NO: 15223067 NR Description: matrix metallo proteinase -related [Arabidopsis
  misc_feature (1)..(240): Homolog of NCBI NO: 15218963 NR Description: metallo proteinase -related [Arabidopsis >gi|4249376|gb|AAD14473.1|AAD14473 Strong similarity to F3I6.6 zinc metalloproteinase homolog from Arabidopsis thaliana
  misc_feature (1)..(240): Homolog of NCBI NO: 7488435 NR Description: zinc metalloproteinase homolog F3I6.6 - thaliana >gi|2829864|gb|AAC00572.1| similar to zinc
  misc_feature (1)..(240): Homolog of NCBI NO: 30688744 NR Description: metallo proteinase -related [Arabidopsis thaliana]

SEQ ID NO: 104997 - DNA, 932 bp, Arabidopsis thaliana
  misc_feature (1)..(932): Ceres Seq. ID no. 13616249
  misc_feature: MA Experiment ID: 108435 Result: Down-regulated in Transcription
  misc_feature: MA Experiment 108435 PARAMETER Experiment Name: At_stm_Mutants_cDNA_P Parameter: Plant Line Value: wt Landsburg vs stm
  misc_feature: MA Experiment 108435 PARAMETER Experiment Name: At_stm_Mutants_cDNA_P Parameter: Tissue Value: Shoot Apical Meristem Region
  misc_feature: MA Experiment ID: 108463 Result: Up-regulated in Transcription
  misc_feature: MA Experiment 108463 PARAMETER Experiment Name: At_Germinating_Seeds_cDNA_P Parameter: Age (day) Value: 3 vs. 0
  misc_feature: MA Experiment 108463 PARAMETER Experiment Name: At_Germinating_Seeds_cDNA_P Parameter: Tissue Value: Germinating Seeds
  misc_feature: MA Experiment ID: 108464 Result: Up-regulated in Transcription
  misc_feature: MA Experiment 108464 PARAMETER Experiment Name: At_Germinating_Seeds_cDNA_P Parameter: Age (day) Value: 4 vs. 0
  misc_feature: MA Experiment 108464 PARAMETER Experiment Name: At_Germinating_Seeds_cDNA_P Parameter: Tissue Value: Germinating Seeds
  misc_feature: MA Experiment ID: 108488 Result: Down-regulated in Transcription
  misc_feature: MA Experiment ID: 108561 Result: Up-regulated in Transcription
  misc_feature: MA Experiment 108561 PARAMETER Experiment Name: At_100uM_ABA_cDNA_P Parameter: Timepoint (hr) Value: 6
  misc_feature: MA Experiment 108561 PARAMETER Experiment Name: At_100uM_ABA_cDNA_P Parameter: Tissue Value: Aerial
  misc_feature: MA Experiment 108561 PARAMETER Experiment Name: At_100uM_ABA_cDNA_P Parameter: Treatment Value: 100uM ABA vs. No Treatment
  misc_feature: MA Experiment ID: 108572 Result: Up-regulated in Transcription
  misc_feature: MA Experiment 108572 PARAMETER Experiment Name: At_Drought_cDNA_P Parameter: Timepoint (hr) Value: 1
  misc_feature: MA Experiment 108572 PARAMETER Experiment Name: At_Drought_cDNA_P Parameter: Tissue Value: Aerial
  misc_feature: MA Experiment 108572 PARAMETER Experiment Name: At_Drought_cDNA_P Parameter: Treatment Value: Drought vs. No Drought
  misc_feature: MA Experiment ID: 108573 Result: Up-regulated in Transcription
  misc_feature: MA Experiment 108573 PARAMETER Experiment Name: At_Drought_cDNA_P Parameter: Timepoint (hr) Value: 6
  misc_feature: MA Experiment 108573 PARAMETER Experiment Name: At_Drought_cDNA_P Parameter: Tissue Value: Aerial
  misc_feature: MA Experiment 108573 PARAMETER Experiment Name: At_Drought_cDNA_P Parameter: Treatment Value: Drought vs. No Drought
  misc_feature: MA Experiment ID: 108579 Result: Down-regulated in Transcription
  misc_feature: MA Experiment 108579 PARAMETER Experiment Name: At_4deg_Cold_cDNA_P Parameter: Temperature (deg C) Value: 4 vs. 22
  misc_feature: MA Experiment 108579 PARAMETER Experiment Name: At_4deg_Cold_cDNA_P Parameter: Timepoint (hr) Value: 6
  misc_feature: MA Experiment 108579 PARAMETER Experiment Name: At_4deg_Cold_cDNA_P Parameter: Tissue Value: Aerial
  misc_feature: MA Experiment ID: 108585 Result: Up-regulated in Transcription
  misc_feature: MA Experiment 108585 PARAMETER Experiment Name: At_5mM_NaNP_cDNA_P Parameter: Timepoint (hr) Value: 6
  misc_feature: MA Experiment 108585 PARAMETER Experiment Name: At_5mM_NaNP_cDNA_P Parameter: Tissue Value: Aerial
  misc_feature: MA Experiment 108585 PARAMETER Experiment Name: At_5mM_NaNP_cDNA_P Parameter: Treatment Value: null
  misc_feature: MA Experiment ID: 108605 Result: Up-regulated in Transcription
  misc_feature: MA Experiment 108605 PARAMETER Experiment Name: At_100uM_ABA_cDNA_P Parameter: Timepoint (hr) Value: 6
  misc_feature: MA Experiment 108605 PARAMETER Experiment Name: At_100uM_ABA_cDNA_P Parameter: Tissue Value: Aerial
  misc_feature: MA Experiment 108605 PARAMETER Experiment Name: At_100uM_ABA_cDNA_P Parameter: Treatment Value: 100uM ABA vs. No Treatment
  misc_feature: MA Experiment ID: 108607 Result: Up-regulated in Transcription
  misc_feature: MA Experiment 108607 PARAMETER Experiment Name: At_100uM_ABA_cDNA_P Parameter: Timepoint (hr) Value: 4
  misc_feature: MA Experiment 108607 PARAMETER Experiment Name: At_100uM_ABA_cDNA_P Parameter: Tissue Value: Aerial
  misc_feature: MA Experiment 108607 PARAMETER Experiment Name: At_100uM_ABA_cDNA_P Parameter: Treatment Value: 100uM ABA vs. No Treatment
  misc_feature: MA Experiment ID: 108609 Result: Up-regulated in Transcription
  misc_feature: MA Experiment 108609 PARAMETER Experiment Name: At_100uM_ABA_cDNA_P Parameter: Timepoint (hr) Value: 24
  misc_feature: MA Experiment 108609 PARAMETER Experiment Name: At_100uM_ABA_cDNA_P Parameter: Tissue Value: Aerial
  misc_feature: MA Experiment 108609 PARAMETER Experiment Name: At_100uM_ABA_cDNA_P Parameter: Treatment Value: 100uM ABA vs. No Treatment
  misc_feature: MA Experiment ID: 108668 Result: Up-regulated in Transcription
  misc_feature: MA Experiment 108668 PARAMETER Experiment Name: At_2mM_SA_cDNA_P Parameter: Plant Line Value: WS
  misc_feature: MA Experiment 108668 PARAMETER Experiment Name: At_2mM_SA_cDNA_P Parameter: Timepoint (hr) Value: 6
  misc_feature: MA Experiment 108668 PARAMETER Experiment Name: At_2mM_SA_cDNA_P Parameter: Treatment Value: 2mM SA vs. No Treatment
  misc_feature: MA Experiment ID: 20000089 Result: Down-regulated in Transcription
  misc_feature: MA Experiment ID: 20000090 Result: Down-regulated in Transcription
  misc_feature: MA Experiment ID: 20000169 Result: Up-regulated in Transcription
  misc_feature: MA Experiment 20000169 PARAMETER Experiment Name: At_100uM_ABA_P Parameter: Age (day) Value: 14
  misc_feature: MA Experiment 20000169 PARAMETER Experiment Name: At_100uM_ABA_P Parameter: Organism Value: A. thaliana
  misc_feature: MA Experiment 20000169 PARAMETER Experiment Name: At_100uM_ABA_P Parameter: Plant Line Value: WS
  misc_feature: MA Experiment 20000169 PARAMETER Experiment Name: At_100uM_ABA_P Parameter: Timepoint (hr) Value: 6
  misc_feature: MA Experiment 20000169 PARAMETER Experiment Name: At_100uM_ABA_P Parameter: Tissue Value: Aerial
  misc_feature: MA Experiment 20000169 PARAMETER Experiment Name: At_100uM_ABA_P Parameter: Treatment Value: 100uM ABA vs. No Treatment
  misc_feature: MA Experiment ID: 20000180 Result: Up-regulated in Transcription
  misc_feature: MA Experiment 20000180 PARAMETER Experiment Name: At_Germinating_Seeds_P Parameter: Age (hr) Value: 24 vs. 0
  misc_feature: MA Experiment 20000180 PARAMETER Experiment Name: At_Germinating_Seeds_P Parameter: Tissue Value: Germinating Seeds
  misc_feature: MA Experiment ID: 20000182 Result: Up-regulated in Transcription
  misc_feature: MA Experiment 20000182 PARAMETER Experiment Name: At_2mM_SA_P Parameter: Age (day) Value: 14
  misc_feature: MA Experiment 20000182 PARAMETER Experiment Name: At_2mM_SA_P Parameter: Organism Value: A. thaliana
  misc_feature: MA Experiment 20000182 PARAMETER Experiment Name: At_2mM_SA_P Parameter: Plant Line Value: WS
  misc_feature: MA Experiment 20000182 PARAMETER Experiment Name: At_2mM_SA_P Parameter: Timepoint (hr) Value: 6
  misc_feature: MA Experiment 20000182 PARAMETER Experiment Name: At_2mM_SA_P Parameter: Tissue Value: Aerial
  misc_feature: MA Experiment 20000182 PARAMETER Experiment Name: At_2mM_SA_P Parameter: Treatment Value: 2mM SA vs. No Treatment
  misc_feature: MA Experiment ID: 20000185 Result: Down-regulated in Transcription
  misc_feature: MA Experiment 20000185 PARAMETER Experiment Name: At_Roots__P Parameter: Age (day) Value: 7 vs. 21
  misc_feature: MA Experiment 20000185 PARAMETER Experiment Name: At_Roots__P Parameter: Organism Value: A. thaliana
  misc_feature: MA Experiment 20000185 PARAMETER Experiment Name: At_Roots__P Parameter: Tissue Value: Roots vs. Whole Plant
  misc_feature: MA Experiment ID: 20000439 Result: Down-regulated in Transcription
  misc_feature: MA Experiment 20000439 PARAMETER Experiment Name: At_Roots__P Parameter: Age (day) Value: 14 vs. 21
  misc_feature: MA Experiment 20000439 PARAMETER Experiment Name: At_Roots__P Parameter: Organism Value: A. thaliana
  misc_feature: MA Experiment 20000439 PARAMETER Experiment Name: At_Roots__P Parameter: Tissue Value: Roots vs. Whole Plant
  misc_feature: MA Experiment ID: 20000496 Result: Down-regulated in Transcription
  misc_feature: MA Experiment 20000496 PARAMETER Experiment Name: At_Guard_Cells_P Parameter: Harvest Date Value: 7/19/2002
  misc_feature: MA Experiment 20000496 PARAMETER Experiment Name: At_Guard_Cells_P Parameter: Organism Value: Canola
  misc_feature: MA Experiment 20000496 PARAMETER Experiment Name: At_Guard_Cells_P Parameter: Tissue Value: Guard Cells vs. Leaves
  misc_feature: MA Experiment ID: 20000573 Result: Up-regulated in Transcription
  misc_feature: MA Experiment 20000573 PARAMETER Experiment Name: At_100uM_ABA_Mutants__P Parameter: Organism Value: A. thaliana
  misc_feature: MA Experiment 20000573 PARAMETER Experiment Name: At_100uM_ABA_Mutants__P Parameter: Plant Line Value: CS22 vs. Ler wt
  misc_feature: MA Experiment 20000573 PARAMETER Experiment Name: At_100uM_ABA_Mutants__P Parameter: Timepoint (hr) Value: N/A
  misc_feature: MA Experiment 20000573 PARAMETER Experiment Name: At_100uM_ABA_Mutants__P Parameter: Tissue Value: Whole Plant
  misc_feature: MA Experiment 20000573 PARAMETER Experiment Name: At_100uM_ABA_Mutants__P Parameter: Treatment Value: None
  misc_feature: MA Experiment ID: 20001450 Result: Up-regulated in Transcription
  misc_feature: MA Experiment 20001450 PARAMETER Experiment Name: At_Far-red-induction_P Parameter: Age (day) Value: 7
  misc_feature: MA Experiment 20001450 PARAMETER Experiment Name: At_Far-red-induction_P Parameter: Light Value: Far-red vs. White
  misc_feature: MA Experiment 20001450 PARAMETER Experiment Name: At_Far-red-induction_P Parameter: Organism Value: A. thaliana
  misc_feature: MA Experiment 20001450 PARAMETER Experiment Name: At_Far-red-induction_P Parameter: Plant Line Value: Columbia
  misc_feature: MA Experiment 20001450 PARAMETER Experiment Name: At_Far-red-induction_P Parameter: Timepoint (hr) Value: 8
  misc_feature: MA Experiment 20001450 PARAMETER Experiment Name: At_Far-red-induction_P Parameter: Tissue Value: Whole Plant
  misc_feature: MA Experiment ID: 20001555 Result: Up-regulated in Transcription
  misc_feature: MA Experiment 20001555 PARAMETER Experiment Name: At_Drought_Soil_Dry_P Parameter: Age (day) Value: 24
  misc_feature: MA Experiment 20001555 PARAMETER Experiment Name: At_Drought_Soil_Dry_P Parameter: Organism Value: A. thaliana
  misc_feature: MA Experiment 20001555 PARAMETER Experiment Name: At_Drought_Soil_Dry_P Parameter: Plant Line Value: WS
  misc_feature: MA Experiment 20001555 PARAMETER Experiment Name: At_Drought_Soil_Dry_P Parameter: Post Timepoint (hr) Value: None
  misc_feature: MA Experiment 20001555 PARAMETER Experiment Name: At_Drought_Soil_Dry_P Parameter: Post-Treatment Value: None
  misc_feature: MA Experiment 20001555 PARAMETER Experiment Name: At_Drought_Soil_Dry_P Parameter: Timepoint (day) Value: 10
  misc_feature: MA Experiment 20001555 PARAMETER Experiment Name: At_Drought_Soil_Dry_P Parameter: Treatment Value: Drought vs. No Drought
  misc_feature: MA Experiment ID: 20001556 Result: Up-regulated in Transcription
  misc_feature: MA Experiment 20001556 PARAMETER Experiment Name: At_Drought_Soil_Dry_P Parameter: Age (day) Value: 26
  misc_feature: MA Experiment 20001556 PARAMETER Experiment Name: At_Drought_Soil_Dry_P Parameter: Organism Value: A. thaliana
  misc_feature: MA Experiment 20001556 PARAMETER Experiment Name: At_Drought_Soil_Dry_P Parameter: Plant Line Value: WS
  misc_feature: MA Experiment 20001556 PARAMETER Experiment Name: At_Drought_Soil_Dry_P Parameter: Post Timepoint (hr) Value: None
  misc_feature: MA Experiment 20001556 PARAMETER Experiment Name: At_Drought_Soil_Dry_P Parameter: Post-Treatment Value: None
  misc_feature: MA Experiment 20001556 PARAMETER Experiment Name: At_Drought_Soil_Dry_P Parameter: Timepoint (day) Value: 12
  misc_feature: MA Experiment 20001556 PARAMETER Experiment Name: At_Drought_Soil_Dry_P Parameter: Treatment Value: Drought vs. No Drought
  misc_feature: MA Experiment ID: 20001559 Result: Up-regulated in Transcription
  misc_feature: MA Experiment 20001559 PARAMETER Experiment Name: At_Drought_Soil_Dry_P Parameter: Age (day) Value: 28
  misc_feature: MA Experiment 20001559 PARAMETER Experiment Name: At_Drought_Soil_Dry_P Parameter: Organism Value: A. thaliana
  misc_feature: MA Experiment 20001559 PARAMETER Experiment Name: At_Drought_Soil_Dry_P Parameter: Plant Line Value: WS
  misc_feature: MA Experiment 20001559 PARAMETER Experiment Name: At_Drought_Soil_Dry_P Parameter: Post Timepoint (hr) Value: 29
  misc_feature: MA Experiment 20001559 PARAMETER Experiment Name: At_Drought_Soil_Dry_P Parameter: Post-Treatment Value: Re-Water vs. No Drought
  misc_feature: MA Experiment 20001559 PARAMETER Experiment Name: At_Drought_Soil_Dry_P Parameter: Timepoint (day) Value: 14
  misc_feature: MA Experiment 20001559 PARAMETER Experiment Name: At_Drought_Soil_Dry_P Parameter: Treatment Value: Drought vs. No Drought
  misc_feature: MA Experiment ID: 20001904 Result: Up-regulated in Transcription
  misc_feature: MA Experiment 20001904 PARAMETER Experiment Name: At_Drought_Reproduction_P Parameter: Age (day) Value: 37
  misc_feature: MA Experiment 20001904 PARAMETER Experiment Name: At_Drought_Reproduction_P Parameter: Organism Value: A. thaliana
  misc_feature: MA Experiment 20001904 PARAMETER Experiment Name: At_Drought_Reproduction_P Parameter: Plant Line Value: WS
  misc_feature: MA Experiment 20001904 PARAMETER Experiment Name: At_Drought_Reproduction_P Parameter: Timepoint (day) Value: 7
  misc_feature: MA Experiment 20001904 PARAMETER Experiment Name: At_Drought_Reproduction_P Parameter: Tissue Value: Rosettes
  misc_feature: MA Experiment 20001904 PARAMETER Experiment Name: At_Drought_Reproduction_P Parameter: Treatment Value: Drought vs. No Drought
  misc_feature: MA Experiment ID: 20001905 Result: Up-regulated in Transcription
  misc_feature: MA Experiment 20001905 PARAMETER Experiment Name: At_Drought_Reproduction_P Parameter: Age (day) Value: 40
  misc_feature: MA Experiment 20001905 PARAMETER Experiment Name: At_Drought_Reproduction_P Parameter: Organism Value: A. thaliana
  misc_feature: MA Experiment 20001905 PARAMETER Experiment Name: At_Drought_Reproduction_P Parameter: Plant Line Value: WS
  misc_feature: MA Experiment 20001905 PARAMETER Experiment Name: At_Drought_Reproduction_P Parameter: Timepoint (day) Value: 10
  misc_feature: MA Experiment 20001905 PARAMETER Experiment Name: At_Drought_Reproduction_P Parameter: Tissue Value: Rosettes
  misc_feature: MA Experiment 20001905 PARAMETER Experiment Name: At_Drought_Reproduction_P Parameter: Treatment Value: Drought vs. No Drought
  misc_feature: MA Experiment ID: 20001906 Result: Up-regulated in Transcription
  misc_feature: MA Experiment 20001906 PARAMETER Experiment Name: At_Drought_Reproduction_P Parameter: Age (day) Value: 35
  misc_feature: MA Experiment 20001906 PARAMETER Experiment Name: At_Drought_Reproduction_P Parameter: Organism Value: A. thaliana
  misc_feature: MA Experiment 20001906 PARAMETER Experiment Name: At_Drought_Reproduction_P Parameter: Plant Line Value: WS
  misc_feature: MA Experiment 20001906 PARAMETER Experiment Name: At_Drought_Reproduction_P Parameter: Timepoint (day) Value: 5
  misc_feature: MA Experiment 20001906 PARAMETER Experiment Name: At_Drought_Reproduction_P Parameter: Tissue Value: Siliques
  misc_feature: MA Experiment 20001906 PARAMETER Experiment Name: At_Drought_Reproduction_P Parameter: Treatment Value: Drought vs. No Drought
  misc_feature: MA Experiment ID: 20001908 Result: Up-regulated in Transcription
  misc_feature: MA Experiment 20001908 PARAMETER Experiment Name: At_Drought_Reproduction_P Parameter: Age (day) Value: 40
  misc_feature: MA Experiment 20001908 PARAMETER Experiment Name: At_Drought_Reproduction_P Parameter: Organism Value: A. thaliana
  misc_feature: MA Experiment 20001908 PARAMETER Experiment Name: At_Drought_Reproduction_P Parameter: Plant Line Value: WS
  misc_feature: MA Experiment 20001908 PARAMETER Experiment Name: At_Drought_Reproduction_P Parameter: Timepoint (day) Value: 10
  misc_feature: MA Experiment 20001908 PARAMETER Experiment Name: At_Drought_Reproduction_P Parameter: Tissue Value: Siliques
  misc_feature: MA Experiment 20001908 PARAMETER Experiment Name: At_Drought_Reproduction_P Parameter: Treatment Value: Drought vs. No Drought
  misc_feature: MA Experiment ID: 20001911 Result: Up-regulated in Transcription
  misc_feature: MA Experiment 20001911 PARAMETER Experiment Name: At_Drought_Reproduction_P Parameter: Age (day) Value: 40
  misc_feature: MA Experiment 20001911 PARAMETER Experiment Name: At_Drought_Reproduction_P Parameter: Organism Value: A. thaliana
  misc_feature: MA Experiment 20001911 PARAMETER Experiment Name: At_Drought_Reproduction_P Parameter: Plant Line Value: WS
  misc_feature: MA Experiment 20001911 PARAMETER Experiment Name: At_Drought_Reproduction_P Parameter: Timepoint (day) Value: 10
  misc_feature: MA Experiment 20001911 PARAMETER Experiment Name: At_Drought_Reproduction_P Parameter: Tissue Value: Flowers
  misc_feature: MA Experiment 20001911 PARAMETER Experiment Name: At_Drought_Reproduction_P Parameter: Treatment Value: Drought vs. No Drought
gttaaaaggtgagatagtgtaaaagcattgatcaagattcatgcaatgggaggagaaggtggtgctgagcccgtaattcactttgtgtttgttcatggagccagtcacggagcttggtgttggtataaactcaccactcttctcgacgccgccgggttcaaatcaacctccgtagatctcaccggcgctggcatcagcctcatagactctaacatcgtcttcgactccgaccaatataaccgtcctctcttctctctcttgtccgatctccctcctcaccacaaagtcatactcgttggacatagcatcggtggaggaagtgtcaccgaagctctttgcaagttcactgacaaaatctccatggccatttacctcgcggcttccatggttcaacccggatccatcccttctccgcatctttcaaacatacatgtgggagaagaagatatatgggagtacacatatggtgaaggtaccgataaaccacccaccggagtcctcatgaaaccggagtttatacgccattattactatagccaaagccctcttgaggacgtaactttgtcatctaagctgttgcgtcctgctcctatgagggcctttcaagatcttgataagctacctccaaatcccgaggccgagaaagttcctcgagtttacatcaagactgctaaggataatctatttgattctgtgcgtcaagaccttttggtggagaattggccaccttctcagctgtatgtcttggaggatagtgaccattctgctttcttctctgtcccaactaccttattcgcgtatctcctccgtgcggtttcttttcttcaacgataaacttcaacttatccttcatacattccgatctagataacaaactaattgggaataattagatgatttgtttggaaggtgattgatatgatattatgatt

SEQ ID NO: 104998 - protein, 262 aa, Arabidopsis thaliana
  peptide (1)..(262): Ceres Seq. ID no. 13616250
  misc_feature (1)..(262): Homolog of NCBI NO: 15235844 NR Description: esterase/lipase/thioesterase family [Arabidopsis
  misc_feature (1)..(262): Homolog of NCBI NO: 15866583 NR Description: hypothetical protein [Capsella rubella]
  misc_feature (12)..(260): Homolog of NCBI NO: 15237165 NR Description: hydrolase, alpha/beta fold family [Arabidopsis
  misc_feature (12)..(256): Homolog of NCBI NO: 15228391 NR Description: hydrolase, alpha/beta fold family [Arabidopsis
  misc_feature (13)..(254): Homolog of NCBI NO: 15218463 NR Description: hydrolase, alpha/beta fold family [Arabidopsis >gi|10092445|gb|AAG12848.1|AC079286_5 polyneuridine aldehyde
  misc_feature (13)..(254): Homolog of NCBI NO: 25518661 NR Description: hypothetical protein F12G12.19 - Arabidopsis >gi|10086476|gb|AAG12536.1|AC015446_17 Unknown protein
  misc_feature (13)..(254): Homolog of NCBI NO: 21595837 NR Description: polyneuridine aldehyde esterase, putative
  misc_feature (12)..(254): Homolog of NCBI NO: 15230077 NR Description: hydrolase, alpha/beta fold family [Arabidopsis
  misc_feature (13)..(254): Homolog of NCBI NO: 7485010 NR Description: host response protein homolog T5L19.30 - thaliana >gi|4538993|emb|CAB39614.1| putative host response [Arabidopsis thaliana] >gi|7267686|emb|CAB78113.1| putative host
  misc_feature (13)..(254): Homolog of NCBI NO: 30681236 NR Description: hydrolase family [Arabidopsis thaliana] Unknown protein [Arabidopsis thaliana]
MGGEGGAEPVIHFVFVHGASHGAWCWYKLTTLLDAAGFKSTSVDLTGAGISLIDSNIVFDSDQYNRPLFSLLSDLPPHHKVILVGHSIGGGSVTEALCKFTDKISMAIYLAASMVQPGSIPSPHLSNIHVGEEDIWEYTYGEGTDKPPTGVLMKPEFIRHYYYSQSPLEDVTLSSKLLRPAPMRAFQDLDKLPPNPEAEKVPRVYIKTAKDNLFDSVRQDLLVENWPPSQLYVLEDSDHSAFFSVPTTLFAYLLRAVSFLQR

SEQ ID NO: 104999 - protein, 157 aa, Arabidopsis thaliana
  peptide (1)..(157): Ceres Seq. ID no. 13616251
  misc_feature (1)..(157): Homolog of NCBI NO: 15235844 NR Description: esterase/lipase/thioesterase family [Arabidopsis
  misc_feature (1)..(157): Homolog of NCBI NO: 15866583 NR Description: hypothetical protein [Capsella rubella]
  misc_feature (1)..(155): Homolog of NCBI NO: 15237165 NR Description: hydrolase, alpha/beta fold family [Arabidopsis
  misc_feature (1)..(151): Homolog of NCBI NO: 15228391 NR Description: hydrolase, alpha/beta fold family [Arabidopsis
  misc_feature (1)..(149): Homolog of NCBI NO: 15218463 NR Description: hydrolase, alpha/beta fold family [Arabidopsis >gi|10092445|gb|AAG12848.1|AC079286_5 polyneuridine aldehyde
  misc_feature (1)..(149): Homolog of NCBI NO: 21595837 NR Description: polyneuridine aldehyde esterase, putative
  misc_feature (1)..(149): Homolog of NCBI NO: 25518661 NR Description: hypothetical protein F12G12.19 - Arabidopsis >gi|10086476|gb|AAG12536.1|AC015446_17 Unknown protein
  misc_feature (1)..(149): Homolog of NCBI NO: 15230077 NR Description: hydrolase, alpha/beta fold family [Arabidopsis
  misc_feature (1)..(149): Homolog of NCBI NO: 7485010 NR Description: host response protein homolog T5L19.30 - thaliana >gi|4538993|emb|CAB39614.1| putative host response [Arabidopsis thaliana] >gi|7267686|emb|CAB78113.1| putative host
  misc_feature (1)..(149): Homolog of NCBI NO: 30681236 NR Description: hydrolase family [Arabidopsis thaliana] Unknown protein [Arabidopsis thaliana]
MAIYLAASMVQPGSIPSPHLSNIHVGEEDIWEYTYGEGTDKPPTGVLMKPEFIRHYYYSQSPLEDVTLSSKLLRPAPMRAFQDLDKLPPNPEAEKVPRVYIKTAKDNLFDSVRQDLLVENWPPSQLYVLEDSDHSAFFSVPTTLFAYLLRAVSFLQR

SEQ ID NO: 105000 - protein, 149 aa, Arabidopsis thaliana
  peptide (1)..(149): Ceres Seq. ID no. 13616252
  misc_feature (1)..(149): Homolog of NCBI NO: 15235844 NR Description: esterase/lipase/thioesterase family [Arabidopsis
  misc_feature (1)..(149): Homolog of NCBI NO: 15866583 NR Description: hypothetical protein [Capsella rubella]
  misc_feature (1)..(147): Homolog of NCBI NO: 15237165 NR Description: hydrolase, alpha/beta fold family [Arabidopsis
  misc_feature (1)..(143): Homolog of NCBI NO: 15228391 NR Description: hydrolase, alpha/beta fold family [Arabidopsis
  misc_feature (1)..(141): Homolog of NCBI NO: 15218463 NR Description: hydrolase, alpha/beta fold family [Arabidopsis >gi|10092445|gb|AAG12848.1|AC079286_5 polyneuridine aldehyde
  misc_feature (1)..(141): Homolog of NCBI NO: 25518661 NR Description: hypothetical protein F12G12.19 - Arabidopsis >gi|10086476|gb|AAG12536.1|AC015446_17 Unknown protein
  misc_feature (1)..(141): Homolog of NCBI NO: 21595837 NR Description: polyneuridine aldehyde esterase, putative
  misc_feature (1)..(141): Homolog of NCBI NO: 15230077 NR Description: hydrolase, alpha/beta fold family [Arabidopsis
  misc_feature (1)..(141): Homolog of NCBI NO: 7485010 NR Description: host response protein homolog T5L19.30 - thaliana >gi|4538993|emb|CAB39614.1| putative host response [Arabidopsis thaliana] >gi|7267686|emb|CAB78113.1| putative host
  misc_feature (1)..(141): Homolog of NCBI NO: 30681236 NR Description: hydrolase family [Arabidopsis thaliana] Unknown protein [Arabidopsis thaliana]
MVQPGSIPSPHLSNIHVGEEDIWEYTYGEGTDKPPTGVLMKPEFIRHYYYSQSPLEDVTLSSKLLRPAPMRAFQDLDKLPPNPEAEKVPRVYIKTAKDNLFDSVRQDLLVENWPPSQLYVLEDSDHSAFFSVPTTLFAYLLRAVSFLQR

SEQ ID NO: 105001 - DNA, 1622 bp, Arabidopsis thaliana
  misc_feature (1)..(1622): Ceres Seq. ID no. 13616257
  misc_feature: MA Experiment ID: 108434 Result: Down-regulated in Transcription
  misc_feature: MA Experiment 108434 PARAMETER Experiment Name: At_Root_Tips_cDNA_P Parameter: Tissue Value: Root Tips
  misc_feature: MA Experiment ID: 108573 Result: Up-regulated in Transcription
  misc_feature: MA Experiment 108573 PARAMETER Experiment Name: At_Drought_cDNA_P Parameter: Timepoint (hr) Value: 6
  misc_feature: MA Experiment 108573 PARAMETER Experiment Name: At_Drought_cDNA_P Parameter: Tissue Value: Aerial
  misc_feature: MA Experiment 108573 PARAMETER Experiment Name: At_Drought_cDNA_P Parameter: Treatment Value: Drought vs. No Drought
  misc_feature: MA Experiment ID: 108576 Result: Down-regulated in Transcription
  misc_feature: MA Experiment 108576 PARAMETER Experiment Name: At_42deg_Heat_cDNA_P Parameter: Temperature (deg C) Value: 42 vs. 22
  misc_feature: MA Experiment 108576 PARAMETER Experiment Name: At_42deg_Heat_cDNA_P Parameter: Timepoint (hr) Value: 1
  misc_feature: MA Experiment 108576 PARAMETER Experiment Name: At_42deg_Heat_cDNA_P Parameter: Tissue Value: Aerial
  misc_feature: MA Experiment ID: 108667 Result: Up-regulated in Transcription
  misc_feature: MA Experiment 108667 PARAMETER Experiment Name: At_2mM_SA_cDNA_P Parameter: Plant Line Value: WS
  misc_feature: MA Experiment 108667 PARAMETER Experiment Name: At_2mM_SA_cDNA_P Parameter: Timepoint (hr) Value: 1
  misc_feature: MA Experiment 108667 PARAMETER Experiment Name: At_2mM_SA_cDNA_P Parameter: Treatment Value: 2mM SA vs. No Treatment
  misc_feature: MA Experiment ID: 20000234 Result: Down-regulated in Transcription
  misc_feature: MA Experiment 20000234 PARAMETER Experiment Name: At_Siliques_P Parameter: Age (day) Value: 21
  misc_feature: MA Experiment 20000234 PARAMETER Experiment Name: At_Siliques_P Parameter: Organism Value: A. thaliana
  misc_feature: MA Experiment 20000234 PARAMETER Experiment Name: At_Siliques_P Parameter: Plant Line Value: WS
  misc_feature: MA Experiment 20000234 PARAMETER Experiment Name: At_Siliques_P Parameter: Tissue Value: Less Than 5mm Siliques vs. Whole Plant
  misc_feature: MA Experiment ID: 20000235 Result: Down-regulated in Transcription
  misc_feature: MA Experiment 20000235 PARAMETER Experiment Name: At_Siliques_P Parameter: Age (day) Value: 21
  misc_feature: MA Experiment 20000235 PARAMETER Experiment Name: At_Siliques_P Parameter: Organism Value: A. thaliana
  misc_feature: MA Experiment 20000235 PARAMETER Experiment Name: At_Siliques_P Parameter: Plant Line Value: WS
  misc_feature: MA Experiment 20000235 PARAMETER Experiment Name: At_Siliques_P Parameter: Tissue Value: 5-10mm Siliques vs. Whole Plant
  misc_feature: MA Experiment ID: 20000264 Result: Down-regulated in Transcription
  misc_feature: MA Experiment 20000264 PARAMETER Experiment Name: At_Open_Flower_P Parameter: Age (day) Value: 21
  misc_feature: MA Experiment 20000264 PARAMETER Experiment Name: At_Open_Flower_P Parameter: Plant Line Value: WS
  misc_feature: MA Experiment 20000264 PARAMETER Experiment Name: At_Open_Flower_P Parameter: Tissue Value: Open Flower vs. Whole Plant
  misc_feature: MA Experiment ID: 20000265 Result: Down-regulated in Transcription
  misc_feature: MA Experiment 20000265 PARAMETER Experiment Name: At_Open_Flower_P Parameter: Age (day) Value: 21
  misc_feature: MA Experiment 20000265 PARAMETER Experiment Name: At_Open_Flower_P Parameter: Plant Line Value: WS
  misc_feature: MA Experiment 20000265 PARAMETER Experiment Name: At_Open_Flower_P Parameter: Tissue Value: Closed Flower vs. Whole Plant
  misc_feature: MA Experiment ID: 20000286 Result: Down-regulated in Transcription
  misc_feature: MA Experiment 20000286 PARAMETER Experiment Name: At_Open_Flower_P Parameter: Age (day) Value: 21
  misc_feature: MA Experiment 20000286 PARAMETER Experiment Name: At_Open_Flower_P Parameter: Plant Line Value: WS
  misc_feature: MA Experiment 20000286 PARAMETER Experiment Name: At_Open_Flower_P Parameter: Tissue Value: Half Open vs. Whole Plant
aaaaagacagagagaggagagacgagagctcgtcgaaccagatctctttctctttcttctctctaattttgatttttttgaattttcttctgcaaagcaaaatcgcagaagtcgtcgtgtgtccgcgttgcatcgaaccacttgttcgattctctttcgtcatcctctcttatatcatcagcaacaacaacccttgtttcaaatttcttcatttccgccggatttataatcgcagattgattctgatcgatagagatagggttattcaaggagagacctcgattgacttcaattgtcttcctgattcgatagataagatttagggttagcttgacgttgacgttgatataggggaatggagacggacaatgggaaggggttgatactagctgtagcgtcaagtgttttcattggttccagcttcattcttaagaagaaaggtcttaagcgagctggtgctattggcacccgagcaggatatggaggctatacttatttattagagccgctttggtgggcagggatggttactatgattgttggagaagctgcaaactttgtggcttacatttatgcaccagctgtactcgttactcctctcggtgcattaagtataatcatcagtgctgttttggcacatttcttattgaaggaaaaacttaagaaaatgggggttctcggatgtgtgtcttgcattgttgggtctgttgttattgttatacacgcacctaaggaacagactcctaattccgttgaggaaatatggaatctggctactcagccagcttttctaatctacgtagccataaccatgtcgattgtccttgctttaattctgcattttgaacccctgtgcggccaaacaaacattctggtttatattggaatctgttcgttaatgggtgctctcactgttatgagcataaaagctattggaattgcgataaaattaacaatggagggagtaagccagatcgggtatccacagacatggctttttgtcatggttgcagtaacttgtgtcgttacacaattgatttacctaaataaggctttggacacattcaacgcagccattgtttctccagtatactatgtaatgttcacaaccctcacaattgttgctagtgcaataatgttcaaggactggtctgggcaagacgcagccagcgtagcctctgagttatgtggattcatcactgtgctcacagggacaatgatactccatggcacaagagaagaggaacaacaacaagcttcttcagaacatgtaagatggtacgactcgagaaagagcatgaacgaagaacatttggtaagcctgtacagtcctgaatactaggaagaagaagatgcaatatctctaggctctcaatagattgaatgaaatttgccaaaaacaagcctcatgagtcttaaaactggatcaatcaacaaatctgcggtcgggttcatttttgtattgttttatggtcactgtacagacaaaaaagtttgtctagttaaaaaaacttcacattctttagttttgatctttgtgtctctcttcttagtacagtacaggtcttcttcttatctggactcttttgtccaaatttacactgttatatatttatatatgt

SEQ ID NO: 105002 - protein, 328 aa, Arabidopsis thaliana; identical to SEQ ID NO: 25040
  peptide (1)..(328): Ceres Seq. ID no. 13616258
  misc_feature (1)..(300): Pfam Name: Protein of unknown function (DUF803) Pfam Description: Protein of unknown function (DUF803)
  misc_feature (1)..(328): Homolog of NCBI NO: 30681265 NR Description: expressed protein [Arabidopsis thaliana]
  misc_feature (1)..(328): Homolog of NCBI NO: 25412015 NR Description: hypothetical protein At2g21120 [imported] - thaliana >gi|4803931|gb|AAD29804.1| unknown protein [Arabidopsis
  misc_feature (1)..(328): Homolog of NCBI NO: 26449939 NR Description: unknown protein [Arabidopsis thaliana]
  misc_feature (1)..(295): Homolog of NCBI NO: 18399280 NR Description: purine permease - related [Arabidopsis thaliana]
  misc_feature (1)..(327): Homolog of NCBI NO: 18409942 NR Description: expressed protein [Arabidopsis thaliana] unknown protein [Arabidopsis thaliana]
  misc_feature (1)..(295): Homolog of NCBI NO: 25406128 NR Description: unknown protein F17M19.5 [imported] - Arabidopsis
  misc_feature (1)..(295): Homolog of NCBI NO: 20161440 NR Description: B1065E10.15 [Oryza sativa (japonica
  misc_feature (1)..(295): Homolog of NCBI NO: 15229534 NR Description: purine permease - related [Arabidopsis thaliana] gb|AAF34307.1~gene_id:F14O13.5~similar to unknown protein
  misc_feature (1)..(295): Homolog of NCBI NO: 18414079 NR Description: expressed protein [Arabidopsis thaliana]
  misc_feature (1)..(295): Homolog of NCBI NO: 21593618 NR Description: unknown [Arabidopsis thaliana]

SEQ ID NO: 105003 - protein, 272 aa, Arabidopsis thaliana; identical to SEQ ID NO: 25041
  peptide (1)..(272): Ceres Seq. ID no. 13616259
  misc_feature (1)..(244): Pfam Name: Protein of unknown function (DUF803) Pfam Description: Protein of unknown function (DUF803)
  misc_feature (1)..(272): Homolog of NCBI NO: 30681265 NR Description: expressed protein [Arabidopsis thaliana]
  misc_feature (1)..(272): Homolog of NCBI NO: 25412015 NR Description: hypothetical protein At2g21120 [imported] - thaliana >gi|4803931|gb|AAD29804.1| unknown protein [Arabidopsis
  misc_feature (1)..(272): Homolog of NCBI NO: 26449939 NR Description: unknown protein [Arabidopsis thaliana]
  misc_feature (1)..(239): Homolog of NCBI NO: 18399280 NR Description: purine permease - related [Arabidopsis thaliana]
  misc_feature (1)..(271): Homolog of NCBI NO: 18409942 NR Description: expressed protein [Arabidopsis thaliana] unknown protein [Arabidopsis thaliana]
  misc_feature (1)..(239): Homolog of NCBI NO: 25406128 NR Description: unknown protein F17M19.5 [imported] - Arabidopsis
  misc_feature (1)..(239): Homolog of NCBI NO: 20161440 NR Description: B1065E10.15 [Oryza sativa (japonica
  misc_feature (1)..(239): Homolog of NCBI NO: 15229534 NR Description: purine permease - related [Arabidopsis thaliana] gb|AAF34307.1~gene_id:F14O13.5~similar to unknown protein
  misc_feature (1)..(239): Homolog of NCBI NO: 18414079 NR Description: expressed protein [Arabidopsis thaliana]
  misc_feature (1)..(239): Homolog of NCBI NO: 21593618 NR Description: unknown [Arabidopsis thaliana]

SEQ ID NO: 105004 - protein, 269 aa, Arabidopsis thaliana; identical to SEQ ID NO: 25042
  peptide (1)..(269): Ceres Seq. ID no. 13616260
  misc_feature (1)..(241): Pfam Name: Protein of unknown function (DUF803) Pfam Description: Protein of unknown function (DUF803)
  misc_feature (1)..(269): Homolog of NCBI NO: 30681265 NR Description: expressed protein [Arabidopsis thaliana]
  misc_feature (1)..(269): Homolog of NCBI NO: 25412015 NR Description: hypothetical protein At2g21120 [imported] - thaliana >gi|4803931|gb|AAD29804.1| unknown protein [Arabidopsis
  misc_feature (1)..(269): Homolog of NCBI NO: 26449939 NR Description: unknown protein [Arabidopsis thaliana]
  misc_feature (1)..(236): Homolog of NCBI NO: 18399280 NR Description: purine permease - related [Arabidopsis thaliana]
  misc_feature (1)..(268): Homolog of NCBI NO: 18409942 NR Description: expressed protein [Arabidopsis thaliana] unknown protein [Arabidopsis thaliana]
  misc_feature (1)..(236): Homolog of NCBI NO: 25406128 NR Description: unknown protein F17M19.5 [imported] - Arabidopsis
  misc_feature (1)..(236): Homolog of NCBI NO: 20161440 NR Description: B1065E10.15 [Oryza sativa (japonica
  misc_feature (1)..(236): Homolog of NCBI NO: 15229534 NR Description: purine permease - related [Arabidopsis thaliana] gb|AAF34307.1~gene_id:F14O13.5~similar to unknown protein
  misc_feature (1)..(236): Homolog of NCBI NO: 18414079 NR Description: expressed protein [Arabidopsis thaliana]
  misc_feature (1)..(236): Homolog of NCBI NO: 21593618 NR Description: unknown [Arabidopsis thaliana]

SEQ ID NO: 105005 - DNA, 757 bp, Arabidopsis thaliana
  misc_feature (1)..(757): Ceres Seq. ID no. 13616261
  misc_feature: MA Experiment ID: 108462 Result: Down-regulated in Transcription
  misc_feature: MA Experiment 108462 PARAMETER Experiment Name: At_Germinating_Seeds_cDNA_P Parameter: Age (day) Value: 2 vs. 0
  misc_feature: MA Experiment 108462 PARAMETER Experiment Name: At_Germinating_Seeds_cDNA_P Parameter: Tissue Value: Germinating Seeds
  misc_feature: MA Experiment ID: 108463 Result: Down-regulated in Transcription
  misc_feature: MA Experiment 108463 PARAMETER Experiment Name: At_Germinating_Seeds_cDNA_P Parameter: Age (day) Value: 3 vs. 0
  misc_feature: MA Experiment 108463 PARAMETER Experiment Name: At_Germinating_Seeds_cDNA_P Parameter: Tissue Value: Germinating Seeds
  misc_feature: MA Experiment ID: 108464 Result: Down-regulated in Transcription
  misc_feature: MA Experiment 108464 PARAMETER Experiment Name: At_Germinating_Seeds_cDNA_P Parameter: Age (day) Value: 4 vs. 0
  misc_feature: MA Experiment 108464 PARAMETER Experiment Name: At_Germinating_Seeds_cDNA_P Parameter: Tissue Value: Germinating Seeds
  misc_feature: MA Experiment ID: 108501 Result: Down-regulated in Transcription
  misc_feature: MA Experiment 108501 PARAMETER Experiment Name: At_ap2_floral_buds_cDNA_P Parameter: Plant Line Value: ap2 (Ler.)
  misc_feature: MA Experiment 108501 PARAMETER Experiment Name: At_ap2_floral_buds_cDNA_P Parameter: Tissue Value: Closed Flower
  misc_feature: MA Experiment ID: 108576 Result: Up-regulated in Transcription
  misc_feature: MA Experiment 108576 PARAMETER Experiment Name: At_42deg_Heat_cDNA_P Parameter: Temperature (deg C) Value: 42 vs. 22
  misc_feature: MA Experiment 108576 PARAMETER Experiment Name: At_42deg_Heat_cDNA_P Parameter: Timepoint (hr) Value: 1
  misc_feature: MA Experiment 108576 PARAMETER Experiment Name: At_42deg_Heat_cDNA_P Parameter: Tissue Value: Aerial
  misc_feature: MA Experiment ID: 108579 Result: Up-regulated in Transcription
  misc_feature: MA Experiment 108579 PARAMETER Experiment Name: At_4deg_Cold_cDNA_P Parameter: Temperature (deg C) Value: 4 vs. 22
  misc_feature: MA Experiment 108579 PARAMETER Experiment Name: At_4deg_Cold_cDNA_P Parameter: Timepoint (hr) Value: 6
  misc_feature: MA Experiment 108579 PARAMETER Experiment Name: At_4deg_Cold_cDNA_P Parameter: Tissue Value: Aerial
  misc_feature: MA Experiment ID: 108595 Result: Up-regulated in Transcription
  misc_feature: MA Experiment 108595 PARAMETER Experiment Name: At_Ler-pi_Ovule_cDNA_P Parameter: Plant Line Value: null
  misc_feature: MA Experiment ID: 108608 Result: Up-regulated in Transcription
  misc_feature: MA Experiment 108608 PARAMETER Experiment Name: At_100uM_ABA_cDNA_P Parameter: Timepoint (hr) Value: 1
  misc_feature: MA Experiment 108608 PARAMETER Experiment Name: At_100uM_ABA_cDNA_P Parameter: Tissue Value: Aerial
  misc_feature: MA Experiment 108608 PARAMETER Experiment Name: At_100uM_ABA_cDNA_P Parameter: Treatment Value: 100uM ABA vs. No Treatment
  misc_feature: MA Experiment ID: 20000069 Result: Up-regulated in Transcription
  misc_feature: MA Experiment 20000069 PARAMETER Experiment Name: At_100uM_ABA_Mutants_cDNA_P Parameter: Plant Line Value: CS23
  misc_feature: MA Experiment 20000069 PARAMETER Experiment Name: At_100uM_ABA_Mutants_cDNA_P Parameter: Timepoint (hr) Value: 6
  misc_feature: MA Experiment 20000069 PARAMETER Experiment Name: At_100uM_ABA_Mutants_cDNA_P Parameter: Tissue Value: Aerial
  misc_feature: MA Experiment 20000069 PARAMETER Experiment Name: At_100uM_ABA_Mutants_cDNA_P Parameter: Treatment Value: 100uM ABA vs. No Treatment
  misc_feature: MA Experiment ID: 20000070 Result: Up-regulated in Transcription
  misc_feature: MA Experiment 20000070 PARAMETER Experiment Name: At_100uM_ABA_Mutants_cDNA_P Parameter: Plant Line Value: CS24
  misc_feature: MA Experiment 20000070 PARAMETER Experiment Name: At_100uM_ABA_Mutants_cDNA_P Parameter: Timepoint (hr) Value: 6
  misc_feature: MA Experiment 20000070 PARAMETER Experiment Name: At_100uM_ABA_Mutants_cDNA_P Parameter: Tissue Value: Aerial
  misc_feature: MA Experiment 20000070 PARAMETER Experiment Name: At_100uM_ABA_Mutants_cDNA_P Parameter: Treatment Value: 100uM ABA vs. No Treatment
  misc_feature: MA Experiment ID: 20000071 Result: Up-regulated in Transcription
  misc_feature: MA Experiment 20000071 PARAMETER Experiment Name: At_100uM_ABA_Mutants_cDNA_P Parameter: Plant Line Value: CS8104
  misc_feature: MA Experiment 20000071 PARAMETER Experiment Name: At_100uM_ABA_Mutants_cDNA_P Parameter: Timepoint (hr) Value: 6
  misc_feature: MA Experiment 20000071 PARAMETER Experiment Name: At_100uM_ABA_Mutants_cDNA_P Parameter: Tissue Value: Aerial
  misc_feature: MA Experiment 20000071 PARAMETER Experiment Name: At_100uM_ABA_Mutants_cDNA_P Parameter: Treatment Value: 100uM ABA vs. No Treatment
  misc_feature: MA Experiment ID: 20000088 Result: Up-regulated in Transcription
  misc_feature: MA Experiment 20000088 PARAMETER Experiment Name: At_100uM_ABA_Mutants_cDNA_P Parameter: Plant Line Value: Landsberg
  misc_feature: MA Experiment 20000088 PARAMETER Experiment Name: At_100uM_ABA_Mutants_cDNA_P Parameter: Timepoint (hr) Value: 6
  misc_feature: MA Experiment 20000088 PARAMETER Experiment Name: At_100uM_ABA_Mutants_cDNA_P Parameter: Tissue Value: Aerial
  misc_feature: MA Experiment 20000088 PARAMETER Experiment Name: At_100uM_ABA_Mutants_cDNA_P Parameter: Treatment Value: 100uM ABA vs. No Treatment
  misc_feature: MA Experiment ID: 20000090 Result: Up-regulated in Transcription
  misc_feature: MA Experiment ID: 20000111 Result: Up-regulated in Transcription
  misc_feature: MA Experiment 20000111 PARAMETER Experiment Name: At_42deg_Heat_cDNA_P Parameter: Temperature (deg C) Value: 42 vs. 22
  misc_feature: MA Experiment 20000111 PARAMETER Experiment Name: At_42deg_Heat_cDNA_P Parameter: Timepoint (hr) Value: 6
  misc_feature: MA Experiment 20000111 PARAMETER Experiment Name: At_42deg_Heat_cDNA_P Parameter: Tissue Value: Aerial
  misc_feature: MA Experiment ID: 20000112 Result: Up-regulated in Transcription
  misc_feature: MA Experiment 20000112 PARAMETER Experiment Name: At_42deg_Heat_cDNA_P Parameter: Temperature (deg C) Value: 42 vs. 22
  misc_feature: MA Experiment 20000112 PARAMETER Experiment Name: At_42deg_Heat_cDNA_P Parameter: Timepoint (hr) Value: 2
  misc_feature: MA Experiment 20000112 PARAMETER Experiment Name: At_42deg_Heat_cDNA_P Parameter: Tissue Value: Aerial
  misc_feature: MA Experiment ID: 20000117 Result: Up-regulated in Transcription
  misc_feature: MA Experiment 20000117 PARAMETER Experiment Name: At_100uM_ABA_Mutants_cDNA_P Parameter: Plant Line Value: Columbia
  misc_feature: MA Experiment 20000117 PARAMETER Experiment Name: At_100uM_ABA_Mutants_cDNA_P Parameter: Timepoint (hr) Value: 6
  misc_feature: MA Experiment 20000117 PARAMETER Experiment Name: At_100uM_ABA_Mutants_cDNA_P Parameter: Tissue Value: Aerial
  misc_feature: MA Experiment 20000117 PARAMETER Experiment Name: At_100uM_ABA_Mutants_cDNA_P Parameter: Treatment Value: 100uM ABA vs. No Treatment
  misc_feature: MA Experiment ID: 20000144 Result: Up-regulated in Transcription
  misc_feature: MA Experiment 20000144 PARAMETER Experiment Name: At_42deg_Heat_cDNA_P Parameter: Temperature (deg C) Value: 42 vs. 22
  misc_feature: MA Experiment 20000144 PARAMETER Experiment Name: At_42deg_Heat_cDNA_P Parameter: Timepoint (hr) Value: 1
  misc_feature: MA Experiment 20000144 PARAMETER Experiment Name: At_42deg_Heat_cDNA_P Parameter: Tissue Value: Aerial
  misc_feature: MA Experiment ID: 20000171 Result: Up-regulated in Transcription
  misc_feature: MA Experiment 20000171 PARAMETER Experiment Name: At_42deg_Heat_P Parameter: Age (day) Value: 14
  misc_feature: MA Experiment 20000171 PARAMETER Experiment Name: At_42deg_Heat_P Parameter: Organism Value: A. thaliana
  misc_feature: MA Experiment 20000171 PARAMETER Experiment Name: At_42deg_Heat_P Parameter: Plant Line Value: WS
  misc_feature: MA Experiment 20000171 PARAMETER Experiment Name: At_42deg_Heat_P Parameter: Temperature (deg C) Value: 42 vs. 22
  misc_feature: MA Experiment 20000171 PARAMETER Experiment Name: At_42deg_Heat_P Parameter: Timepoint (hr) Value: 1
  misc_feature: MA Experiment 20000171 PARAMETER Experiment Name: At_42deg_Heat_P Parameter: Tissue Value: Aerial
  misc_feature: MA Experiment ID: 20000173 Result: Up-regulated in Transcription
  misc_feature: MA Experiment 20000173 PARAMETER Experiment Name: At_42deg_Heat_P Parameter: Age (day) Value: 14
  misc_feature: MA Experiment 20000173 PARAMETER Experiment Name: At_42deg_Heat_P Parameter: Organism Value: A. thaliana
  misc_feature: MA Experiment 20000173 PARAMETER Experiment Name: At_42deg_Heat_P Parameter: Plant Line Value: WS
  misc_feature: MA Experiment 20000173 PARAMETER Experiment Name: At_42deg_Heat_P Parameter: Temperature (deg C) Value: 42 vs. 22
  misc_feature: MA Experiment 20000173 PARAMETER Experiment Name: At_42deg_Heat_P Parameter: Timepoint (hr) Value: 6
  misc_feature: MA Experiment 20000173 PARAMETER Experiment Name: At_42deg_Heat_P Parameter: Tissue Value: Aerial
  misc_feature: MA Experiment ID: 20000185 Result: Down-regulated in Transcription
  misc_feature: MA Experiment 20000185 PARAMETER Experiment Name: At_Roots__P Parameter: Age (day) Value: 7 vs. 21
  misc_feature: MA Experiment 20000185 PARAMETER Experiment Name: At_Roots__P Parameter: Organism Value: A. thaliana
  misc_feature: MA Experiment 20000185 PARAMETER Experiment Name: At_Roots__P Parameter: Tissue Value: Roots vs. Whole Plant
  misc_feature: MA Experiment ID: 20000437 Result: Up-regulated in Transcription
  misc_feature: MA Experiment 20000437 PARAMETER Experiment Name: At_Drought_P Parameter: Age (day) Value: 8
  misc_feature: MA Experiment 20000437 PARAMETER Experiment Name: At_Drought_P Parameter: Organism Value: A. thaliana
  misc_feature: MA Experiment 20000437 PARAMETER Experiment Name: At_Drought_P Parameter: Plant Line Value: WS
  misc_feature: MA Experiment 20000437 PARAMETER Experiment Name: At_Drought_P Parameter: Timepoint (hr) Value: 24
  misc_feature: MA Experiment 20000437 PARAMETER Experiment Name: At_Drought_P Parameter: Tissue Value: Whole Plant
  misc_feature: MA Experiment 20000437 PARAMETER Experiment Name: At_Drought_P Parameter: Treatment Value: Drought vs. No Drought
  misc_feature: MA Experiment ID: 20000438 Result: Down-regulated in Transcription
  misc_feature: MA Experiment 20000438 PARAMETER Experiment Name: At_Shoots__P Parameter: Age (day) Value: 14
  misc_feature: MA Experiment 20000438 PARAMETER Experiment Name: At_Shoots__P Parameter: Tissue Value: Shoots vs. Whole Plant
  misc_feature: MA Experiment ID: 20000439 Result: Down-regulated in Transcription
  misc_feature: MA Experiment 20000439 PARAMETER Experiment Name: At_Roots__P Parameter: Age (day) Value: 14 vs. 21
  misc_feature: MA Experiment 20000439 PARAMETER Experiment Name: At_Roots__P Parameter: Organism Value: A. thaliana
  misc_feature: MA Experiment 20000439 PARAMETER Experiment Name: At_Roots__P Parameter: Tissue Value: Roots vs. Whole Plant
  misc_feature: MA Experiment ID: 20000441 Result: Down-regulated in Transcription
  misc_feature: MA Experiment 20000441 PARAMETER Experiment Name: At_1uM_BR-BRZ__P Parameter: Tissue Value: Shoot Apices
  misc_feature: MA Experiment 20000441 PARAMETER Experiment Name: At_1uM_BR-BRZ__P Parameter: Treatment Value: 1uM BR vs. No Treatment
  misc_feature: MA Experiment ID: 20001248 Result: Up-regulated in Transcription
  misc_feature: MA Experiment 20001248 PARAMETER Experiment Name: At_Far-red-induction_P Parameter: Age (day) Value: 7
  misc_feature: MA Experiment 20001248 PARAMETER Experiment Name: At_Far-red-induction_P Parameter: Light Value: Far-red vs. White
  misc_feature: MA Experiment 20001248 PARAMETER Experiment Name: At_Far-red-induction_P Parameter: Organism Value: A. thaliana
  misc_feature: MA Experiment 20001248 PARAMETER Experiment Name: At_Far-red-induction_P Parameter: Plant Line Value: Columbia
  misc_feature: MA Experiment 20001248 PARAMETER Experiment Name: At_Far-red-induction_P Parameter: Timepoint (hr) Value: 4
  misc_feature: MA Experiment 20001248 PARAMETER Experiment Name: At_Far-red-induction_P Parameter: Tissue Value: Whole Plant
  misc_feature: MA Experiment ID: 20001450 Result: Down-regulated in Transcription
  misc_feature: MA Experiment 20001450 PARAMETER Experiment Name: At_Far-red-induction_P Parameter: Age (day) Value: 7
  misc_feature: MA Experiment 20001450 PARAMETER Experiment Name: At_Far-red-induction_P Parameter: Light Value: Far-red vs. White
  misc_feature: MA Experiment 20001450 PARAMETER Experiment Name: At_Far-red-induction_P Parameter: Organism Value: A. thaliana
  misc_feature: MA Experiment 20001450 PARAMETER Experiment Name: At_Far-red-induction_P Parameter: Plant Line Value: Columbia
  misc_feature: MA Experiment 20001450 PARAMETER Experiment Name: At_Far-red-induction_P Parameter: Timepoint (hr) Value: 8
  misc_feature: MA Experiment 20001450 PARAMETER Experiment Name: At_Far-red-induction_P Parameter: Tissue Value: Whole Plant
  misc_feature: MA Experiment ID: 20001451 Result: Down-regulated in Transcription
  misc_feature: MA Experiment 20001451 PARAMETER Experiment Name: At_Far-red-induction_P Parameter: Age (day) Value: 7
  misc_feature: MA Experiment 20001451 PARAMETER Experiment Name: At_Far-red-induction_P Parameter: Light Value: Far-red vs. White
  misc_feature: MA Experiment 20001451 PARAMETER Experiment Name: At_Far-red-induction_P Parameter: Organism Value: A. thaliana
  misc_feature: MA Experiment 20001451 PARAMETER Experiment Name: At_Far-red-induction_P Parameter: Plant Line Value: Columbia
  misc_feature: MA Experiment 20001451 PARAMETER Experiment Name: At_Far-red-induction_P Parameter: Timepoint (hr) Value: 24
  misc_feature: MA Experiment 20001451 PARAMETER Experiment Name: At_Far-red-induction_P Parameter: Tissue Value: Whole Plant
aaatatcttctcttcgtcctcaacagcttctccagaaaatctaggtcacacacttttaaaatcctcgttcccaaaatcgaacaacaacaatggcgtcgcatcctaaagttttcttcgacatgaccatcggcggtgcaccagcggggaagatcgtgatggagctttacaccgacaagacaccaaagacggcggagaatttcagagctctatgcaccggagagaaaggcgtcggacgtagcggaaagccacttcacttcaaaggatcttcgtttcaccgcgtgatcccaaatttcatgtgccaaggaggagatttcaccaaaggtaacggaactggtggcgaatcgatctacggagccaaatttgaggatgagaatttcgagaggaagcacacaggacctgggattttgtcgatggctaacgctggtgctaacactaatggatctcagtttttcatctgtacggtgaagactgattggcttgatggtaagcatgtggtgtttggtcaggtggttgaaggcttggacgttgttaaggctattgagaagatcggatcttcttctggaaagccgacgaagcctgttgtgatcgctgattgtggtgagatctcttcttagattccggttgtggtggtgacggtttcaatttctatgtttctagaagtttcttcttagctaattatggactgtgatctttgctctgtttctgcttttgcgtattttcctaattaagcaccattaataataagaaagttttaagg

SEQ ID NO: 105006 - protein, 174 aa, Arabidopsis thaliana; identical to SEQ ID NO: 23152
  peptide (1)..(174): Ceres Seq. ID no. 13616262
  misc_feature (1)..(174): Homolog of NCBI NO: 15226467 NR Description: cyclophilin (CYP2) [Arabidopsis thaliana]
  misc_feature (1)..(174): Homolog of NCBI NO: 11270324 NR Description: peptidylprolyl isomerase (EC 5.2.1.8) CYP2 - Arabidopsis thaliana >gi|2443757|gb|AAB71402.1| cyclophilin
  misc_feature (5)..(173): Homolog of NCBI NO: 15234781 NR Description: peptidylprolyl isomerase ROC1 [Arabidopsis
  misc_feature (1)..(173): Homolog of NCBI NO: 18076088 NR Description: cyclophilin [Ricinus communis]
  misc_feature (1)..(173): Homolog of NCBI NO: 21886603 NR Description: peptidylprolyl isomerase (cyclophilin) [Betula
  misc_feature (4)..(173): Homolog of NCBI NO: 18146786 NR Description: CYP1 [Vigna radiata]
  misc_feature (4)..(173): Homolog of NCBI NO: 1076510 NR Description: peptidylprolyl isomerase (EC 5.2.1.8) Cyp -
  misc_feature (1)..(173): Homolog of NCBI NO: 15227259 NR Description: cytosolic cyclophilin (ROC3) [Arabidopsis
  misc_feature (3)..(172): Homolog of NCBI NO: 11270316 NR Description: peptidylprolyl isomerase (EC 5.2.1.8) - Digitalis lanata >gi|1563719|emb|CAA69622.1| cyclophylin
  misc_feature (3)..(173): Homolog of NCBI NO: 18376589 NR Description: putative cyclosporin A-binding protein [Picea

SEQ ID NO: 105007 - protein, 164 aa, Arabidopsis thaliana; identical to SEQ ID NO: 23153
  peptide (1)..(164): Ceres Seq. ID no. 13616263
  misc_feature (1)..(164): Homolog of NCBI NO: 15226467 NR Description: cyclophilin (CYP2) [Arabidopsis thaliana]
  misc_feature (1)..(164): Homolog of NCBI NO: 11270324 NR Description: peptidylprolyl isomerase (EC 5.2.1.8) CYP2 - Arabidopsis thaliana >gi|2443757|gb|AAB71402.1| cyclophilin
  misc_feature (1)..(163): Homolog of NCBI NO: 15234781 NR Description: peptidylprolyl isomerase ROC1 [Arabidopsis
  misc_feature (1)..(163): Homolog of NCBI NO: 18076088 NR Description: cyclophilin [Ricinus communis]
  misc_feature (1)..(163): Homolog of NCBI NO: 21886603 NR Description: peptidylprolyl isomerase (cyclophilin) [Betula
  misc_feature (1)..(163): Homolog of NCBI NO: 18146786 NR Description: CYP1 [Vigna radiata]
  misc_feature (1)..(163): Homolog of NCBI NO: 1076510 NR Description: peptidylprolyl isomerase (EC 5.2.1.8) Cyp -
  misc_feature (1)..(163): Homolog of NCBI NO: 15227259 NR Description: cytosolic cyclophilin (ROC3) [Arabidopsis
  misc_feature (1)..(162): Homolog of NCBI NO: 11270316 NR Description: peptidylprolyl isomerase (EC 5.2.1.8) - Digitalis lanata >gi|1563719|emb|CAA69622.1| cyclophylin
  misc_feature (1)..(163): Homolog of NCBI NO: 18376589 NR Description: putative cyclosporin A-binding protein [Picea

SEQ ID NO: 105008 - protein, 152 aa, Arabidopsis thaliana; identical to SEQ ID NO: 23154
  peptide (1)..(152): Ceres Seq. ID no. 13616264
  misc_feature (1)..(152): Homolog of NCBI NO: 15226467 NR Description: cyclophilin (CYP2) [Arabidopsis thaliana]
  misc_feature (1)..(152): Homolog of NCBI NO: 11270324 NR Description: peptidylprolyl isomerase (EC 5.2.1.8) CYP2 - Arabidopsis thaliana >gi|2443757|gb|AAB71402.1| cyclophilin
  misc_feature (1)..(151): Homolog of NCBI NO: 15234781 NR Description: peptidylprolyl isomerase ROC1 [Arabidopsis
  misc_feature (1)..(151): Homolog of NCBI NO: 18076088 NR Description: cyclophilin [Ricinus communis]
  misc_feature (1)..(151): Homolog of NCBI NO: 21886603 NR Description: peptidylprolyl isomerase (cyclophilin) [Betula
  misc_feature (1)..(151): Homolog of NCBI NO: 18146786 NR Description: CYP1 [Vigna radiata]
  misc_feature (1)..(151): Homolog of NCBI NO: 1076510 NR Description: peptidylprolyl isomerase (EC 5.2.1.8) Cyp -
  misc_feature (1)..(151): Homolog of NCBI NO: 15227259 NR Description: cytosolic cyclophilin (ROC3) [Arabidopsis
  misc_feature (1)..(150): Homolog of NCBI NO: 11270316 NR Description: peptidylprolyl isomerase (EC 5.2.1.8) - Digitalis lanata >gi|1563719|emb|CAA69622.1| cyclophylin
  misc_feature (1)..(151): Homolog of NCBI NO: 18376589 NR Description: putative cyclosporin A-binding protein [Picea

SEQ ID NO: 105009 - DNA, 1201 bp, Arabidopsis thaliana
  misc_feature (1)..(1201): Ceres Seq. ID no. 13616265
  misc_feature: MA Experiment ID: 20000307 Result: Up-regulated in Transcription
  misc_feature: MA Experiment 20000307 PARAMETER Experiment Name: At_Germinating_Seeds_Sub_P Parameter: Age (hr) Value: 24 vs. 0
  misc_feature: MA Experiment 20000307 PARAMETER Experiment Name: At_Germinating_Seeds_Sub_P Parameter: Organism Value: A. thaliana
  misc_feature: MA Experiment 20000307 PARAMETER Experiment Name: At_Germinating_Seeds_Sub_P Parameter: Plant Line Value: WS
  misc_feature: MA Experiment 20000307 PARAMETER Experiment Name: At_Germinating_Seeds_Sub_P Parameter: Tissue Value: Germinating Seeds
  misc_feature: MA Experiment ID: 20000315 Result: Up-regulated in Transcription
  misc_feature: MA Experiment 20000315 PARAMETER Experiment Name: At_14day_Shoots-Roots_Sub_P Parameter: Age (day) Value: 14
  misc_feature: MA Experiment 20000315 PARAMETER Experiment Name: At_14day_Shoots-Roots_Sub_P Parameter: Organism Value: A. thaliana
  misc_feature: MA Experiment 20000315 PARAMETER Experiment Name: At_14day_Shoots-Roots_Sub_P Parameter: Plant Line Value: WS
  misc_feature: MA Experiment 20000315 PARAMETER Experiment Name: At_14day_Shoots-Roots_Sub_P Parameter: Tissue Value: Shoots vs. Whole Plant
  misc_feature: MA Experiment ID: 20000355 Result: Up-regulated in Transcription
  misc_feature: MA Experiment 20000355 PARAMETER Experiment Name: At_Siliques_Sub_P Parameter: Age (day) Value: 21
  misc_feature: MA Experiment 20000355 PARAMETER Experiment Name: At_Siliques_Sub_P Parameter: Organism Value: A. thaliana
  misc_feature: MA Experiment 20000355 PARAMETER Experiment Name: At_Siliques_Sub_P Parameter: Plant Line Value: WS
  misc_feature: MA Experiment 20000355 PARAMETER Experiment Name: At_Siliques_Sub_P Parameter: Tissue Value: Less Than 5mm Siliques vs. Whole Plant
atatcttctttctcctctactagttacatatcttcaacaaagtgaatctcatgaggatattaccgaaaagcggaggaggtgctctttgcctcctctttgtgtttgctctttgttcggtggctcattcccttagctgtgacgtcaaggttgttggcgatgtcgaagtcattggctactcagaaatcagcaaaatcaagatccccaatgcattctcaggacttcgagttacgatagaatgcaaggcggccgattcaaaaggccattttgtaacgaggggaagcggagaagtggacgaaacaggaaagtttcatcttaatattcctcatgacattgtcggtgatgacggaactctaaaagaagcttgctatgctcatcttcaaagtgccttcggcaacccttgtccggcccacgatggccttgaggcctccaagatcgtgtttctatcgaaatccggccaaaaccacgttttgggtctcaaaaaaagtcttaaattctcaccagaagtttgcatctcaaagttcttttggcatatgcctaagttccctttacctcctccgcttaatctcccaccgttaacgtttcctaagatcaagaagccttgtcccccaatttacaaaccaccggtggtgatccctaagaagccgtgtccaccaaagattgcacataaacccatctacaagccgccggttcccatctacaagcctccagtgcctatctacaagccaccagtggttatccccaagaaaccgtgtccaccaaagatacacaagcccatctacaagccacccgtgcctatctacaagcctccagtggtgatcccaaagaagacatttcctccacttcacaagccgatctacaagcacccggttcctatctacaaaccaatcttcaagccgccagtggtggtgattccaaagaaaccatgtccaccacttcccaagtttccacacttcccacctaaatacattccacaccctaagttcggaaaatggcctcctttcccttctcatccttgataaagatgcaaaatcctctgtctttcttaatttaagaaaagtgatcgagtgatgccacaaaagaatgttcctttgttgctttgttgaattctacgtagatgtttcatgtttatgtatcgtaaattccagccaatcatatttgtaattttttaccgttagaataaatctgtaatctcgtttctgtt

SEQ ID NO: 105010 - protein, 321 aa, Arabidopsis thaliana
  peptide (1)..(321): Ceres Seq. ID no. 13616266
  misc_feature (160)..(321): Pfam Name: Extensin-like region Pfam Description: Extensin-like region
  misc_feature (1)..(321): Homolog of NCBI NO: 15226468 NR Description: proline-rich protein family [Arabidopsis thaliana]
  misc_feature (1)..(321): Homolog of NCBI NO: 7620011 NR Description: proline-rich protein 2 [Arabidopsis thaliana]
  misc_feature (1)..(320): Homolog of NCBI NO: 7620015 NR Description: proline-rich protein 4 [Arabidopsis thaliana]
  misc_feature (1)..(316): Homolog of NCBI NO: 6782442 NR Description: proline-rich protein [Arabidopsis thaliana]
  misc_feature (1)..(309): Homolog of NCBI NO: 15234785 NR Description: proline-rich protein family [Arabidopsis thaliana]
  misc_feature (12)..(310): Homolog of NCBI NO: 7489265 NR Description: proline-rich protein GPP1 - potato
  misc_feature (14)..(272): Homolog of NCBI NO: 6782440 NR Description: proline-rich protein [Nicotiana glauca]
  misc_feature (161)..(321): Homolog of NCBI NO: 15234785 NR Description: proline-rich protein family [Arabidopsis thaliana]
  misc_feature (162)..(321): Homolog of NCBI NO: 6782442 NR Description: proline-rich protein [Arabidopsis thaliana]
  misc_feature (162)..(321): Homolog of NCBI NO: 7620015 NR Description: proline-rich protein 4 [Arabidopsis thaliana]
MRILPKSGGGALCLLFVFALCSVAHSLSCDVKVVGDVEVIGYSEISKIKIPNAFSGLRVTIECKAADSKGHFVTRGSGEVDETGKFHLNIPHDIVGDDGTLKEACYAHLQSAFGNPCPAHDGLEASKIVFLSKSGQNHVLGLKKSLKFSPEVCISKFFWHMPKFPLPPPLNLPPLTFPKIKKPCPPIYKPPVVIPKKPCPPKIAHKPIYKPPVPIYKPPVPIYKPPVVIPKKPCPPKIHKPIYKPPVPIYKPPVVIPKKTFPPLHKPIYKHPVPIYKPIFKPPVVVIPKKPCPPLPKFPHFPPKYIPHPKFGKWPPFPSHP

SEQ ID NO: 105011 - protein, 161 aa, Arabidopsis thaliana; identical to SEQ ID NO: 49377
  peptide (1)..(161): Ceres Seq. ID no. 13616267
  misc_feature (1)..(161): Pfam Name: Extensin-like region Pfam Description: Extensin-like region
  misc_feature (1)..(161): Homolog of NCBI NO: 15226468 NR Description: proline-rich protein family [Arabidopsis thaliana]
  misc_feature (1)..(161): Homolog of NCBI NO: 7620011 NR Description: proline-rich protein 2 [Arabidopsis thaliana]
  misc_feature (1)..(160): Homolog of NCBI NO: 7620015 NR Description: proline-rich protein 4 [Arabidopsis thaliana]
  misc_feature (1)..(156): Homolog of NCBI NO: 6782442 NR Description: proline-rich protein [Arabidopsis thaliana]
  misc_feature (1)..(149): Homolog of NCBI NO: 15234785 NR Description: proline-rich protein family [Arabidopsis thaliana]
  misc_feature (1)..(150): Homolog of NCBI NO: 7489265 NR Description: proline-rich protein GPP1 - potato
  misc_feature (1)..(112): Homolog of NCBI NO: 6782440 NR Description: proline-rich protein [Nicotiana glauca]
  misc_feature (1)..(161): Homolog of NCBI NO: 15234785 NR Description: proline-rich protein family [Arabidopsis thaliana]
  misc_feature (2)..(161): Homolog of NCBI NO: 6782442 NR Description: proline-rich protein [Arabidopsis thaliana]
  misc_feature (2)..(161): Homolog of NCBI NO: 7620015 NR Description: proline-rich protein 4 [Arabidopsis thaliana]

SEQ ID NO: 105012 - DNA, 1082 bp, Arabidopsis thaliana
  misc_feature (1)..(1082): Ceres Seq. ID no. 13616268
  misc_feature: MA Experiment ID: 108668 Result: Up-regulated in Transcription
  misc_feature: MA Experiment 108668 PARAMETER Experiment Name: At_2mM_SA_cDNA_P Parameter: Plant Line Value: WS
  misc_feature: MA Experiment 108668 PARAMETER Experiment Name: At_2mM_SA_cDNA_P Parameter: Timepoint (hr) Value: 6
  misc_feature: MA Experiment 108668 PARAMETER Experiment Name: At_2mM_SA_cDNA_P Parameter: Treatment Value: 2mM SA vs. No Treatment
  misc_feature: MA Experiment ID: 20000180 Result: Up-regulated in Transcription
  misc_feature: MA Experiment 20000180 PARAMETER Experiment Name: At_Germinating_Seeds_P Parameter: Age (hr) Value: 24 vs. 0
  misc_feature: MA Experiment 20000180 PARAMETER Experiment Name: At_Germinating_Seeds_P Parameter: Tissue Value: Germinating Seeds
  misc_feature: MA Experiment ID: 20000185 Result: Up-regulated in Transcription
  misc_feature: MA Experiment 20000185 PARAMETER Experiment Name: At_Roots__P Parameter: Age (day) Value: 7 vs. 21
  misc_feature: MA Experiment 20000185 PARAMETER Experiment Name: At_Roots__P Parameter: Organism Value: A. thaliana
  misc_feature: MA Experiment 20000185 PARAMETER Experiment Name: At_Roots__P Parameter: Tissue Value: Roots vs. Whole Plant
  misc_feature: MA Experiment ID: 20000234 Result: Up-regulated in Transcription
  misc_feature: MA Experiment 20000234 PARAMETER Experiment Name: At_Siliques_P Parameter: Age (day) Value: 21
  misc_feature: MA Experiment 20000234 PARAMETER Experiment Name: At_Siliques_P Parameter: Organism Value: A. thaliana
  misc_feature: MA Experiment 20000234 PARAMETER Experiment Name: At_Siliques_P Parameter: Plant Line Value: WS
  misc_feature: MA Experiment 20000234 PARAMETER Experiment Name: At_Siliques_P Parameter: Tissue Value: Less Than 5mm Siliques vs. Whole Plant
  misc_feature: MA Experiment ID: 20000286 Result: Up-regulated in Transcription
  misc_feature: MA Experiment 20000286 PARAMETER Experiment Name: At_Open_Flower_P Parameter: Age (day) Value: 21
  misc_feature: MA Experiment 20000286 PARAMETER Experiment Name: At_Open_Flower_P Parameter: Plant Line Value: WS
  misc_feature: MA Experiment 20000286 PARAMETER Experiment Name: At_Open_Flower_P Parameter: Tissue Value: Half Open vs. Whole Plant
  misc_feature: MA Experiment ID: 20000439 Result: Up-regulated in Transcription
  misc_feature: MA Experiment 20000439 PARAMETER Experiment Name: At_Roots__P Parameter: Age (day) Value: 14 vs. 21
  misc_feature: MA Experiment 20000439 PARAMETER Experiment Name: At_Roots__P Parameter: Organism Value: A. thaliana
  misc_feature: MA Experiment 20000439 PARAMETER Experiment Name: At_Roots__P Parameter: Tissue Value: Roots vs. Whole Plant
  misc_feature: MA Experiment ID: 20000794 Result: Down-regulated in Transcription
  misc_feature: MA Experiment 20000794 PARAMETER Experiment Name: At_Petals_P Parameter: Age (day) Value: 23-25 days
  misc_feature: MA Experiment 20000794 PARAMETER Experiment Name: At_Petals_P Parameter: Plant Line Value: WS
  misc_feature: MA Experiment 20000794 PARAMETER Experiment Name: At_Petals_P Parameter: Tissue Value: Petals vs. Whole plant
  misc_feature: MA Experiment ID: 20001451 Result: Down-regulated in Transcription
  misc_feature: MA Experiment 20001451 PARAMETER Experiment Name: At_Far-red-induction_P Parameter: Age (day) Value: 7
  misc_feature: MA Experiment 20001451 PARAMETER Experiment Name: At_Far-red-induction_P Parameter: Light Value: Far-red vs. White
  misc_feature: MA Experiment 20001451 PARAMETER Experiment Name: At_Far-red-induction_P Parameter: Organism Value: A. thaliana
  misc_feature: MA Experiment 20001451 PARAMETER Experiment Name: At_Far-red-induction_P Parameter: Plant Line Value: Columbia
  misc_feature: MA Experiment 20001451 PARAMETER Experiment Name: At_Far-red-induction_P Parameter: Timepoint (hr) Value: 24
  misc_feature: MA Experiment 20001451 PARAMETER Experiment Name: At_Far-red-induction_P Parameter: Tissue Value: Whole Plant
agtgtgaaagagcaaaagcataaatagcatcgagagagacactgttctcattcattcgcaaattcgttgaccatatttgatagaatcaagcgatgatgaatcttagggttttgttcctcgctctccttctccttgcatctcctctgcttcaagttgctagatgtcaatcggatgccgaggatcattcaagtcttgttgacgatgttgtgggagaaaacactgatgatgcggttgaggaagatgaccatgatttggatatgaacttgtcctcatttccaggagttgagactgtttgtgttttccccaaaaacagtgccaaattggttccagctggagaagagactgagctccttgttggtcttaaaaatgaagggaaaactagagtaggtgtgatgggaattagggccagcgttcatcttccttatgatcataagttgttggttcagaatctaaccatgttgagacttaacaatgcatccatcccaacgtctcttcaagcaacattcccatacatctttgcagtcagccagtacttgcagcctggagcatttgatctggtgggttatatcatatacgatgtggaaggaaagccataccagagtgtcttctacaatggaaccatagaggtagttgaatctggaggtcttctcagcggcgaatctgttttccttttaacactcggaatcggtctcctcctcctcctcggtctatgggcatacagccaagttcagcgtctcaccaagaaaaccaaaaaggtttccaaggtggaagtaggaactaggtctaccgaggcatcactcgatgaatggctcgagggaactactttggccaagacatcgtctgggaaaacaaagaacaagaagaactaaagtagagctgttttgctccttccagttgttatagactcagcttcggcgttttgaaagagtttccaagtttaaagttcagtcttgaggaaatttagggttttaaacgacactttttttgttccagcattgtactctttagacaatctttacttcttgtcataaatattctcctcatgaaacaagttaacttataaatggtttagatctgttttt

SEQ ID NO: 105013 - protein, 258 aa, Arabidopsis thaliana; identical to SEQ ID NO: 20928
  peptide (1)..(258): Ceres Seq. ID no. 13616269
  misc_feature (1)..(258): Homolog of NCBI NO: 18399609 NR Description: signal sequence receptor, alpha subunit
  misc_feature (1)..(258): Homolog of NCBI NO: 21555380 NR Description: putative signal sequence receptor, alpha subunit
  misc_feature (2)..(258): Homolog of NCBI NO: 25335776 NR Description: hypothetical protein At2g21160 [imported] -
  misc_feature (6)..(258): Homolog of NCBI NO: 547391 NR Description: alpha-subunit; putative
  misc_feature (126)..(257): Homolog of NCBI NO: 15227250 NR Description: TRAP protein -related [Arabidopsis thaliana] putative TRAP protein [Arabidopsis thaliana]
  misc_feature (10)..(258): Homolog of NCBI NO: 34875232 NR Description: similar to Ac2-238 [Rattus norvegicus]
  misc_feature (10)..(258): Homolog of NCBI NO: 31982666 NR Description: signal sequence receptor, alpha;
  misc_feature (4)..(258): Homolog of NCBI NO: 34783867 NR Description: Unknown (protein for MGC:64448) [Xenopus laevis]
  misc_feature (1)..(258): Homolog of NCBI NO: 4507237 NR Description: signal sequence receptor, alpha; TRAP alpha [Homo
  misc_feature (10)..(258): Homolog of NCBI NO: 12846635 NR Description: unnamed protein product [Mus musculus]

SEQ ID NO: 105014 - protein, 257 aa, Arabidopsis thaliana; identical to SEQ ID NO: 20929
  peptide (1)..(257): Ceres Seq. ID no. 13616270
  misc_feature (1)..(257): Homolog of NCBI NO: 18399609 NR Description: signal sequence receptor, alpha subunit
  misc_feature (1)..(257): Homolog of NCBI NO: 21555380 NR Description: putative signal sequence receptor, alpha subunit
  misc_feature (1)..(257): Homolog of NCBI NO: 25335776 NR Description: hypothetical protein At2g21160 [imported] -
  misc_feature (5)..(257): Homolog of NCBI NO: 547391 NR Description: alpha-subunit; putative
  misc_feature (125)..(256): Homolog of NCBI NO: 15227250 NR Description: TRAP protein -related [Arabidopsis thaliana] putative TRAP protein [Arabidopsis thaliana]
  misc_feature (9)..(257): Homolog of NCBI NO: 34875232 NR Description: similar to Ac2-238 [Rattus norvegicus]
  misc_feature (9)..(257): Homolog of NCBI NO: 31982666 NR Description: signal sequence receptor, alpha;
  misc_feature (3)..(257): Homolog of NCBI NO: 34783867 NR Description: Unknown (protein for MGC:64448) [Xenopus laevis]
  misc_feature (1)..(257): Homolog of NCBI NO: 4507237 NR Description: signal sequence receptor, alpha; TRAP alpha [Homo
  misc_feature (9)..(257): Homolog of NCBI NO: 12846635 NR Description: unnamed protein product [Mus musculus]

SEQ ID NO: 105015 - protein, 203 aa, Arabidopsis thaliana; identical to SEQ ID NO: 20930
  peptide (1)..(203): Ceres Seq. ID no. 13616271
  misc_feature (1)..(203): Homolog of NCBI NO: 18399609 NR Description: signal sequence receptor, alpha subunit
  misc_feature (1)..(203): Homolog of NCBI NO: 21555380 NR Description: putative signal sequence receptor, alpha subunit
  misc_feature (1)..(203): Homolog of NCBI NO: 25335776 NR Description: hypothetical protein At2g21160 [imported] -
  misc_feature (1)..(203): Homolog of NCBI NO: 547391 NR Description: alpha-subunit; putative
  misc_feature (71)..(202): Homolog of NCBI NO: 15227250 NR Description: TRAP protein -related [Arabidopsis thaliana] putative TRAP protein [Arabidopsis thaliana]
  misc_feature (1)..(203): Homolog of NCBI NO: 34875232 NR Description: similar to Ac2-238 [Rattus norvegicus]
  misc_feature (1)..(203): Homolog of NCBI NO: 31982666 NR Description: signal sequence receptor, alpha;
  misc_feature (1)..(203): Homolog of NCBI NO: 34783867 NR Description: Unknown (protein for MGC:64448) [Xenopus laevis]
  misc_feature (1)..(203): Homolog of NCBI NO: 4507237 NR Description: signal sequence receptor, alpha; TRAP alpha [Homo
  misc_feature (1)..(203): Homolog of NCBI NO: 12846635 NR Description: unnamed protein product [Mus musculus]

SEQ ID NO: 105016 - DNA, 1101 bp, Arabidopsis thaliana
  misc_feature (1)..(1101): Ceres Seq. ID no. 13616275
  misc_feature: MA Experiment ID: 108488 Result: Down-regulated in Transcription
  misc_feature: MA Experiment ID: 108573 Result: Up-regulated in Transcription
  misc_feature: MA Experiment 108573 PARAMETER Experiment Name: At_Drought_cDNA_P Parameter: Timepoint (hr) Value: 6
  misc_feature: MA Experiment 108573 PARAMETER Experiment Name: At_Drought_cDNA_P Parameter: Tissue Value: Aerial
  misc_feature: MA Experiment 108573 PARAMETER Experiment Name: At_Drought_cDNA_P Parameter: Treatment Value: Drought vs. No Drought
  misc_feature: MA Experiment ID: 20001905 Result: Up-regulated in Transcription
  misc_feature: MA Experiment 20001905 PARAMETER Experiment Name: At_Drought_Reproduction_P Parameter: Age (day) Value: 40
  misc_feature: MA Experiment 20001905 PARAMETER Experiment Name: At_Drought_Reproduction_P Parameter: Organism Value: A. thaliana
  misc_feature: MA Experiment 20001905 PARAMETER Experiment Name: At_Drought_Reproduction_P Parameter: Plant Line Value: WS
  misc_feature: MA Experiment 20001905 PARAMETER Experiment Name: At_Drought_Reproduction_P Parameter: Timepoint (day) Value: 10
  misc_feature: MA Experiment 20001905 PARAMETER Experiment Name: At_Drought_Reproduction_P Parameter: Tissue Value: Rosettes
  misc_feature: MA Experiment 20001905 PARAMETER Experiment Name: At_Drought_Reproduction_P Parameter: Treatment Value: Drought vs. No Drought
gtcgtcacttaaccgagaaagcaaaagagaagaagaagaaggaatcgaaaaatgaagactccgatccacgcggtttcgacatgggtgaggaggcagcctccaaaggtgaaagctttccttgccgtcgtatctggcatggcggctcttgttctcctcaaactcatcgttcacgatcacgacaatctcttcgttgccgccgaagctgttcattctattggaatctctgttcttatctataaactcatgaaggagaagacttgtgctggattgtcattgaaatctcaggagcttacggcgatatttctagctgtgaggctttattgcagttttgtaatggaatatgatatacataccattctggacttggctactttgggaacaactctctgggttatatatatgatccgttttaacctcaaaactacttacatggaggaaaaagacaacttcgctctctattatgtgctggcgccctgtgttgtgctagctgtatggattcatccatcaacgtcacacaatatattgaatagaatatcctggggattctgtgtttacctcgaagctgtttcagtactgccacagttgagagtgatgcagaacacaaagattgtcgaacccttcacggctcattatgtttttgcacttggagtagcaagattttttagctgtgcacactgggttttacagatgatggacacgcacggacgactgcttgtagtgctgggttatggactatggccatcgatggttataatctcagaaatagtccaaacattcatattggcagatttctgttactactacgttaaaagtgttttcggtggccagcttgttctaaggcttccatctggggttgtgtaagttataaaggaaaaaagataagacacattatgacgaaatttgttacacgaagatagatctcagcttggtgtaatctgagtagcctctggttactctcaagttactccctcaggccaagtcctaattctattaactgtgttgtatatttttgtgtgggtcatcatcatagacagtcccttggatattattgacatgattttttccactgcatttgtgctaaattatccttggttcccacgg

SEQ ID NO: 105017 - protein, 269 aa, Arabidopsis thaliana
  peptide (1)..(269): Ceres Seq. ID no. 13616276
  misc_feature (44)..(255): Pfam Name: ER lumen protein retaining receptor Pfam Description: ER lumen protein retaining receptor
  misc_feature (1)..(269): Homolog of NCBI NO: 18399619 NR Description: ER lumen protein retaining receptor -related thaliana] >gi|20197720|gb|AAD29797.2| putative ER lumen protein
  misc_feature (1)..(269): Homolog of NCBI NO: 13430654 NR Description: putative ER lumen protein retaining receptor
  misc_feature (1)..(269): Homolog of NCBI NO: 21537286 NR Description: putative ER lumen protein retaining receptor
  misc_feature (2)..(269): Homolog of NCBI NO: 18420309 NR Description: expressed protein [Arabidopsis thaliana] putative ER lumen protein retaining receptor [Arabidopsis
  misc_feature (1)..(256): Homolog of NCBI NO: 25412019 NR Description: probable ER lumen protein retaining receptor
  misc_feature (4)..(269): Homolog of NCBI NO: 15222871 NR Description: ER lumen protein retaining receptor -related thaliana] >gi|28950707|gb|AAO63277.1| At1g75760 [Arabidopsis
  misc_feature (4)..(269): Homolog of NCBI NO: 9369358 NR Description: F10A5.5 [Arabidopsis thaliana]
  misc_feature (2)..(269): Homolog of NCBI NO: 15223724 NR Description: ER lumen protein-retaining receptor [Arabidopsis
  misc_feature (2)..(256): Homolog of NCBI NO: 25518365 NR Description: hypothetical protein T20H2.24 - Arabidopsis >gi|8779000|gb|AAF79915.1|AC022472_24 Contains similarity to ER protein retaining receptor from Caenorhabditis elegans gi|6686285
  misc_feature (1)..(265): Homolog of NCBI NO: 15230808 NR Description: ER lumen protein retaining receptor -related
MKTPIHAVSTWVRRQPPKVKAFLAVVSGMAALVLLKLIVHDHDNLFVAAEAVHSIGISVLIYKLMKEKTCAGLSLKSQELTAIFLAVRLYCSFVMEYDIHTILDLATLGTTLWVIYMIRFNLKTTYMEEKDNFALYYVLAPCVVLAVWIHPSTSHNILNRISWGFCVYLEAVSVLPQLRVMQNTKIVEPFTAHYVFALGVARFFSCAHWVLQMMDTHGRLLVVLGYGLWPSMVIISEIVQTFILADFCYYYVKSVFGGQLVLRLPSGVV

SEQ ID NO: 105018 - protein, 241 aa, Arabidopsis thaliana; identical to SEQ ID NO: 42097
  peptide (1)..(241): Ceres Seq. ID no. 13616277
  misc_feature (16)..(227): Pfam Name: ER lumen protein retaining receptor Pfam Description: ER lumen protein retaining receptor
  misc_feature (1)..(241): Homolog of NCBI NO: 18399619 NR Description: ER lumen protein retaining receptor -related thaliana] >gi|20197720|gb|AAD29797.2| putative ER lumen protein
  misc_feature (1)..(241): Homolog of NCBI NO: 13430654 NR Description: putative ER lumen protein retaining receptor
  misc_feature (1)..(241): Homolog of NCBI NO: 21537286 NR Description: putative ER lumen protein retaining receptor
  misc_feature (1)..(241): Homolog of NCBI NO: 18420309 NR Description: expressed protein [Arabidopsis thaliana] putative ER lumen protein retaining receptor [Arabidopsis
  misc_feature (1)..(228): Homolog of NCBI NO: 25412019 NR Description: probable ER lumen protein retaining receptor
  misc_feature (1)..(241): Homolog of NCBI NO: 15222871 NR Description: ER lumen protein retaining receptor -related thaliana] >gi|28950707|gb|AAO63277.1| At1g75760 [Arabidopsis
  misc_feature (1)..(241): Homolog of NCBI NO: 9369358 NR Description: F10A5.5 [Arabidopsis thaliana]
  misc_feature (1)..(241): Homolog of NCBI NO: 15223724 NR Description: ER lumen protein-retaining receptor [Arabidopsis
  misc_feature (1)..(228): Homolog of NCBI NO: 25518365 NR Description: hypothetical protein T20H2.24 - Arabidopsis >gi|8779000|gb|AAF79915.1|AC022472_24 Contains similarity to ER protein retaining receptor from Caenorhabditis elegans gi|6686285
  misc_feature (1)..(237): Homolog of NCBI NO: 15230808 NR Description: ER lumen protein retaining receptor -related

SEQ ID NO: 105019 - protein, 205 aa, Arabidopsis thaliana; identical to SEQ ID NO: 42098
  peptide (1)..(205): Ceres Seq. ID no. 13616278
  misc_feature (1)..(191): Pfam Name: ER lumen protein retaining receptor Pfam Description: ER lumen protein retaining receptor
  misc_feature (1)..(205): Homolog of NCBI NO: 18399619 NR Description: ER lumen protein retaining receptor -related thaliana] >gi|20197720|gb|AAD29797.2| putative ER lumen protein
  misc_feature (1)..(205): Homolog of NCBI NO: 13430654 NR Description: putative ER lumen protein retaining receptor
  misc_feature (1)..(205): Homolog of NCBI NO: 21537286 NR Description: putative ER lumen protein retaining receptor
  misc_feature (1)..(205): Homolog of NCBI NO: 18420309 NR Description: expressed protein [Arabidopsis thaliana] putative ER lumen protein retaining receptor [Arabidopsis
  misc_feature (1)..(192): Homolog of NCBI NO: 25412019 NR Description: probable ER lumen protein retaining receptor
  misc_feature (1)..(205): Homolog of NCBI NO: 15222871 NR Description: ER lumen protein retaining receptor -related thaliana] >gi|28950707|gb|AAO63277.1| At1g75760 [Arabidopsis
  misc_feature (1)..(205): Homolog of NCBI NO: 9369358 NR Description: F10A5.5 [Arabidopsis thaliana]
  misc_feature (1)..(205): Homolog of NCBI NO: 15223724 NR Description: ER lumen protein-retaining receptor [Arabidopsis
  misc_feature (1)..(192): Homolog of NCBI NO: 25518365 NR Description: hypothetical protein T20H2.24 - Arabidopsis >gi|8779000|gb|AAF79915.1|AC022472_24 Contains similarity to ER protein retaining receptor from Caenorhabditis elegans gi|6686285
  misc_feature (1)..(201): Homolog of NCBI NO: 15230808 NR Description: ER lumen protein retaining receptor -related

SEQ ID NO: 105020 - DNA, 1165 bp, Arabidopsis thaliana
  misc_feature (1)..(1165): Ceres Seq. ID no. 13616283
  misc_feature: MA Experiment ID: 108461 Result: Up-regulated in Transcription
  misc_feature: MA Experiment 108461 PARAMETER Experiment Name: At_Germinating_Seeds_cDNA_P Parameter: Age (day) Value: 1 vs. 0
  misc_feature: MA Experiment 108461 PARAMETER Experiment Name: At_Germinating_Seeds_cDNA_P Parameter: Tissue Value: Germinating Seeds
  misc_feature: MA Experiment ID: 108595 Result: Down-regulated in Transcription
  misc_feature: MA Experiment 108595 PARAMETER Experiment Name: At_Ler-pi_Ovule_cDNA_P Parameter: Plant Line Value: null
  misc_feature: MA Experiment ID: 20000069 Result: Up-regulated in Transcription
  misc_feature: MA Experiment 20000069 PARAMETER Experiment Name: At_100uM_ABA_Mutants_cDNA_P Parameter: Plant Line Value: CS23
  misc_feature: MA Experiment 20000069 PARAMETER Experiment Name: At_100uM_ABA_Mutants_cDNA_P Parameter: Timepoint (hr) Value: 6
  misc_feature: MA Experiment 20000069 PARAMETER Experiment Name: At_100uM_ABA_Mutants_cDNA_P Parameter: Tissue Value: Aerial
  misc_feature: MA Experiment 20000069 PARAMETER Experiment Name: At_100uM_ABA_Mutants_cDNA_P Parameter: Treatment Value: 100uM ABA vs. No Treatment
  misc_feature: MA Experiment ID: 20000070 Result: Up-regulated in Transcription
  misc_feature: MA Experiment 20000070 PARAMETER Experiment Name: At_100uM_ABA_Mutants_cDNA_P Parameter: Plant Line Value: CS24
  misc_feature: MA Experiment 20000070 PARAMETER Experiment Name: At_100uM_ABA_Mutants_cDNA_P Parameter: Timepoint (hr) Value: 6
  misc_feature: MA Experiment 20000070 PARAMETER Experiment Name: At_100uM_ABA_Mutants_cDNA_P Parameter: Tissue Value: Aerial
  misc_feature: MA Experiment 20000070 PARAMETER Experiment Name: At_100uM_ABA_Mutants_cDNA_P Parameter: Treatment Value: 100uM ABA vs. No Treatment
  misc_feature: MA Experiment ID: 20000071 Result: Up-regulated in Transcription
  misc_feature: MA Experiment 20000071 PARAMETER Experiment Name: At_100uM_ABA_Mutants_cDNA_P Parameter: Plant Line Value: CS8104
  misc_feature: MA Experiment 20000071 PARAMETER Experiment Name: At_100uM_ABA_Mutants_cDNA_P Parameter: Timepoint (hr) Value: 6
  misc_feature: MA Experiment 20000071 PARAMETER Experiment Name: At_100uM_ABA_Mutants_cDNA_P Parameter: Tissue Value: Aerial
  misc_feature: MA Experiment 20000071 PARAMETER Experiment Name: At_100uM_ABA_Mutants_cDNA_P Parameter: Treatment Value: 100uM ABA vs. No Treatment
  misc_feature: MA Experiment ID: 20000089 Result: Up-regulated in Transcription
  misc_feature: MA Experiment ID: 20000117 Result: Up-regulated in Transcription
  misc_feature: MA Experiment 20000117 PARAMETER Experiment Name: At_100uM_ABA_Mutants_cDNA_P Parameter: Plant Line Value: Columbia
  misc_feature: MA Experiment 20000117 PARAMETER Experiment Name: At_100uM_ABA_Mutants_cDNA_P Parameter: Timepoint (hr) Value: 6
  misc_feature: MA Experiment 20000117 PARAMETER Experiment Name: At_100uM_ABA_Mutants_cDNA_P Parameter: Tissue Value: Aerial
  misc_feature: MA Experiment 20000117 PARAMETER Experiment Name: At_100uM_ABA_Mutants_cDNA_P Parameter: Treatment Value: 100uM ABA vs. No Treatment
  misc_feature: MA Experiment ID: 20000180 Result: Up-regulated in Transcription
  misc_feature: MA Experiment 20000180 PARAMETER Experiment Name: At_Germinating_Seeds_P Parameter: Age (hr) Value: 24 vs. 0
  misc_feature: MA Experiment 20000180 PARAMETER Experiment Name: At_Germinating_Seeds_P Parameter: Tissue Value: Germinating Seeds
  misc_feature: MA Experiment ID: 20000184 Result: Down-regulated in Transcription
  misc_feature: MA Experiment 20000184 PARAMETER Experiment Name: At_Shoots__P Parameter: Age (day) Value: 7
  misc_feature: MA Experiment 20000184 PARAMETER Experiment Name: At_Shoots__P Parameter: Tissue Value: Shoots vs. Whole Plant
  misc_feature: MA Experiment ID: 20000227 Result: Up-regulated in Transcription
  misc_feature: MA Experiment 20000227 PARAMETER Experiment Name: At_Root-Tips-vs-Tops_P Parameter: Tissue Value: Root Tips vs. Root Tops
  misc_feature: MA Experiment ID: 20001451 Result: Down-regulated in Transcription
  misc_feature: MA Experiment 20001451 PARAMETER Experiment Name: At_Far-red-induction_P Parameter: Age (day) Value: 7
  misc_feature: MA Experiment 20001451 PARAMETER Experiment Name: At_Far-red-induction_P Parameter: Light Value: Far-red vs. White
  misc_feature: MA Experiment 20001451 PARAMETER Experiment Name: At_Far-red-induction_P Parameter: Organism Value: A. thaliana
  misc_feature: MA Experiment 20001451 PARAMETER Experiment Name: At_Far-red-induction_P Parameter: Plant Line Value: Columbia
  misc_feature: MA Experiment 20001451 PARAMETER Experiment Name: At_Far-red-induction_P Parameter: Timepoint (hr) Value: 24
  misc_feature: MA Experiment 20001451 PARAMETER Experiment Name: At_Far-red-induction_P Parameter: Tissue Value: Whole Plant
  misc_feature: MA Experiment ID: 20001905 Result: Down-regulated in Transcription
  misc_feature: MA Experiment 20001905 PARAMETER Experiment Name: At_Drought_Reproduction_P Parameter: Age (day) Value: 40
  misc_feature: MA Experiment 20001905 PARAMETER Experiment Name: At_Drought_Reproduction_P Parameter: Organism Value: A. thaliana
  misc_feature: MA Experiment 20001905 PARAMETER Experiment Name: At_Drought_Reproduction_P Parameter: Plant Line Value: WS
  misc_feature: MA Experiment 20001905 PARAMETER Experiment Name: At_Drought_Reproduction_P Parameter: Timepoint (day) Value: 10
  misc_feature: MA Experiment 20001905 PARAMETER Experiment Name: At_Drought_Reproduction_P Parameter: Tissue Value: Rosettes
  misc_feature: MA Experiment 20001905 PARAMETER Experiment Name: At_Drought_Reproduction_P Parameter: Treatment Value: Drought vs. No Drought
acactgagaaactctcaatctgagcagatatttacccaatcagggattcaggaagagaagcagagaaagaaatggagataacactgaacagtggcttcaagatgccgatcgtcggcttaggagtatggagaatggagaaggaagggattcgagaccttatcctcaatgccatcaagatcggctatcgccatctcgactgtgctgctgattataggaatgagaccgaagttggtgatgctcttacagaagcattcaagactggtctggttaagagggaggatctcttcattacaaccaagctatggaattcagaccatggccatgtcattgaggcctgcaaagacagtctcaagaaacttcaacttgattacctcgatctcttcctcgttcattttcccgtagcaacgaaacacaccggagtagggacaaccgatagtgctttgggcgatgacggggtattggacatagacacgaccatctctctggaaactacatggcacgacatggaaaagcttgtttctatgggtttagtccgcagcattggaatcagtaactatgatgtctttctaacgagagattgcttggcttactccaagatcaaacctgctgtgaatcagatcgagacacatccttacttccaacgtgattctcttgtcaaattctgccagaaacatggtatctgtgtcactgctcatactcctctcggaggtgccacagccaatgccgagtggtttggcaccgtgtcatgcctggatgatccagttctcaaagatgtggccgagaagtacaaaaagacagtggcacaagttgtcctgaggtggggaatccagagaaaaacggtggtgataccaaagacatcaaagcctgcgagattggaagagaactttcaggttttcgacttcgaactatcgaaagaggacatggaagtgatcaaaagcatggagaggaaataccgcacgaaccaaccagccaagttttggaacattgatctctacgcttgatcacactctctctatctacatgaataaatgaagcttaagaagataaacaacgagaagaagccatagctttacctgaaacattctcaaatgtttgtgagcctatctttcatacataaactcatgttgttaaacagattatgatttcttaagtactacaatatcac

SEQ ID NO: 105021 - protein, 309 aa, Arabidopsis thaliana; identical to SEQ ID NO: 25625
  peptide (1)..(309): Ceres Seq. ID no. 13616284
  misc_feature (1)..(309): Homolog of NCBI NO: 15226489 NR Description: mannose 6-phosphate reductase (NADPH-dependent), [Arabidopsis thaliana] >gi|25283481|pir||A84599 hypothetical
  misc_feature (1)..(309): Homolog of NCBI NO: 21592829 NR Description: putative NADPH dependent mannose 6-phosphate
  misc_feature (1)..(309): Homolog of NCBI NO: 15226502 NR Description: mannose 6-phosphate reductase (NADPH-dependent), [Arabidopsis thaliana] >gi|25283482|pir||B84599 hypothetical
  misc_feature (1)..(309): Homolog of NCBI NO: 21554266 NR Description: putative NADPH dependent mannose 6-phosphate
  misc_feature (1)..(309): Homolog of NCBI NO: 10334991 NR Description: NADPH-dependent mannose 6-phosphate reductase
  misc_feature (1)..(309): Homolog of NCBI NO: 1835701 NR Description: NADPH-dependent mannose 6-phosphate reductase
  misc_feature (3)..(309): Homolog of NCBI NO: 134153 NR Description: NADP-dependent D-sorbitol-6-phosphate
  misc_feature (45)..(309): Homolog of NCBI NO: 19310934 NR Description: NADP dependent sorbitol 6-phosphate dehydrogenase
  misc_feature (45)..(309): Homolog of NCBI NO: 19310926 NR Description: NADP dependent sorbitol 6-phosphate dehydrogenase
  misc_feature (45)..(307): Homolog of NCBI NO: 19310922 NR Description: NADP dependent sorbitol 6-phosphate dehydrogenase

SEQ ID NO: 105022 - protein, 299 aa, Arabidopsis thaliana; identical to SEQ ID NO: 25626
  peptide (1)..(299): Ceres Seq. ID no. 13616285
  misc_feature (1)..(299): Homolog of NCBI NO: 15226489 NR Description: mannose 6-phosphate reductase (NADPH-dependent), [Arabidopsis thaliana] >gi|25283481|pir||A84599 hypothetical
  misc_feature (1)..(299): Homolog of NCBI NO: 21592829 NR Description: putative NADPH dependent mannose 6-phosphate
  misc_feature (1)..(299): Homolog of NCBI NO: 15226502 NR Description: mannose 6-phosphate reductase (NADPH-dependent), [Arabidopsis thaliana] >gi|25283482|pir||B84599 hypothetical
  misc_feature (1)..(299): Homolog of NCBI NO: 21554266 NR Description: putative NADPH dependent mannose 6-phosphate
  misc_feature (1)..(299): Homolog of NCBI NO: 10334991 NR Description: NADPH-dependent mannose 6-phosphate reductase
  misc_feature (1)..(299): Homolog of NCBI NO: 1835701 NR Description: NADPH-dependent mannose 6-phosphate reductase
  misc_feature (1)..(299): Homolog of NCBI NO: 134153 NR Description: NADP-dependent D-sorbitol-6-phosphate
  misc_feature (35)..(299): Homolog of NCBI NO: 19310934 NR Description: NADP dependent sorbitol 6-phosphate dehydrogenase
  misc_feature (35)..(299): Homolog of NCBI NO: 19310926 NR Description: NADP dependent sorbitol 6-phosphate dehydrogenase
  misc_feature (35)..(297): Homolog of NCBI NO: 19310922 NR Description: NADP dependent sorbitol 6-phosphate dehydrogenase

SEQ ID NO: 105023 - protein, 289 aa, Arabidopsis thaliana; identical to SEQ ID NO: 25627
  peptide (1)..(289): Ceres Seq. ID no. 13616286
  misc_feature (1)..(289): Homolog of NCBI NO: 15226489 NR Description: mannose 6-phosphate reductase (NADPH-dependent), [Arabidopsis thaliana] >gi|25283481|pir||A84599 hypothetical
  misc_feature (1)..(289): Homolog of NCBI NO: 21592829 NR Description: putative NADPH dependent mannose 6-phosphate
  misc_feature (1)..(289): Homolog of NCBI NO: 15226502 NR Description: mannose 6-phosphate reductase (NADPH-dependent), [Arabidopsis thaliana] >gi|25283482|pir||B84599 hypothetical
  misc_feature (1)..(289): Homolog of NCBI NO: 21554266 NR Description: putative NADPH dependent mannose 6-phosphate
  misc_feature (1)..(289): Homolog of NCBI NO: 10334991 NR Description: NADPH-dependent mannose 6-phosphate reductase
  misc_feature (1)..(289): Homolog of NCBI NO: 1835701 NR Description: NADPH-dependent mannose 6-phosphate reductase
  misc_feature (1)..(289): Homolog of NCBI NO: 134153 NR Description: NADP-dependent D-sorbitol-6-phosphate
  misc_feature (25)..(289): Homolog of NCBI NO: 19310934 NR Description: NADP dependent sorbitol 6-phosphate dehydrogenase
  misc_feature (25)..(289): Homolog of NCBI NO: 19310926 NR Description: NADP dependent sorbitol 6-phosphate dehydrogenase
  misc_feature (25)..(287): Homolog of NCBI NO: 19310922 NR Description: NADP dependent sorbitol 6-phosphate dehydrogenase

SEQ ID NO: 105024 - DNA, 1088 bp, Arabidopsis thaliana
  misc_feature (1)..(1088): Ceres Seq. ID no. 13616287
  misc_feature: MA Experiment ID: 108461 Result: Up-regulated in Transcription
  misc_feature: MA Experiment 108461 PARAMETER Experiment Name: At_Germinating_Seeds_cDNA_P Parameter: Age (day) Value: 1 vs. 0
  misc_feature: MA Experiment 108461 PARAMETER Experiment Name: At_Germinating_Seeds_cDNA_P Parameter: Tissue Value: Germinating Seeds
  misc_feature: MA Experiment ID: 108595 Result: Down-regulated in Transcription
  misc_feature: MA Experiment 108595 PARAMETER Experiment Name: At_Ler-pi_Ovule_cDNA_P Parameter: Plant Line Value: null
  misc_feature: MA Experiment ID: 20000069 Result: Up-regulated in Transcription
  misc_feature: MA Experiment 20000069 PARAMETER Experiment Name: At_100uM_ABA_Mutants_cDNA_P Parameter: Plant Line Value: CS23
  misc_feature: MA Experiment 20000069 PARAMETER Experiment Name: At_100uM_ABA_Mutants_cDNA_P Parameter: Timepoint (hr) Value: 6
  misc_feature: MA Experiment 20000069 PARAMETER Experiment Name: At_100uM_ABA_Mutants_cDNA_P Parameter: Tissue Value: Aerial
  misc_feature: MA Experiment 20000069 PARAMETER Experiment Name: At_100uM_ABA_Mutants_cDNA_P Parameter: Treatment Value: 100uM ABA vs. No Treatment
  misc_feature: MA Experiment ID: 20000070 Result: Up-regulated in Transcription
  misc_feature: MA Experiment 20000070 PARAMETER Experiment Name: At_100uM_ABA_Mutants_cDNA_P Parameter: Plant Line Value: CS24
  misc_feature: MA Experiment 20000070 PARAMETER Experiment Name: At_100uM_ABA_Mutants_cDNA_P Parameter: Timepoint (hr) Value: 6
  misc_feature: MA Experiment 20000070 PARAMETER Experiment Name: At_100uM_ABA_Mutants_cDNA_P Parameter: Tissue Value: Aerial
  misc_feature: MA Experiment 20000070 PARAMETER Experiment Name: At_100uM_ABA_Mutants_cDNA_P Parameter: Treatment Value: 100uM ABA vs. No Treatment
  misc_feature: MA Experiment ID: 20000071 Result: Up-regulated in Transcription
  misc_feature: MA Experiment 20000071 PARAMETER Experiment Name: At_100uM_ABA_Mutants_cDNA_P Parameter: Plant Line Value: CS8104
  misc_feature: MA Experiment 20000071 PARAMETER Experiment Name: At_100uM_ABA_Mutants_cDNA_P Parameter: Timepoint (hr) Value: 6
  misc_feature: MA Experiment 20000071 PARAMETER Experiment Name: At_100uM_ABA_Mutants_cDNA_P Parameter: Tissue Value: Aerial
  misc_feature: MA Experiment 20000071 PARAMETER Experiment Name: At_100uM_ABA_Mutants_cDNA_P Parameter: Treatment Value: 100uM ABA vs. No Treatment
  misc_feature: MA Experiment ID: 20000089 Result: Up-regulated in Transcription
  misc_feature: MA Experiment ID: 20000117 Result: Up-regulated in Transcription
  misc_feature: MA Experiment 20000117 PARAMETER Experiment Name: At_100uM_ABA_Mutants_cDNA_P Parameter: Plant Line Value: Columbia
  misc_feature: MA Experiment 20000117 PARAMETER Experiment Name: At_100uM_ABA_Mutants_cDNA_P Parameter: Timepoint (hr) Value: 6
  misc_feature: MA Experiment 20000117 PARAMETER Experiment Name: At_100uM_ABA_Mutants_cDNA_P Parameter: Tissue Value: Aerial
  misc_feature: MA Experiment 20000117 PARAMETER Experiment Name: At_100uM_ABA_Mutants_cDNA_P Parameter: Treatment Value: 100uM ABA vs. No Treatment
  misc_feature: MA Experiment ID: 20000180 Result: Up-regulated in Transcription
  misc_feature: MA Experiment 20000180 PARAMETER Experiment Name: At_Germinating_Seeds_P Parameter: Age (hr) Value: 24 vs. 0
  misc_feature: MA Experiment 20000180 PARAMETER Experiment Name: At_Germinating_Seeds_P Parameter: Tissue Value: Germinating Seeds
atactgggaaactctcaattctgagcagatatctacccaatcacggattgaggagagaagcaagaagaagaaatggagattacactgaacagtggcttcaaaatgccgatcatcggcttaggagtttggagaatggagaaagaagagcttcgagaccttatcatcgatgccatcaagatcggttatcgtcatctcgactgtgctgctaattataagaacgaagctgaagttggtgaggctcttacagaagcattcacgacaggtcttgtcaagagggaggatctcttcattacgactaagctatggagttcagaccatggccatgttattgaggcatgcaaagacagtctcaagaaacttcaacttgattacctcgaccttttcctcgttcatatacccatagctacaaaacacacgggaataggaacaaccgatagtgctttgggggatgatggggtattggacatagatacaacaatctctctggaaactacatggcacgacatggaaaagcttgtttctatgggtttagtccgcagcattggaatcagtaactatgatgtctttctaacgagagattgcttggcttactccaagatcaaacctgctgtgaatcagatcgagacacatccttacttccaacgcgattctctagtcaaattctgccagaaacatggtatctgtgtcactgctcatactcctctgggaggtgccacagccaatgccgaatggtttggcaccgtgtcatgtctggatgacccagttctcaaagatgtggccgagaagtacaaacagacagtggcacagattgtcctgaggtggggaattcagaggaacacggtggtgataccaaagacatcgaagcctgaaagattggaagagaattttcaggttttcgacttccaactatcgaaagaggacatggaagtgatcaaaagcatggagaggaattaccgcacgcaccaaacagccaagttttggggcattgagctctacgcttgatcacacacacactctctctctctatctatctatatgaataaatgaagcttaagaatataatatcagataacttcaacttttttaag

SEQ ID NO: 105025 - protein, 309 aa, Arabidopsis thaliana
  peptide (1)..(309): Ceres Seq. ID no. 13616288
  misc_feature (1)..(309): Homolog of NCBI NO: 15226502 NR Description: mannose 6-phosphate reductase (NADPH-dependent), [Arabidopsis thaliana] >gi|25283482|pir||B84599 hypothetical
  misc_feature (1)..(309): Homolog of NCBI NO: 21554266 NR Description: putative NADPH dependent mannose 6-phosphate
  misc_feature (1)..(309): Homolog of NCBI NO: 15226489 NR Description: mannose 6-phosphate reductase (NADPH-dependent), [Arabidopsis thaliana] >gi|25283481|pir||A84599 hypothetical
  misc_feature (1)..(309): Homolog of NCBI NO: 21592829 NR Description: putative NADPH dependent mannose 6-phosphate
  misc_feature (1)..(309): Homolog of NCBI NO: 10334991 NR Description: NADPH-dependent mannose 6-phosphate reductase
  misc_feature (1)..(309): Homolog of NCBI NO: 1835701 NR Description: NADPH-dependent mannose 6-phosphate reductase
  misc_feature (3)..(309): Homolog of NCBI NO: 134153 NR Description: NADP-dependent D-sorbitol-6-phosphate
  misc_feature (45)..(309): Homolog of NCBI NO: 19310926 NR Description: NADP dependent sorbitol 6-phosphate dehydrogenase
  misc_feature (45)..(309): Homolog of NCBI NO: 19310934 NR Description: NADP dependent sorbitol 6-phosphate dehydrogenase
  misc_feature (45)..(307): Homolog of NCBI NO: 19310922 NR Description: NADP dependent sorbitol 6-phosphate dehydrogenase
MEITLNSGFKMPIIGLGVWRMEKEELRDLIIDAIKIGYRHLDCAANYKNEAEVGEALTEAFTTGLVKREDLFITTKLWSSDHGHVIEACKDSLKKLQLDYLDLFLVHIPIATKHTGIGTTDSALGDDGVLDIDTTISLETTWHDMEKLVSMGLVRSIGISNYDVFLTRDCLAYSKIKPAVNQIETHPYFQRDSLVKFCQKHGICVTAHTPLGGATANAEWFGTVSCLDDPVLKDVAEKYKQTVAQIVLRWGIQRNTVVIPKTSKPERLEENFQVFDFQLSKEDMEVIKSMERNYRTHQTAKFWGIELYA

SEQ ID NO: 105026 - protein, 299 aa, Arabidopsis thaliana
  peptide (1)..(299): Ceres Seq. ID no. 13616289
  misc_feature (1)..(299): Homolog of NCBI NO: 15226502 NR Description: mannose 6-phosphate reductase (NADPH-dependent), [Arabidopsis thaliana] >gi|25283482|pir||B84599 hypothetical
  misc_feature (1)..(299): Homolog of NCBI NO: 21554266 NR Description: putative NADPH dependent mannose 6-phosphate
  misc_feature (1)..(299): Homolog of NCBI NO: 15226489 NR Description: mannose 6-phosphate reductase (NADPH-dependent), [Arabidopsis thaliana] >gi|25283481|pir||A84599 hypothetical
  misc_feature (1)..(299): Homolog of NCBI NO: 21592829 NR Description: putative NADPH dependent mannose 6-phosphate
  misc_feature (1)..(299): Homolog of NCBI NO: 10334991 NR Description: NADPH-dependent mannose 6-phosphate reductase
  misc_feature (1)..(299): Homolog of NCBI NO: 1835701 NR Description: NADPH-dependent mannose 6-phosphate reductase
  misc_feature (1)..(299): Homolog of NCBI NO: 134153 NR Description: NADP-dependent D-sorbitol-6-phosphate
  misc_feature (35)..(299): Homolog of NCBI NO: 19310926 NR Description: NADP dependent sorbitol 6-phosphate dehydrogenase
  misc_feature (35)..(299): Homolog of NCBI NO: 19310934 NR Description: NADP dependent sorbitol 6-phosphate dehydrogenase
  misc_feature (35)..(297): Homolog of NCBI NO: 19310922 NR Description: NADP dependent sorbitol 6-phosphate dehydrogenase
MPIIGLGVWRMEKEELRDLIIDAIKIGYRHLDCAANYKNEAEVGEALTEAFTTGLVKREDLFITTKLWSSDHGHVIEACKDSLKKLQLDYLDLFLVHIPIATKHTGIGTTDSALGDDGVLDIDTTISLETTWHDMEKLVSMGLVRSIGISNYDVFLTRDCLAYSKIKPAVNQIETHPYFQRDSLVKFCQKHGICVTAHTPLGGATANAEWFGTVSCLDDPVLKDVAEKYKQTVAQIVLRWGIQRNTVVIPKTSKPERLEENFQVFDFQLSKEDMEVIKSMERNYRTHQTAKFWGIELYA

SEQ ID NO: 105027 - protein, 289 aa, Arabidopsis thaliana
  peptide (1)..(289): Ceres Seq. ID no. 13616290
  misc_feature (1)..(289): Homolog of NCBI NO: 15226502 NR Description: mannose 6-phosphate reductase (NADPH-dependent), [Arabidopsis thaliana] >gi|25283482|pir||B84599 hypothetical
  misc_feature (1)..(289): Homolog of NCBI NO: 21554266 NR Description: putative NADPH dependent mannose 6-phosphate
  misc_feature (1)..(289): Homolog of NCBI NO: 15226489 NR Description: mannose 6-phosphate reductase (NADPH-dependent), [Arabidopsis thaliana] >gi|25283481|pir||A84599 hypothetical
  misc_feature (1)..(289): Homolog of NCBI NO: 21592829 NR Description: putative NADPH dependent mannose 6-phosphate
  misc_feature (1)..(289): Homolog of NCBI NO: 10334991 NR Description: NADPH-dependent mannose 6-phosphate reductase
  misc_feature (1)..(289): Homolog of NCBI NO: 1835701 NR Description: NADPH-dependent mannose 6-phosphate reductase
  misc_feature (1)..(289): Homolog of NCBI NO: 134153 NR Description: NADP-dependent D-sorbitol-6-phosphate
  misc_feature (25)..(289): Homolog of NCBI NO: 19310926 NR Description: NADP dependent sorbitol 6-phosphate dehydrogenase
  misc_feature (25)..(289): Homolog of NCBI NO: 19310934 NR Description: NADP dependent sorbitol 6-phosphate dehydrogenase
  misc_feature (25)..(287): Homolog of NCBI NO: 19310922 NR Description: NADP dependent sorbitol 6-phosphate dehydrogenase
MEKEELRDLIIDAIKIGYRHLDCAANYKNEAEVGEALTEAFTTGLVKREDLFITTKLWSSDHGHVIEACKDSLKKLQLDYLDLFLVHIPIATKHTGIGTTDSALGDDGVLDIDTTISLETTWHDMEKLVSMGLVRSIGISNYDVFLTRDCLAYSKIKPAVNQIETHPYFQRDSLVKFCQKHGICVTAHTPLGGATANAEWFGTVSCLDDPVLKDVAEKYKQTVAQIVLRWGIQRNTVVIPKTSKPERLEENFQVFDFQLSKEDMEVIKSMERNYRTHQTAKFWGIELYA

SEQ ID NO: 105028 - DNA, 1324 bp, Arabidopsis thaliana
  misc_feature (1)..(1324): Ceres Seq. ID no. 13616294
  misc_feature: MA Experiment ID: 108434 Result: Down-regulated in Transcription
  misc_feature: MA Experiment 108434 PARAMETER Experiment Name: At_Root_Tips_cDNA_P Parameter: Tissue Value: Root Tips
  misc_feature: MA Experiment ID: 108573 Result: Up-regulated in Transcription
  misc_feature: MA Experiment 108573 PARAMETER Experiment Name: At_Drought_cDNA_P Parameter: Timepoint (hr) Value: 6
  misc_feature: MA Experiment 108573 PARAMETER Experiment Name: At_Drought_cDNA_P Parameter: Tissue Value: Aerial
  misc_feature: MA Experiment 108573 PARAMETER Experiment Name: At_Drought_cDNA_P Parameter: Treatment Value: Drought vs. No Drought
  misc_feature: MA Experiment ID: 108595 Result: Up-regulated in Transcription
  misc_feature: MA Experiment 108595 PARAMETER Experiment Name: At_Ler-pi_Ovule_cDNA_P Parameter: Plant Line Value: null
  misc_feature: MA Experiment ID: 108668 Result: Up-regulated in Transcription
  misc_feature: MA Experiment 108668 PARAMETER Experiment Name: At_2mM_SA_cDNA_P Parameter: Plant Line Value: WS
  misc_feature: MA Experiment 108668 PARAMETER Experiment Name: At_2mM_SA_cDNA_P Parameter: Timepoint (hr) Value: 6
  misc_feature: MA Experiment 108668 PARAMETER Experiment Name: At_2mM_SA_cDNA_P Parameter: Treatment Value: 2mM SA vs. No Treatment
  misc_feature: MA Experiment ID: 20000182 Result: Up-regulated in Transcription
  misc_feature: MA Experiment 20000182 PARAMETER Experiment Name: At_2mM_SA_P Parameter: Age (day) Value: 14
  misc_feature: MA Experiment 20000182 PARAMETER Experiment Name: At_2mM_SA_P Parameter: Organism Value: A. thaliana
  misc_feature: MA Experiment 20000182 PARAMETER Experiment Name: At_2mM_SA_P Parameter: Plant Line Value: WS
  misc_feature: MA Experiment 20000182 PARAMETER Experiment Name: At_2mM_SA_P Parameter: Timepoint (hr) Value: 6
  misc_feature: MA Experiment 20000182 PARAMETER Experiment Name: At_2mM_SA_P Parameter: Tissue Value: Aerial
  misc_feature: MA Experiment 20000182 PARAMETER Experiment Name: At_2mM_SA_P Parameter: Treatment Value: 2mM SA vs. No Treatment
  misc_feature: MA Experiment ID: 20000227 Result: Up-regulated in Transcription
  misc_feature: MA Experiment 20000227 PARAMETER Experiment Name: At_Root-Tips-vs-Tops_P Parameter: Tissue Value: Root Tips vs. Root Tops
  misc_feature: MA Experiment ID: 20000265 Result: Up-regulated in Transcription
  misc_feature: MA Experiment 20000265 PARAMETER Experiment Name: At_Open_Flower_P Parameter: Age (day) Value: 21
  misc_feature: MA Experiment 20000265 PARAMETER Experiment Name: At_Open_Flower_P Parameter: Plant Line Value: WS
  misc_feature: MA Experiment 20000265 PARAMETER Experiment Name: At_Open_Flower_P Parameter: Tissue Value: Closed Flower vs. Whole Plant
  misc_feature: MA Experiment ID: 20000437 Result: Up-regulated in Transcription
  misc_feature: MA Experiment 20000437 PARAMETER Experiment Name: At_Drought_P Parameter: Age (day) Value: 8
  misc_feature: MA Experiment 20000437 PARAMETER Experiment Name: At_Drought_P Parameter: Organism Value: A. thaliana
  misc_feature: MA Experiment 20000437 PARAMETER Experiment Name: At_Drought_P Parameter: Plant Line Value: WS
  misc_feature: MA Experiment 20000437 PARAMETER Experiment Name: At_Drought_P Parameter: Timepoint (hr) Value: 24
  misc_feature: MA Experiment 20000437 PARAMETER Experiment Name: At_Drought_P Parameter: Tissue Value: Whole Plant
  misc_feature: MA Experiment 20000437 PARAMETER Experiment Name: At_Drought_P Parameter: Treatment Value: Drought vs. No Drought
  misc_feature: MA Experiment ID: 20000438 Result: Down-regulated in Transcription
  misc_feature: MA Experiment 20000438 PARAMETER Experiment Name: At_Shoots__P Parameter: Age (day) Value: 14
  misc_feature: MA Experiment 20000438 PARAMETER Experiment Name: At_Shoots__P Parameter: Tissue Value: Shoots vs. Whole Plant
  misc_feature: MA Experiment ID: 20000453 Result: Up-regulated in Transcription
  misc_feature: MA Experiment 20000453 PARAMETER Experiment Name: At_100uM_ABA_P Parameter: Age (day) Value: 15
  misc_feature: MA Experiment 20000453 PARAMETER Experiment Name: At_100uM_ABA_P Parameter: Organism Value: A. thaliana
  misc_feature: MA Experiment 20000453 PARAMETER Experiment Name: At_100uM_ABA_P Parameter: Plant Line Value: WS
  misc_feature: MA Experiment 20000453 PARAMETER Experiment Name: At_100uM_ABA_P Parameter: Timepoint (hr) Value: 24
  misc_feature: MA Experiment 20000453 PARAMETER Experiment Name: At_100uM_ABA_P Parameter: Tissue Value: Aerial
  misc_feature: MA Experiment 20000453 PARAMETER Experiment Name: At_100uM_ABA_P Parameter: Treatment Value: 100uM ABA vs. No Treatment
  misc_feature: MA Experiment ID: 20000495 Result: Down-regulated in Transcription
  misc_feature: MA Experiment 20000495 PARAMETER Experiment Name: At_Guard_Cells_P Parameter: Harvest Date Value: 8/2/2002
  misc_feature: MA Experiment 20000495 PARAMETER Experiment Name: At_Guard_Cells_P Parameter: Organism Value: A. thaliana
  misc_feature: MA Experiment 20000495 PARAMETER Experiment Name: At_Guard_Cells_P Parameter: Tissue Value: Guard Cells vs. Leaves
  misc_feature: MA Experiment ID: 20001557 Result: Up-regulated in Transcription
  misc_feature: MA Experiment 20001557 PARAMETER Experiment Name: At_Drought_Soil_Dry_P Parameter: Age (day) Value: 27
  misc_feature: MA Experiment 20001557 PARAMETER Experiment Name: At_Drought_Soil_Dry_P Parameter: Organism Value: A. thaliana
  misc_feature: MA Experiment 20001557 PARAMETER Experiment Name: At_Drought_Soil_Dry_P Parameter: Plant Line Value: WS
  misc_feature: MA Experiment 20001557 PARAMETER Experiment Name: At_Drought_Soil_Dry_P Parameter: Post Timepoint (hr) Value: 3
  misc_feature: MA Experiment 20001557 PARAMETER Experiment Name: At_Drought_Soil_Dry_P Parameter: Post-Treatment Value: Re-Water vs. No Drought
  misc_feature: MA Experiment 20001557 PARAMETER Experiment Name: At_Drought_Soil_Dry_P Parameter: Timepoint (day) Value: 13
  misc_feature: MA Experiment 20001557 PARAMETER Experiment Name: At_Drought_Soil_Dry_P Parameter: Treatment Value: Drought vs. No Drought
  misc_feature: MA Experiment ID: 20001904 Result: Up-regulated in Transcription
  misc_feature: MA Experiment 20001904 PARAMETER Experiment Name: At_Drought_Reproduction_P Parameter: Age (day) Value: 37
  misc_feature: MA Experiment 20001904 PARAMETER Experiment Name: At_Drought_Reproduction_P Parameter: Organism Value: A. thaliana
  misc_feature: MA Experiment 20001904 PARAMETER Experiment Name: At_Drought_Reproduction_P Parameter: Plant Line Value: WS
  misc_feature: MA Experiment 20001904 PARAMETER Experiment Name: At_Drought_Reproduction_P Parameter: Timepoint (day) Value: 7
  misc_feature: MA Experiment 20001904 PARAMETER Experiment Name: At_Drought_Reproduction_P Parameter: Tissue Value: Rosettes
  misc_feature: MA Experiment 20001904 PARAMETER Experiment Name: At_Drought_Reproduction_P Parameter: Treatment Value: Drought vs. No Drought
  misc_feature: MA Experiment ID: 20001905 Result: Up-regulated in Transcription
  misc_feature: MA Experiment 20001905 PARAMETER Experiment Name: At_Drought_Reproduction_P Parameter: Age (day) Value: 40
  misc_feature: MA Experiment 20001905 PARAMETER Experiment Name: At_Drought_Reproduction_P Parameter: Organism Value: A. thaliana
  misc_feature: MA Experiment 20001905 PARAMETER Experiment Name: At_Drought_Reproduction_P Parameter: Plant Line Value: WS
  misc_feature: MA Experiment 20001905 PARAMETER Experiment Name: At_Drought_Reproduction_P Parameter: Timepoint (day) Value: 10
  misc_feature: MA Experiment 20001905 PARAMETER Experiment Name: At_Drought_Reproduction_P Parameter: Tissue Value: Rosettes
  misc_feature: MA Experiment 20001905 PARAMETER Experiment Name: At_Drought_Reproduction_P Parameter: Treatment Value: Drought vs. No Drought
  misc_feature: MA Experiment ID: 20001906 Result: Up-regulated in Transcription
  misc_feature: MA Experiment 20001906 PARAMETER Experiment Name: At_Drought_Reproduction_P Parameter: Age (day) Value: 35
  misc_feature: MA Experiment 20001906 PARAMETER Experiment Name: At_Drought_Reproduction_P Parameter: Organism Value: A. thaliana
  misc_feature: MA Experiment 20001906 PARAMETER Experiment Name: At_Drought_Reproduction_P Parameter: Plant Line Value: WS
  misc_feature: MA Experiment 20001906 PARAMETER Experiment Name: At_Drought_Reproduction_P Parameter: Timepoint (day) Value: 5
  misc_feature: MA Experiment 20001906 PARAMETER Experiment Name: At_Drought_Reproduction_P Parameter: Tissue Value: Siliques
  misc_feature: MA Experiment 20001906 PARAMETER Experiment Name: At_Drought_Reproduction_P Parameter: Treatment Value: Drought vs. No Drought
  misc_feature: MA Experiment ID: 20001908 Result: Up-regulated in Transcription
  misc_feature: MA Experiment 20001908 PARAMETER Experiment Name: At_Drought_Reproduction_P Parameter: Age (day) Value: 40
  misc_feature: MA Experiment 20001908 PARAMETER Experiment Name: At_Drought_Reproduction_P Parameter: Organism Value: A. thaliana
  misc_feature: MA Experiment 20001908 PARAMETER Experiment Name: At_Drought_Reproduction_P Parameter: Plant Line Value: WS
  misc_feature: MA Experiment 20001908 PARAMETER Experiment Name: At_Drought_Reproduction_P Parameter: Timepoint (day) Value: 10
  misc_feature: MA Experiment 20001908 PARAMETER Experiment Name: At_Drought_Reproduction_P Parameter: Tissue Value: Siliques
  misc_feature: MA Experiment 20001908 PARAMETER Experiment Name: At_Drought_Reproduction_P Parameter: Treatment Value: Drought vs. No Drought
  misc_feature: MA Experiment ID: 20001911 Result: Up-regulated in Transcription
  misc_feature: MA Experiment 20001911 PARAMETER Experiment Name: At_Drought_Reproduction_P Parameter: Age (day) Value: 40
  misc_feature: MA Experiment 20001911 PARAMETER Experiment Name: At_Drought_Reproduction_P Parameter: Organism Value: A. thaliana
  misc_feature: MA Experiment 20001911 PARAMETER Experiment Name: At_Drought_Reproduction_P Parameter: Plant Line Value: WS
  misc_feature: MA Experiment 20001911 PARAMETER Experiment Name: At_Drought_Reproduction_P Parameter: Timepoint (day) Value: 10
  misc_feature: MA Experiment 20001911 PARAMETER Experiment Name: At_Drought_Reproduction_P Parameter: Tissue Value: Flowers
  misc_feature: MA Experiment 20001911 PARAMETER Experiment Name: At_Drought_Reproduction_P Parameter: Treatment Value: Drought vs. No Drought
aaaaccgtaaactcttgcgcgtcgtataaaacaacaaacctgaagtagaatcgagagatattgttgcccccatttacatttctgcacgatcatcatcatggtgaaagagactgaatactacgagatcttaggcgtcaaaactgatgcttcagatgctgagattaaaaaggcttactacttaaaagcaaggaaagttcatccagacaagaaccctggagaccctcaagctgctaaaaactttcaggttttaggtgaggcttatcaggttctaagcaatccggataagcgagcagcttatgacaaatatggcaaagaaggggtccaacaggatgcaatggttgatcctgcagctgtatttggtatgcttttcggaagcgaagtctttgaagaatacgttggccagcttgcacttgcttatttggcatctatcgaagctgacttagaatcacatgaccctgaaatcagaaagcaaatgcttcaagacaagatcaaagctcttcaaaaggagagggaagacaagctcgccgctacattgaaaaacaaacttgaaccctttgtggaaagacaaacagatgaatttatcgaatgggcaaacgaagaggcaaagcggctttcttctgccggttttggcgaggcaatgatgcatactattggttacatttacacaagaaaagctgctaaagaaatcgggaaagacaagcgatatatgaaagtaccattcttagctgaatgggtgcgtgacaaaggccaccatatgaaatctcaagtgatggctgcttctggtgcggtttcgttacttcagttgcaggatgaagtaaacaagttgaatgaacaccaaggagagaacaaagaggaacatattcagaaagctattgaagctaaaatggatgctttgcttcaatctctttggcaaatcaatgttctcgacatcgaatccacgctatctcgtgtttgccaatctgtgcttaaagatccaagtgtttcgaaggatgttcttcgagctcgtgccataggactgaagaaacttggaacgatcttccagggtgctaagaagccgtacacgagaggaagcagcttgcgtcgggaagccaccaccgtgaaaatggacaccggaggttcttcaaaggcgacgtcttgaaactccggaacttaaaatgctgtttcttttattggttgaagttggatttgtccttcgttttttactttccccagttttgtagagattgctttctatgttaacttttttttcgtgtagatgttacatttaaggtggtgcattactgcattctcattaaaatcttttcgtcacattattcaaatttct

SEQ ID NO: 105029 - protein, 346 aa, Arabidopsis thaliana; identical to SEQ ID NO: 42809
  peptide (1)..(346): Ceres Seq. ID no. 13616295
  misc_feature (6)..(71): Pfam Name: DnaJ domain Pfam Description: DnaJ domain
  misc_feature (1)..(346): Homolog of NCBI NO: 15226572 NR Description: DnaJ protein family [Arabidopsis thaliana]
  misc_feature (1)..(343): Homolog of NCBI NO: 15234962 NR Description: DnaJ protein family [Arabidopsis thaliana]
  misc_feature (133)..(346): Homolog of NCBI NO: 27817868 NR Description: OJ1081_B12.17 [Oryza sativa (japonica
  misc_feature (1)..(133): Homolog of NCBI NO: 27817868 NR Description: OJ1081_B12.17 [Oryza sativa (japonica
  misc_feature (1)..(318): Homolog of NCBI NO: 15223142 NR Description: DnaJ protein family [Arabidopsis thaliana]
  misc_feature (1)..(318): Homolog of NCBI NO: 26449747 NR Description: putative DnaJ protein [Arabidopsis thaliana]
  misc_feature (1)..(199): Homolog of NCBI NO: 25458468 NR Description: dnaJ-like protein [imported] - rice
  misc_feature (230)..(315): Homolog of NCBI NO: 25458468 NR Description: dnaJ-like protein [imported] - rice
  misc_feature (1)..(318): Homolog of NCBI NO: 18394951 NR Description: DnaJ protein family [Arabidopsis thaliana]
  misc_feature (1)..(346): Homolog of NCBI NO: 30699227 NR Description: DnaJ protein family [Arabidopsis thaliana]

SEQ ID NO: 105030 - protein, 267 aa, Arabidopsis thaliana; identical to SEQ ID NO: 42810
  peptide (1)..(267): Ceres Seq. ID no. 13616296
  misc_feature (1)..(267): Homolog of NCBI NO: 15226572 NR Description: DnaJ protein family [Arabidopsis thaliana]
  misc_feature (1)..(264): Homolog of NCBI NO: 15234962 NR Description: DnaJ protein family [Arabidopsis thaliana]
  misc_feature (54)..(267): Homolog of NCBI NO: 27817868 NR Description: OJ1081_B12.17 [Oryza sativa (japonica
  misc_feature (1)..(54): Homolog of NCBI NO: 27817868 NR Description: OJ1081_B12.17 [Oryza sativa (japonica
  misc_feature (1)..(239): Homolog of NCBI NO: 15223142 NR Description: DnaJ protein family [Arabidopsis thaliana]
  misc_feature (1)..(239): Homolog of NCBI NO: 26449747 NR Description: putative DnaJ protein [Arabidopsis thaliana]
  misc_feature (1)..(120): Homolog of NCBI NO: 25458468 NR Description: dnaJ-like protein [imported] - rice
  misc_feature (151)..(236): Homolog of NCBI NO: 25458468 NR Description: dnaJ-like protein [imported] - rice
  misc_feature (1)..(239): Homolog of NCBI NO: 18394951 NR Description: DnaJ protein family [Arabidopsis thaliana]
  misc_feature (1)..(267): Homolog of NCBI NO: 30699227 NR Description: DnaJ protein family [Arabidopsis thaliana]

SEQ ID NO: 105031 - protein, 258 aa, Arabidopsis thaliana; identical to SEQ ID NO: 42811
  peptide (1)..(258): Ceres Seq. ID no. 13616297
  misc_feature (1)..(258): Homolog of NCBI NO: 15226572 NR Description: DnaJ protein family [Arabidopsis thaliana]
  misc_feature (1)..(255): Homolog of NCBI NO: 15234962 NR Description: DnaJ protein family [Arabidopsis thaliana]
  misc_feature (45)..(258): Homolog of NCBI NO: 27817868 NR Description: OJ1081_B12.17 [Oryza sativa (japonica
  misc_feature (1)..(45): Homolog of NCBI NO: 27817868 NR Description: OJ1081_B12.17 [Oryza sativa (japonica
  misc_feature (1)..(230): Homolog of NCBI NO: 15223142 NR Description: DnaJ protein family [Arabidopsis thaliana]
  misc_feature (1)..(230): Homolog of NCBI NO: 26449747 NR Description: putative DnaJ protein [Arabidopsis thaliana]
  misc_feature (1)..(111): Homolog of NCBI NO: 25458468 NR Description: dnaJ-like protein [imported] - rice
  misc_feature (142)..(227): Homolog of NCBI NO: 25458468 NR Description: dnaJ-like protein [imported] - rice
  misc_feature (1)..(230): Homolog of NCBI NO: 18394951 NR Description: DnaJ protein family [Arabidopsis thaliana]
  misc_feature (1)..(258): Homolog of NCBI NO: 30699227 NR Description: DnaJ protein family [Arabidopsis thaliana]

SEQ ID NO: 105032 - DNA, 972 bp, Arabidopsis thaliana
  misc_feature (1)..(972): Ceres Seq. ID no. 13616298
  misc_feature: MA Experiment ID: 108573 Result: Up-regulated in Transcription
  misc_feature: MA Experiment 108573 PARAMETER Experiment Name: At_Drought_cDNA_P Parameter: Timepoint (hr) Value: 6
  misc_feature: MA Experiment 108573 PARAMETER Experiment Name: At_Drought_cDNA_P Parameter: Tissue Value: Aerial
  misc_feature: MA Experiment 108573 PARAMETER Experiment Name: At_Drought_cDNA_P Parameter: Treatment Value: Drought vs. No Drought
aaaaaacggattcttgtgatattgagcgtcgtcttctcttccttagccaaagccagatctgcttctttttcgctgcgtcgtcgagaggtctctctttgaggaagctaattccttcttcttcttcaccatccgtttcaagaataacaatggaaggaagcggtggtgacagtggttcgatggctacgcctgtacaaaagaaagtacatgaggcatggagggtttaccaatattatctggacaagactacacctcattcaactaacaggtggatcggaacacttgttttctttcttatctactgtttgagggtttactctattcacggattctacatcatctcctatggtcttggaatctacctcctgaatctgcttatcgggtttttgtctcctcttgttgatcctgagctcgaggtatctgatggagctactctgcctactcgaggttctgatgagttcaagccatttatccgccgtctcccggagtttaaattctggtactccatgactaaggcattctgcatagcctttcttatgacattcttctcggtgtttgatgttcccgtcttctggcccatactgctttgctactgggtcgttctctttgtcctcaccatgagacgccaaatagcccacatgatcaagcacaagtacattcctttcagcatcggaaaacagaaatatagcggccggaaatcttctgcgaacagcggcggcggctctcgtgctgattgatttcaacttgcagccacattttctgcagaaaaagaatgaaaaaaagttgggttttcacgttggaacgttttgtagtgatgaattactagtattgttatgcttctacaatgaagaagaaggaaacagaaaagggtcattagtttttatgttgcaggaatattgttctttgttagttccctttaatccaagtacctctgctgtaaatataattcaattttatttcgaaacaaattcattc

SEQ ID NO: 105033 - protein, 243 aa, Arabidopsis thaliana
  peptide (1)..(243): Ceres Seq. ID no. 13616299
  misc_feature (50)..(230): Pfam Name: Rer1 family Pfam Description: Rer1 family
  misc_feature (49)..(243): Homolog of NCBI NO: 15226596 NR Description: AtRer1B [Arabidopsis thaliana]
  misc_feature (49)..(243): Homolog of NCBI NO: 11281669 NR Description: endoplasmatic reticulum retrieval protein Rer1B
  misc_feature (49)..(243): Homolog of NCBI NO: 15234975 NR Description: AtRer1A [Arabidopsis thaliana]
  misc_feature (29)..(226): Homolog of NCBI NO: 34894094 NR Description: putative Rer1A protein (AtRer1A) [Oryza sativa
  misc_feature (35)..(231): Homolog of NCBI NO: 18400234 NR Description: integral membrane protein -related [Arabidopsis >gi|6226764|sp|Q9ZWI7|RERC_ARATH RER1C protein (AtRER1C)
  misc_feature (37)..(166): Homolog of NCBI NO: 35210534 NR Description: putative endoplasmatic reticulum retrieval
  misc_feature (150)..(225): Homolog of NCBI NO: 35210534 NR Description: putative endoplasmatic reticulum retrieval
  misc_feature (35)..(231): Homolog of NCBI NO: 30682033 NR Description: integral membrane protein -related [Arabidopsis
  misc_feature (35)..(225): Homolog of NCBI NO: 7488292 NR Description: probable integral membrane protein At2g23310
  misc_feature (51)..(224): Homolog of NCBI NO: 18398679 NR Description: integral membrane protein -related [Arabidopsis >gi|20197807|gb|AAD15512.2| putative integral membrane protein thaliana] >gi|26452028|dbj|BAC43104.1| putative integral membrane
KTDSCDIERRLLFLSQSQICFFFAASSRGLSLRKLIPSSSSPSVSRITMEGSGGDSGSMATPVQKKVHEAWRVYQYYLDKTTPHSTNRWIGTLVFFLIYCLRVYSIHGFYIISYGLGIYLLNLLIGFLSPLVDPELEVSDGATLPTRGSDEFKPFIRRLPEFKFWYSMTKAFCIAFLMTFFSVFDVPVFWPILLCYWVVLFVLTMRRQIAHMIKHKYIPFSIGKQKYSGRKSSANSGGGSRAD

SEQ ID NO: 105034 - protein, 195 aa, Arabidopsis thaliana
  peptide (1)..(195): Ceres Seq. ID no. 13616300
  misc_feature (2)..(182): Pfam Name: Rer1 family Pfam Description: Rer1 family
  misc_feature (1)..(195): Homolog of NCBI NO: 15226596 NR Description: AtRer1B [Arabidopsis thaliana]
  misc_feature (1)..(195): Homolog of NCBI NO: 11281669 NR Description: endoplasmatic reticulum retrieval protein Rer1B
  misc_feature (1)..(195): Homolog of NCBI NO: 15234975 NR Description: AtRer1A [Arabidopsis thaliana]
  misc_feature (1)..(178): Homolog of NCBI NO: 34894094 NR Description: putative Rer1A protein (AtRer1A) [Oryza sativa
  misc_feature (1)..(183): Homolog of NCBI NO: 18400234 NR Description: integral membrane protein -related [Arabidopsis >gi|6226764|sp|Q9ZWI7|RERC_ARATH RER1C protein (AtRER1C)
  misc_feature (1)..(118): Homolog of NCBI NO: 35210534 NR Description: putative endoplasmatic reticulum retrieval
  misc_feature (102)..(177): Homolog of NCBI NO: 35210534 NR Description: putative endoplasmatic reticulum retrieval
  misc_feature (1)..(183): Homolog of NCBI NO: 30682033 NR Description: integral membrane protein -related [Arabidopsis
  misc_feature (1)..(177): Homolog of NCBI NO: 7488292 NR Description: probable integral membrane protein At2g23310
  misc_feature (3)..(176): Homolog of NCBI NO: 18398679 NR Description: integral membrane protein -related [Arabidopsis >gi|20197807|gb|AAD15512.2| putative integral membrane protein thaliana] >gi|26452028|dbj|BAC43104.1| putative integral membrane
MEGSGGDSGSMATPVQKKVHEAWRVYQYYLDKTTPHSTNRWIGTLVFFLIYCLRVYSIHGFYIISYGLGIYLLNLLIGFLSPLVDPELEVSDGATLPTRGSDEFKPFIRRLPEFKFWYSMTKAFCIAFLMTFFSVFDVPVFWPILLCYWVVLFVLTMRRQIAHMIKHKYIPFSIGKQKYSGRKSSANSGGGSRAD

SEQ ID NO: 105035 - protein, 185 aa, Arabidopsis thaliana
  peptide (1)..(185): Ceres Seq. ID no. 13616301
  misc_feature (1)..(172): Pfam Name: Rer1 family Pfam Description: Rer1 family
  misc_feature (1)..(185): Homolog of NCBI NO: 15226596 NR Description: AtRer1B [Arabidopsis thaliana]
  misc_feature (1)..(185): Homolog of NCBI NO: 11281669 NR Description: endoplasmatic reticulum retrieval protein Rer1B
  misc_feature (1)..(185): Homolog of NCBI NO: 15234975 NR Description: AtRer1A [Arabidopsis thaliana]
  misc_feature (1)..(168): Homolog of NCBI NO: 34894094 NR Description: putative Rer1A protein (AtRer1A) [Oryza sativa
  misc_feature (1)..(173): Homolog of NCBI NO: 18400234 NR Description: integral membrane protein -related [Arabidopsis >gi|6226764|sp|Q9ZWI7|RERC_ARATH RER1C protein (AtRER1C)
  misc_feature (1)..(108): Homolog of NCBI NO: 35210534 NR Description: putative endoplasmatic reticulum retrieval
  misc_feature (92)..(167): Homolog of NCBI NO: 35210534 NR Description: putative endoplasmatic reticulum retrieval
  misc_feature (1)..(173): Homolog of NCBI NO: 30682033 NR Description: integral membrane protein -related [Arabidopsis
  misc_feature (1)..(167): Homolog of NCBI NO: 7488292 NR Description: probable integral membrane protein At2g23310
  misc_feature (1)..(166): Homolog of NCBI NO: 18398679 NR Description: integral membrane protein -related [Arabidopsis >gi|20197807|gb|AAD15512.2| putative integral membrane protein thaliana] >gi|26452028|dbj|BAC43104.1| putative integral membrane
MATPVQKKVHEAWRVYQYYLDKTTPHSTNRWIGTLVFFLIYCLRVYSIHGFYIISYGLGIYLLNLLIGFLSPLVDPELEVSDGATLPTRGSDEFKPFIRRLPEFKFWYSMTKAFCIAFLMTFFSVFDVPVFWPILLCYWVVLFVLTMRRQIAHMIKHKYIPFSIGKQKYSGRKSSANSGGGSRAD

SEQ ID NO: 105036 - DNA, 1892 bp, Arabidopsis thaliana
  misc_feature (1)..(1892): Ceres Seq. ID no. 13616306
  misc_feature: MA Experiment ID: 108434 Result: Up-regulated in Transcription
  misc_feature: MA Experiment 108434 PARAMETER Experiment Name: At_Root_Tips_cDNA_P Parameter: Tissue Value: Root Tips
  misc_feature: MA Experiment ID: 20000113 Result: Down-regulated in Transcription
  misc_feature: MA Experiment 20000113 PARAMETER Experiment Name: At_42deg_Heat_cDNA_P Parameter: Temperature (deg C) Value: 42 vs. 22
  misc_feature: MA Experiment 20000113 PARAMETER Experiment Name: At_42deg_Heat_cDNA_P Parameter: Timepoint (hr) Value: 8
  misc_feature: MA Experiment 20000113 PARAMETER Experiment Name: At_42deg_Heat_cDNA_P Parameter: Tissue Value: Aerial
aacacaaaacagtaatctctcagactacaactttactcacttcaccagctctctctcacttgatgacaatgggcgactctgacctccgtaaacctaccaatttcggcaccggacatctatctcgccgacgatcatggtgttgctctttcgccgtacctccagcgagtcctgatactcgttcgatttcatctcgtaaccacattccagctaaatctcagcagcagagacctaaactggttccttgctcaccgcaaagctctaaatctgctttaaacatcgtaaatcggatcgacccgcgtcggatcttatcaccgggtcgggtttcacccatagattcggatccgaccgtcactacaatgcaagagaccgagaccactcaggaagaagaagatgatgcggttgttgtagattcgacaccaaatcttcgttctgagagttttagagctccgaagattgaggttacgggttcgggtttgagtgagggttacgatgctaggttgagtttgaagggaagaaatggtggtggggttctggtgttggagcttagcttggaggttttggctgcgaattctgatgtgttctcgggtttgattgcggaggagaagaagtgttcttcttcttcatcgtctttaggattgaagaacacatgcaggattgaagtatgtgatgtggagaatcttggtgtttttagggaaactgttgagctcatgtttgaggaaagtaatgttattatcaagaagtttatgacaatgggagtctacagagccattgatgtacttgaggtagcggctggaatcaaattttcaagagctgtcttatcgtgtctgaaatatcttgaagctgttccttggacagaggatgaagaggaaaaactgaggagacttcttggaatttatagctttgatgatgatgcagttagtgaaattttggcaagatttaattcaaacgagacagaaaacttgcaagacagtttatcgaagaaactggtttggtcaattacttcctgcagtgatgtaaatcctagaaacgagctcaaatctctggtgaagggtcttctttgcaaaagctcagtgtacgagaaagaacagcctgagatcaacaaggaagacatatatagagcaggcaagtgttgtgtggattcattagctaagttgtttgaagagggcagtagtagtagtagtagcaagaaagaaaagccattgattgaaagtatttcgagggaggttgagaacataaactggctgctggagatcatgatagatcgggaaatagcagaagaatttgtggaaatatgggggaagcaaagaaggctagtggagatgcatgagagagtgtcaccaatggtgaggtatgaagtaagcagagtaacaggagcgatatttattgcaatggggaaaaggagagtgcaatgcggaggagaagcaagggcggggctagtagaagcgtggttcaagccaatgttagtagattttgggtggctacagagatgcaagaaaggactagacatgagggaagtagaagaagggatggggcaaacgcttttaacgctaccagtaaaagagcagtatcaagtgttcatggaatggttcaggtggttctcaaagcatgggactgagtgccctaatctcagcaaggcgtttcagatatggtggcgtaggtcattccttagaggtgtagaatcatctacttgtaggtaaacaaattattccaagtgttcaagaggctattatgtatgttaggttttagcttttgtggaaatttagactgtaatataactctctctccttttgtctccacccgcatgatatgttcgtttcggatgttttttggagctaaattagtcgtaaggtttgaaaaagcaacaagtacaaaacacaaaatggtactttctt

SEQ ID NO: 105037 - protein, 564 aa, Arabidopsis thaliana
  peptide (1)..(564): Ceres Seq. ID no. 13616307
  misc_feature (21)..(564): Homolog of NCBI NO: 18397316 NR Description: f13j11 PRLI-interacting factor G -related thaliana] >gi|20197793|gb|AAD28312.2| expressed protein thaliana] >gi|20198052|gb|AAM15372.1| expressed protein
  misc_feature (21)..(564): Homolog of NCBI NO: 39104567 NR Description: putative f13j11 PRLI-interacting factor G
  misc_feature (23)..(564): Homolog of NCBI NO: 25338924 NR Description: hypothetical protein At2g13690 [imported] -
  misc_feature (23)..(564): Homolog of NCBI NO: 21553858 NR Description: unknown [Arabidopsis thaliana]
  misc_feature (342)..(564): Homolog of NCBI NO: 11139264 NR Description: PRLI-interacting factor G [Arabidopsis thaliana]
  misc_feature (54)..(556): Homolog of NCBI NO: 34900946 NR Description: putative PRLI-interacting factor G [Oryza sativa
  misc_feature (43)..(76): Homolog of NCBI NO: 34900946 NR Description: putative PRLI-interacting factor G [Oryza sativa
  misc_feature (259)..(560): Homolog of NCBI NO: 38347118 NR Description: OSJNBa0009K15.15 [Oryza sativa (japonica
  misc_feature (38)..(238): Homolog of NCBI NO: 38347118 NR Description: OSJNBa0009K15.15 [Oryza sativa (japonica
  misc_feature (83)..(556): Homolog of NCBI NO: 38230508 NR Description: predicted protein [Populus alba x Populus tremula]
HKTVISQTTTLLTSPALSHLMTMGDSDLRKPTNFGTGHLSRRRSWCCSFAVPPASPDTRSISSRNHIPAKSQQQRPKLVPCSPQSSKSALNIVNRIDPRRILSPGRVSPIDSDPTVTTMQETETTQEEEDDAVVVDSTPNLRSESFRAPKIEVTGSGLSEGYDARLSLKGRNGGGVLVLELSLEVLAANSDVFSGLIAEEKKCSSSSSSLGLKNTCRIEVCDVENLGVFRETVELMFEESNVIIKKFMTMGVYRAIDVLEVAAGIKFSRAVLSCLKYLEAVPWTEDEEEKLRRLLGIYSFDDDAVSEILARFNSNETENLQDSLSKKLVWSITSCSDVNPRNELKSLVKGLLCKSSVYEKEQPEINKEDIYRAGKCCVDSLAKLFEEGSSSSSSKKEKPLIESISREVENINWLLEIMIDREIAEEFVEIWGKQRRLVEMHERVSPMVRYEVSRVTGAIFIAMGKRRVQCGGEARAGLVEAWFKPMLVDFGWLQRCKKGLDMREVEEGMGQTLLTLPVKEQYQVFMEWFRWFSKHGTECPNLSKAFQIWWRRSFLRGVESSTCR

SEQ ID NO: 105038 - protein, 544 aa, Arabidopsis thaliana
  peptide (1)..(544): Ceres Seq. ID no. 13616308
  misc_feature (1)..(544): Homolog of NCBI NO: 18397316 NR Description: f13j11 PRLI-interacting factor G -related thaliana] >gi|20197793|gb|AAD28312.2| expressed protein thaliana] >gi|20198052|gb|AAM15372.1| expressed protein
  misc_feature (1)..(544): Homolog of NCBI NO: 39104567 NR Description: putative f13j11 PRLI-interacting factor G
  misc_feature (3)..(544): Homolog of NCBI NO: 25338924 NR Description: hypothetical protein At2g13690 [imported] -
  misc_feature (3)..(544): Homolog of NCBI NO: 21553858 NR Description: unknown [Arabidopsis thaliana]
  misc_feature (322)..(544): Homolog of NCBI NO: 11139264 NR Description: PRLI-interacting factor G [Arabidopsis thaliana]
  misc_feature (34)..(536): Homolog of NCBI NO: 34900946 NR Description: putative PRLI-interacting factor G [Oryza sativa
  misc_feature (23)..(56): Homolog of NCBI NO: 34900946 NR Description: putative PRLI-interacting factor G [Oryza sativa
  misc_feature (239)..(540): Homolog of NCBI NO: 38347118 NR Description: OSJNBa0009K15.15 [Oryza sativa (japonica
  misc_feature (18)..(218): Homolog of NCBI NO: 38347118 NR Description: OSJNBa0009K15.15 [Oryza sativa (japonica
  misc_feature (63)..(536): Homolog of NCBI NO: 38230508 NR Description: predicted protein [Populus alba x Populus tremula]
MTMGDSDLRKPTNFGTGHLSRRRSWCCSFAVPPASPDTRSISSRNHIPAKSQQQRPKLVPCSPQSSKSALNIVNRIDPRRILSPGRVSPIDSDPTVTTMQETETTQEEEDDAVVVDSTPNLRSESFRAPKIEVTGSGLSEGYDARLSLKGRNGGGVLVLELSLEVLAANSDVFSGLIAEEKKCSSSSSSLGLKNTCRIEVCDVENLGVFRETVELMFEESNVIIKKFMTMGVYRAIDVLEVAAGIKFSRAVLSCLKYLEAVPWTEDEEEKLRRLLGIYSFDDDAVSEILARFNSNETENLQDSLSKKLVWSITSCSDVNPRNELKSLVKGLLCKSSVYEKEQPEINKEDIYRAGKCCVDSLAKLFEEGSSSSSSKKEKPLIESISREVENINWLLEIMIDREIAEEFVEIWGKQRRLVEMHERVSPMVRYEVSRVTGAIFIAMGKRRVQCGGEARAGLVEAWFKPMLVDFGWLQRCKKGLDMREVEEGMGQTLLTLPVKEQYQVFMEWFRWFSKHGTECPNLSKAFQIWWRRSFLRGVESSTCR

SEQ ID NO: 105039 - protein, 542 aa, Arabidopsis thaliana
  peptide (1)..(542): Ceres Seq. ID no. 13616309
  misc_feature (1)..(542): Homolog of NCBI NO: 18397316 NR Description: f13j11 PRLI-interacting factor G -related thaliana] >gi|20197793|gb|AAD28312.2| expressed protein thaliana] >gi|20198052|gb|AAM15372.1| expressed protein
  misc_feature (1)..(542): Homolog of NCBI NO: 39104567 NR Description: putative f13j11 PRLI-interacting factor G
  misc_feature (1)..(542): Homolog of NCBI NO: 25338924 NR Description: hypothetical protein At2g13690 [imported] -
  misc_feature (1)..(542): Homolog of NCBI NO: 21553858 NR Description: unknown [Arabidopsis thaliana]
  misc_feature (320)..(542): Homolog of NCBI NO: 11139264 NR Description: PRLI-interacting factor G [Arabidopsis thaliana]
  misc_feature (32)..(534): Homolog of NCBI NO: 34900946 NR Description: putative PRLI-interacting factor G [Oryza sativa
  misc_feature (21)..(54): Homolog of NCBI NO: 34900946 NR Description: putative PRLI-interacting factor G [Oryza sativa
  misc_feature (237)..(538): Homolog of NCBI NO: 38347118 NR Description: OSJNBa0009K15.15 [Oryza sativa (japonica
  misc_feature (16)..(216): Homolog of NCBI NO: 38347118 NR Description: OSJNBa0009K15.15 [Oryza sativa (japonica
  misc_feature (61)..(534): Homolog of NCBI NO: 38230508 NR Description: predicted protein [Populus alba x Populus tremula]
MGDSDLRKPTNFGTGHLSRRRSWCCSFAVPPASPDTRSISSRNHIPAKSQQQRPKLVPCSPQSSKSALNIVNRIDPRRILSPGRVSPIDSDPTVTTMQETETTQEEEDDAVVVDSTPNLRSESFRAPKIEVTGSGLSEGYDARLSLKGRNGGGVLVLELSLEVLAANSDVFSGLIAEEKKCSSSSSSLGLKNTCRIEVCDVENLGVFRETVELMFEESNVIIKKFMTMGVYRAIDVLEVAAGIKFSRAVLSCLKYLEAVPWTEDEEEKLRRLLGIYSFDDDAVSEILARFNSNETENLQDSLSKKLVWSITSCSDVNPRNELKSLVKGLLCKSSVYEKEQPEINKEDIYRAGKCCVDSLAKLFEEGSSSSSSKKEKPLIESISREVENINWLLEIMIDREIAEEFVEIWGKQRRLVEMHERVSPMVRYEVSRVTGAIFIAMGKRRVQCGGEARAGLVEAWFKPMLVDFGWLQRCKKGLDMREVEEGMGQTLLTLPVKEQYQVFMEWFRWFSKHGTECPNLSKAFQIWWRRSFLRGVESSTCR

SEQ ID NO: 105040 - DNA, 1258 bp, Arabidopsis thaliana
  misc_feature (1)..(1258): Ceres Seq. ID no. 13616314
  misc_feature: MA Experiment ID: 20001248 Result: Up-regulated in Transcription
  misc_feature: MA Experiment 20001248 PARAMETER Experiment Name: At_Far-red-induction_P Parameter: Age (day) Value: 7
  misc_feature: MA Experiment 20001248 PARAMETER Experiment Name: At_Far-red-induction_P Parameter: Light Value: Far-red vs. White
  misc_feature: MA Experiment 20001248 PARAMETER Experiment Name: At_Far-red-induction_P Parameter: Organism Value: A. thaliana
  misc_feature: MA Experiment 20001248 PARAMETER Experiment Name: At_Far-red-induction_P Parameter: Plant Line Value: Columbia
  misc_feature: MA Experiment 20001248 PARAMETER Experiment Name: At_Far-red-induction_P Parameter: Timepoint (hr) Value: 4
  misc_feature: MA Experiment 20001248 PARAMETER Experiment Name: At_Far-red-induction_P Parameter: Tissue Value: Whole Plant
gagaaagatcttctttaacctctttgcaacaaatctactcaaaaccctaacccctttttcaaattacttccatctttagatcgaatcaaatcaatgtccgtcgacgatctccctccgtcgtcggcctccgccgtaacgccactaggctcctccgtgattccgattgtgaacaagctccaagacatattcgctcagctaggaagtcaatcgacgatcgctcttccgcaagtagctgtcgtcggaagtcaaagcagtggcaaatccagcgttctagaagctctcgtcggccgtgactttcttcctcgtggcaatgatatttgcacgcgccgacctctccgtctccagcttgttcagacgaaacctagctctgatggtggatccgatgaagagtggggcgagtttcttcaccacgatcctgttagacgtatctacgatttctctgagattcgccgtgagattgaggcggagactaatagagtatcaggagagaacaaaggtgtatcagatattccgattggtttgaagatattttcacctaatgttttggatattagtcttgtggatcttcctggtatcactaaggttcctgttggtgatcagccaagtgatatcgaagcgcgtataagaacgatgatcttgacttacattaaggaacctagttgcttgatacttgctgttagccctgctaatactgatttagcaaattcagatgcattacaaatcgcaggaaatgctgatcctgatggtcatagaaccataggtgtaatcacaaagttggatattatggacagaggtactgatgctcggaatcaccttctgggaaaaacaattcctcttcgacttggatacgtgggagttgtaaatcgtagtcaagaggatattttgatgaaccgtagcatcaaggatgctcttgttgcagaggaaaagttctttcgtagtcgtccagtttacagcggtctcacagatcgtttgggtgtccctcaactggcaaagaaattaaatcaggtccttgttcaacacatcaaggcactgcttcctagtttaaagtcacgtatcaacaatgcattgtttgctacagcaaaggagtatgagagctatggggatataacagagtctagggtatgtgggttttggccagttttagccttatatataccatccattctcaatgatggcattgctatttgctttttttgcgttgtatgatttcttgctcagttttcgtatttgaatataattttattcatttttgtgatcc

SEQ ID NO: 105041 - protein, 370 aa, Arabidopsis thaliana
  peptide (1)..(370): Ceres Seq. ID no. 13616315
  misc_feature (19)..(236): Pfam Name: Dynamin family Pfam Description: Dynamin family
  misc_feature (1)..(370): Homolog of NCBI NO: 18397442 NR Description: dynamin-related protein [Arabidopsis thaliana]
  misc_feature (1)..(370): Homolog of NCBI NO: 21536888 NR Description: dynamin-like protein [Arabidopsis thaliana]
  misc_feature (1)..(342): Homolog of NCBI NO: 18397440 NR Description: dynamin-related protein [Arabidopsis thaliana]
  misc_feature (1)..(342): Homolog of NCBI NO: 25307189 NR Description: dynamin-like protein [imported] - Arabidopsis
  misc_feature (1)..(342): Homolog of NCBI NO: 19032339 NR Description: dynamin like protein 2b [Arabidopsis thaliana]
  misc_feature (1)..(342): Homolog of NCBI NO: 20466604 NR Description: dynamin-like protein [Arabidopsis thaliana]
  misc_feature (7)..(342): Homolog of NCBI NO: 2576411 NR Description: similar to dynamin-like protein encoded by
  misc_feature (7)..(342): Homolog of NCBI NO: 18418260 NR Description: dynamin-related protein ADL2 [Arabidopsis
  misc_feature (7)..(342): Homolog of NCBI NO: 14334428 NR Description: putative dynamin protein ADL2 [Arabidopsis >gi|17104743|gb|AAL34260.1| putative dynamin protein ADL2
  misc_feature (7)..(342): Homolog of NCBI NO: 19032337 NR Description: dynamin like protein 2a [Arabidopsis thaliana]
MSVDDLPPSSASAVTPLGSSVIPIVNKLQDIFAQLGSQSTIALPQVAVVGSQSSGKSSVLEALVGRDFLPRGNDICTRRPLRLQLVQTKPSSDGGSDEEWGEFLHHDPVRRIYDFSEIRREIEAETNRVSGENKGVSDIPIGLKIFSPNVLDISLVDLPGITKVPVGDQPSDIEARIRTMILTYIKEPSCLILAVSPANTDLANSDALQIAGNADPDGHRTIGVITKLDIMDRGTDARNHLLGKTIPLRLGYVGVVNRSQEDILMNRSIKDALVAEEKFFRSRPVYSGLTDRLGVPQLAKKLNQVLVQHIKALLPSLKSRINNALFATAKEYESYGDITESRVCGFWPVLALYIPSILNDGIAICFFCVV

SEQ ID NO: 105042 - protein, 191 aa, Arabidopsis thaliana
  peptide (1)..(191): Ceres Seq. ID no. 13616316
  misc_feature (1)..(57): Pfam Name: Dynamin family Pfam Description: Dynamin family
  misc_feature (1)..(191): Homolog of NCBI NO: 18397442 NR Description: dynamin-related protein [Arabidopsis thaliana]
  misc_feature (1)..(191): Homolog of NCBI NO: 21536888 NR Description: dynamin-like protein [Arabidopsis thaliana]
  misc_feature (1)..(163): Homolog of NCBI NO: 18397440 NR Description: dynamin-related protein [Arabidopsis thaliana]
  misc_feature (1)..(163): Homolog of NCBI NO: 25307189 NR Description: dynamin-like protein [imported] - Arabidopsis
  misc_feature (1)..(163): Homolog of NCBI NO: 19032339 NR Description: dynamin like protein 2b [Arabidopsis thaliana]
  misc_feature (1)..(163): Homolog of NCBI NO: 20466604 NR Description: dynamin-like protein [Arabidopsis thaliana]
  misc_feature (1)..(163): Homolog of NCBI NO: 2576411 NR Description: similar to dynamin-like protein encoded by
  misc_feature (1)..(163): Homolog of NCBI NO: 14334428 NR Description: putative dynamin protein ADL2 [Arabidopsis >gi|17104743|gb|AAL34260.1| putative dynamin protein ADL2
  misc_feature (1)..(163): Homolog of NCBI NO: 18418260 NR Description: dynamin-related protein ADL2 [Arabidopsis
  misc_feature (1)..(163): Homolog of NCBI NO: 19032337 NR Description: dynamin like protein 2a [Arabidopsis thaliana]
MILTYIKEPSCLILAVSPANTDLANSDALQIAGNADPDGHRTIGVITKLDIMDRGTDARNHLLGKTIPLRLGYVGVVNRSQEDILMNRSIKDALVAEEKFFRSRPVYSGLTDRLGVPQLAKKLNQVLVQHIKALLPSLKSRINNALFATAKEYESYGDITESRVCGFWPVLALYIPSILNDGIAICFFCVV

SEQ ID NO: 105043 - DNA, 1066 bp, Arabidopsis thaliana
  misc_feature (1)..(1066): Ceres Seq. ID no. 13616325
  misc_feature: MA Experiment ID: 108434 Result: Up-regulated in Transcription
  misc_feature: MA Experiment 108434 PARAMETER Experiment Name: At_Root_Tips_cDNA_P Parameter: Tissue Value: Root Tips
  misc_feature: MA Experiment ID: 108461 Result: Down-regulated in Transcription
  misc_feature: MA Experiment 108461 PARAMETER Experiment Name: At_Germinating_Seeds_cDNA_P Parameter: Age (day) Value: 1 vs. 0
  misc_feature: MA Experiment 108461 PARAMETER Experiment Name: At_Germinating_Seeds_cDNA_P Parameter: Tissue Value: Germinating Seeds
  misc_feature: MA Experiment ID: 108462 Result: Down-regulated in Transcription
  misc_feature: MA Experiment 108462 PARAMETER Experiment Name: At_Germinating_Seeds_cDNA_P Parameter: Age (day) Value: 2 vs. 0
  misc_feature: MA Experiment 108462 PARAMETER Experiment Name: At_Germinating_Seeds_cDNA_P Parameter: Tissue Value: Germinating Seeds
  misc_feature: MA Experiment ID: 108463 Result: Down-regulated in Transcription
  misc_feature: MA Experiment 108463 PARAMETER Experiment Name: At_Germinating_Seeds_cDNA_P Parameter: Age (day) Value: 3 vs. 0
  misc_feature: MA Experiment 108463 PARAMETER Experiment Name: At_Germinating_Seeds_cDNA_P Parameter: Tissue Value: Germinating Seeds
  misc_feature: MA Experiment ID: 108464 Result: Down-regulated in Transcription
  misc_feature: MA Experiment 108464 PARAMETER Experiment Name: At_Germinating_Seeds_cDNA_P Parameter: Age (day) Value: 4 vs. 0
  misc_feature: MA Experiment 108464 PARAMETER Experiment Name: At_Germinating_Seeds_cDNA_P Parameter: Tissue Value: Germinating Seeds
  misc_feature: MA Experiment ID: 108573 Result: Down-regulated in Transcription
  misc_feature: MA Experiment 108573 PARAMETER Experiment Name: At_Drought_cDNA_P Parameter: Timepoint (hr) Value: 6
  misc_feature: MA Experiment 108573 PARAMETER Experiment Name: At_Drought_cDNA_P Parameter: Tissue Value: Aerial
  misc_feature: MA Experiment 108573 PARAMETER Experiment Name: At_Drought_cDNA_P Parameter: Treatment Value: Drought vs. No Drought
  misc_feature: MA Experiment ID: 20000180 Result: Down-regulated in Transcription
  misc_feature: MA Experiment 20000180 PARAMETER Experiment Name: At_Germinating_Seeds_P Parameter: Age (hr) Value: 24 vs. 0
  misc_feature: MA Experiment 20000180 PARAMETER Experiment Name: At_Germinating_Seeds_P Parameter: Tissue Value: Germinating Seeds
  misc_feature: MA Experiment ID: 20000184 Result: Down-regulated in Transcription
  misc_feature: MA Experiment 20000184 PARAMETER Experiment Name: At_Shoots__P Parameter: Age (day) Value: 7
  misc_feature: MA Experiment 20000184 PARAMETER Experiment Name: At_Shoots__P Parameter: Tissue Value: Shoots vs. Whole Plant
  misc_feature: MA Experiment ID: 20000227 Result: Up-regulated in Transcription
  misc_feature: MA Experiment 20000227 PARAMETER Experiment Name: At_Root-Tips-vs-Tops_P Parameter: Tissue Value: Root Tips vs. Root Tops
  misc_feature: MA Experiment ID: 20000438 Result: Down-regulated in Transcription
  misc_feature: MA Experiment 20000438 PARAMETER Experiment Name: At_Shoots__P Parameter: Age (day) Value: 14
  misc_feature: MA Experiment 20000438 PARAMETER Experiment Name: At_Shoots__P Parameter: Tissue Value: Shoots vs. Whole Plant
  misc_feature: MA Experiment ID: 20001458 Result: Up-regulated in Transcription
  misc_feature: MA Experiment 20001458 PARAMETER Experiment Name: At_50mM_NH4NO3_L-to-H_P Parameter: Age (day) Value: Undefined
  misc_feature: MA Experiment 20001458 PARAMETER Experiment Name: At_50mM_NH4NO3_L-to-H_P Parameter: Organism Value: Undefined
  misc_feature: MA Experiment 20001458 PARAMETER Experiment Name: At_50mM_NH4NO3_L-to-H_P Parameter: Plant Line Value: Undefined
  misc_feature: MA Experiment 20001458 PARAMETER Experiment Name: At_50mM_NH4NO3_L-to-H_P Parameter: Timepoint (hr) Value: 2
  misc_feature: MA Experiment 20001458 PARAMETER Experiment Name: At_50mM_NH4NO3_L-to-H_P Parameter: Tissue Value: Siliques
  misc_feature: MA Experiment 20001458 PARAMETER Experiment Name: At_50mM_NH4NO3_L-to-H_P Parameter: Treatment Value: 50mM NH4NO3 vs. 100mM Manitol
  misc_feature: MA Experiment ID: 20001557 Result: Up-regulated in Transcription
  misc_feature: MA Experiment 20001557 PARAMETER Experiment Name: At_Drought_Soil_Dry_P Parameter: Age (day) Value: 27
  misc_feature: MA Experiment 20001557 PARAMETER Experiment Name: At_Drought_Soil_Dry_P Parameter: Organism Value: A. thaliana
  misc_feature: MA Experiment 20001557 PARAMETER Experiment Name: At_Drought_Soil_Dry_P Parameter: Plant Line Value: WS
  misc_feature: MA Experiment 20001557 PARAMETER Experiment Name: At_Drought_Soil_Dry_P Parameter: Post Timepoint (hr) Value: 3
  misc_feature: MA Experiment 20001557 PARAMETER Experiment Name: At_Drought_Soil_Dry_P Parameter: Post-Treatment Value: Re-Water vs. No Drought
  misc_feature: MA Experiment 20001557 PARAMETER Experiment Name: At_Drought_Soil_Dry_P Parameter: Timepoint (day) Value: 13
  misc_feature: MA Experiment 20001557 PARAMETER Experiment Name: At_Drought_Soil_Dry_P Parameter: Treatment Value: Drought vs. No Drought
  misc_feature: MA Experiment ID: 20001558 Result: Up-regulated in Transcription
  misc_feature: MA Experiment 20001558 PARAMETER Experiment Name: At_Drought_Soil_Dry_P Parameter: Age (day) Value: 27
  misc_feature: MA Experiment 20001558 PARAMETER Experiment Name: At_Drought_Soil_Dry_P Parameter: Organism Value: A. thaliana
  misc_feature: MA Experiment 20001558 PARAMETER Experiment Name: At_Drought_Soil_Dry_P Parameter: Plant Line Value: WS
  misc_feature: MA Experiment 20001558 PARAMETER Experiment Name: At_Drought_Soil_Dry_P Parameter: Post Timepoint (hr) Value: 6
  misc_feature: MA Experiment 20001558 PARAMETER Experiment Name: At_Drought_Soil_Dry_P Parameter: Post-Treatment Value: Re-Water vs. No Drought
  misc_feature: MA Experiment 20001558 PARAMETER Experiment Name: At_Drought_Soil_Dry_P Parameter: Timepoint (day) Value: 13
  misc_feature: MA Experiment 20001558 PARAMETER Experiment Name: At_Drought_Soil_Dry_P Parameter: Treatment Value: Drought vs. No Drought
  misc_feature: MA Experiment ID: 20001560 Result: Up-regulated in Transcription
  misc_feature: MA Experiment 20001560 PARAMETER Experiment Name: At_Drought_Soil_Dry_P Parameter: Age (day) Value: 28
  misc_feature: MA Experiment 20001560 PARAMETER Experiment Name: At_Drought_Soil_Dry_P Parameter: Organism Value: A. thaliana
  misc_feature: MA Experiment 20001560 PARAMETER Experiment Name: At_Drought_Soil_Dry_P Parameter: Plant Line Value: WS
  misc_feature: MA Experiment 20001560 PARAMETER Experiment Name: At_Drought_Soil_Dry_P Parameter: Post Timepoint (hr) Value: None
  misc_feature: MA Experiment 20001560 PARAMETER Experiment Name: At_Drought_Soil_Dry_P Parameter: Post-Treatment Value: None
  misc_feature: MA Experiment 20001560 PARAMETER Experiment Name: At_Drought_Soil_Dry_P Parameter: Timepoint (day) Value: 14
  misc_feature: MA Experiment 20001560 PARAMETER Experiment Name: At_Drought_Soil_Dry_P Parameter: Treatment Value: Drought vs. No Drought
ggaaggcttttaaaaccctagctggtaccaatcttaaacccctctccgattttgatttctgcttgaaattgttttccccgagatctcaatttcgataatcggaaaacgaaaaagatggtttggtttcaatgcgaagactgtggagagagtctgaagaagccaaaggtcccgtctcacttcaagatgtgcagagccaacaagttatcgtgcatcgattgtggagaaatgtttgggagagatactgtgcaaggacataaccaatgcattactgaagctgagaagtatggtccaaaagggcagtcaaagtcagctaatggaacacctgcaaagccaaaggacatctctaagcaagagcctgactttgatattaatgtcggcttatcaaaccgatatccatggttttgcagtttatgtaacacaaaggctactagccagcagactttgcttgcccatgcggatgggaagaagcaccgaggaaaagctaaagccttccatgctaggcaacaacaagaacaatccacgactttggataacaaggatggaagtgaaaatgcgtctaatgttgattcagaacagaagaaagtagatttacctgcctcctcaggtgttgcgaatggagaatcgcatcctgagaaaaagagaaagctagagactttggatgaaacgagtgaaggcgaagaagcaaaaggaagtgatctaaagaaagcaaagaagcaggaccatgagaagaaaatcaattggaagaagttgatcacatcggctttgaagtctaacgaagataaaactttgaagatgaagaaactgaagaagctcgttctggaatctattgtggattcaggccgagacaaatctgagcttaaggcagagctagaactaaaggtgaatttgagctccagattcacagttgatgggaagtatgtgaaacttgtggctaaagattgaatctaattcttgagtccagcaacagtatcatgtctccgactgtcacagttttggcatatgattcattactattaatgtctgtaccaaatttggaattttggaatctcatcaaacattattcgta

SEQ ID NO: 105044 - protein, 275 aa, Arabidopsis thaliana
  peptide (1)..(275): Ceres Seq. ID no. 13616326
  misc_feature (1)..(275): Homolog of NCBI NO: 18399026 NR Description: expressed protein [Arabidopsis thaliana]
  misc_feature (1)..(275): Homolog of NCBI NO: 21536909 NR Description: unknown [Arabidopsis thaliana]
  misc_feature (1)..(275): Homolog of NCBI NO: 7486241 NR Description: probable RNA-binding protein At2g19380 -
  misc_feature (1)..(275): Homolog of NCBI NO: 21902026 NR Description: B1097D05.27 [Oryza sativa (japonica
  misc_feature (53)..(235): Homolog of NCBI NO: 18399023 NR Description: RNA recognition motif (RRM)-containing protein
  misc_feature (53)..(235): Homolog of NCBI NO: 7486241 NR Description: probable RNA-binding protein At2g19380 -
  misc_feature (1)..(208): Homolog of NCBI NO: 18399023 NR Description: RNA recognition motif (RRM)-containing protein
  misc_feature (1)..(208): Homolog of NCBI NO: 7486241 NR Description: probable RNA-binding protein At2g19380 -
  misc_feature (155)..(272): Homolog of NCBI NO: 17552224 NR Description: Cell growth regulating nucleolar protein like kD) [Caenorhabditis elegans] >gi|2496898|sp|Q09464|YQ58_CAEEL
  misc_feature (1)..(72): Homolog of NCBI NO: 17552224 NR Description: Cell growth regulating nucleolar protein like kD) [Caenorhabditis elegans] >gi|2496898|sp|Q09464|YQ58_CAEEL
MVWFQCEDCGESLKKPKVPSHFKMCRANKLSCIDCGEMFGRDTVQGHNQCITEAEKYGPKGQSKSANGTPAKPKDISKQEPDFDINVGLSNRYPWFCSLCNTKATSQQTLLAHADGKKHRGKAKAFHARQQQEQSTTLDNKDGSENASNVDSEQKKVDLPASSGVANGESHPEKKRKLETLDETSEGEEAKGSDLKKAKKQDHEKKINWKKLITSALKSNEDKTLKMKKLKKLVLESIVDSGRDKSELKAELELKVNLSSRFTVDGKYVKLVAKD

SEQ ID NO: 105045 - protein, 252 aa, Arabidopsis thaliana
  peptide (1)..(252): Ceres Seq. ID no. 13616327
  misc_feature (1)..(252): Homolog of NCBI NO: 18399026 NR Description: expressed protein [Arabidopsis thaliana]
  misc_feature (1)..(252): Homolog of NCBI NO: 21536909 NR Description: unknown [Arabidopsis thaliana]
  misc_feature (1)..(252): Homolog of NCBI NO: 7486241 NR Description: probable RNA-binding protein At2g19380 -
  misc_feature (1)..(252): Homolog of NCBI NO: 21902026 NR Description: B1097D05.27 [Oryza sativa (japonica
  misc_feature (30)..(212): Homolog of NCBI NO: 18399023 NR Description: RNA recognition motif (RRM)-containing protein
  misc_feature (30)..(212): Homolog of NCBI NO: 7486241 NR Description: probable RNA-binding protein At2g19380 -
  misc_feature (1)..(185): Homolog of NCBI NO: 18399023 NR Description: RNA recognition motif (RRM)-containing protein
  misc_feature (1)..(185): Homolog of NCBI NO: 7486241 NR Description: probable RNA-binding protein At2g19380 -
  misc_feature (132)..(249): Homolog of NCBI NO: 17552224 NR Description: Cell growth regulating nucleolar protein like kD) [Caenorhabditis elegans] >gi|2496898|sp|Q09464|YQ58_CAEEL
  misc_feature (1)..(49): Homolog of NCBI NO: 17552224 NR Description: Cell growth regulating nucleolar protein like kD) [Caenorhabditis elegans] >gi|2496898|sp|Q09464|YQ58_CAEEL
MCRANKLSCIDCGEMFGRDTVQGHNQCITEAEKYGPKGQSKSANGTPAKPKDISKQEPDFDINVGLSNRYPWFCSLCNTKATSQQTLLAHADGKKHRGKAKAFHARQQQEQSTTLDNKDGSENASNVDSEQKKVDLPASSGVANGESHPEKKRKLETLDETSEGEEAKGSDLKKAKKQDHEKKINWKKLITSALKSNEDKTLKMKKLKKLVLESIVDSGRDKSELKAELELKVNLSSRFTVDGKYVKLVAKD

SEQ ID NO: 105046 - protein, 238 aa, Arabidopsis thaliana; identical to SEQ ID NO: 40554
  peptide (1)..(238): Ceres Seq. ID no. 13616328
  misc_feature (1)..(238): Homolog of NCBI NO: 18399026 NR Description: expressed protein [Arabidopsis thaliana]
  misc_feature (1)..(238): Homolog of NCBI NO: 21536909 NR Description: unknown [Arabidopsis thaliana]
  misc_feature (1)..(238): Homolog of NCBI NO: 7486241 NR Description: probable RNA-binding protein At2g19380 -
  misc_feature (1)..(238): Homolog of NCBI NO: 21902026 NR Description: B1097D05.27 [Oryza sativa (japonica
  misc_feature (16)..(198): Homolog of NCBI NO: 18399023 NR Description: RNA recognition motif (RRM)-containing protein
  misc_feature (16)..(198): Homolog of NCBI NO: 7486241 NR Description: probable RNA-binding protein At2g19380 -
  misc_feature (1)..(171): Homolog of NCBI NO: 18399023 NR Description: RNA recognition motif (RRM)-containing protein
  misc_feature (1)..(171): Homolog of NCBI NO: 7486241 NR Description: probable RNA-binding protein At2g19380 -
  misc_feature (118)..(235): Homolog of NCBI NO: 17552224 NR Description: Cell growth regulating nucleolar protein like kD) [Caenorhabditis elegans] >gi|2496898|sp|Q09464|YQ58_CAEEL
  misc_feature (1)..(35): Homolog of NCBI NO: 17552224 NR Description: Cell growth regulating nucleolar protein like kD) [Caenorhabditis elegans] >gi|2496898|sp|Q09464|YQ58_CAEEL

SEQ ID NO: 105047 - DNA, 1370 bp, Arabidopsis thaliana
  misc_feature (1)..(1370): Ceres Seq. ID no. 13616334
  misc_feature: MA Experiment ID: 108434 Result: Down-regulated in Transcription
  misc_feature: MA Experiment 108434 PARAMETER Experiment Name: At_Root_Tips_cDNA_P Parameter: Tissue Value: Root Tips
  misc_feature: MA Experiment ID: 108488 Result: Down-regulated in Transcription
  misc_feature: MA Experiment ID: 108585 Result: Up-regulated in Transcription
  misc_feature: MA Experiment 108585 PARAMETER Experiment Name: At_5mM_NaNP_cDNA_P Parameter: Timepoint (hr) Value: 6
  misc_feature: MA Experiment 108585 PARAMETER Experiment Name: At_5mM_NaNP_cDNA_P Parameter: Tissue Value: Aerial
  misc_feature: MA Experiment 108585 PARAMETER Experiment Name: At_5mM_NaNP_cDNA_P Parameter: Treatment Value: null
  misc_feature: MA Experiment ID: 108668 Result: Up-regulated in Transcription
  misc_feature: MA Experiment 108668 PARAMETER Experiment Name: At_2mM_SA_cDNA_P Parameter: Plant Line Value: WS
  misc_feature: MA Experiment 108668 PARAMETER Experiment Name: At_2mM_SA_cDNA_P Parameter: Timepoint (hr) Value: 6
  misc_feature: MA Experiment 108668 PARAMETER Experiment Name: At_2mM_SA_cDNA_P Parameter: Treatment Value: 2mM SA vs. No Treatment
  misc_feature: MA Experiment ID: 20000112 Result: Up-regulated in Transcription
  misc_feature: MA Experiment 20000112 PARAMETER Experiment Name: At_42deg_Heat_cDNA_P Parameter: Temperature (deg C) Value: 42 vs. 22
  misc_feature: MA Experiment 20000112 PARAMETER Experiment Name: At_42deg_Heat_cDNA_P Parameter: Timepoint (hr) Value: 2
  misc_feature: MA Experiment 20000112 PARAMETER Experiment Name: At_42deg_Heat_cDNA_P Parameter: Tissue Value: Aerial
  misc_feature: MA Experiment ID: 20000144 Result: Up-regulated in Transcription
  misc_feature: MA Experiment 20000144 PARAMETER Experiment Name: At_42deg_Heat_cDNA_P Parameter: Temperature (deg C) Value: 42 vs. 22
  misc_feature: MA Experiment 20000144 PARAMETER Experiment Name: At_42deg_Heat_cDNA_P Parameter: Timepoint (hr) Value: 1
  misc_feature: MA Experiment 20000144 PARAMETER Experiment Name: At_42deg_Heat_cDNA_P Parameter: Tissue Value: Aerial
  misc_feature: MA Experiment ID: 20000180 Result: Down-regulated in Transcription
  misc_feature: MA Experiment 20000180 PARAMETER Experiment Name: At_Germinating_Seeds_P Parameter: Age (hr) Value: 24 vs. 0
  misc_feature: MA Experiment 20000180 PARAMETER Experiment Name: At_Germinating_Seeds_P Parameter: Tissue Value: Germinating Seeds
  misc_feature: MA Experiment ID: 20000182 Result: Up-regulated in Transcription
  misc_feature: MA Experiment 20000182 PARAMETER Experiment Name: At_2mM_SA_P Parameter: Age (day) Value: 14
  misc_feature: MA Experiment 20000182 PARAMETER Experiment Name: At_2mM_SA_P Parameter: Organism Value: A. thaliana
  misc_feature: MA Experiment 20000182 PARAMETER Experiment Name: At_2mM_SA_P Parameter: Plant Line Value: WS
  misc_feature: MA Experiment 20000182 PARAMETER Experiment Name: At_2mM_SA_P Parameter: Timepoint (hr) Value: 6
  misc_feature: MA Experiment 20000182 PARAMETER Experiment Name: At_2mM_SA_P Parameter: Tissue Value: Aerial
  misc_feature: MA Experiment 20000182 PARAMETER Experiment Name: At_2mM_SA_P Parameter: Treatment Value: 2mM SA vs. No Treatment
  misc_feature: MA Experiment ID: 20000184 Result: Down-regulated in Transcription
  misc_feature: MA Experiment 20000184 PARAMETER Experiment Name: At_Shoots__P Parameter: Age (day) Value: 7
  misc_feature: MA Experiment 20000184 PARAMETER Experiment Name: At_Shoots__P Parameter: Tissue Value: Shoots vs. Whole Plant
  misc_feature: MA Experiment ID: 20000794 Result: Up-regulated in Transcription
  misc_feature: MA Experiment 20000794 PARAMETER Experiment Name: At_Petals_P Parameter: Age (day) Value: 23-25 days
  misc_feature: MA Experiment 20000794 PARAMETER Experiment Name: At_Petals_P Parameter: Plant Line Value: WS
  misc_feature: MA Experiment 20000794 PARAMETER Experiment Name: At_Petals_P Parameter: Tissue Value: Petals vs. Whole plant
  misc_feature: MA Experiment ID: 20001560 Result: Down-regulated in Transcription
  misc_feature: MA Experiment 20001560 PARAMETER Experiment Name: At_Drought_Soil_Dry_P Parameter: Age (day) Value: 28
  misc_feature: MA Experiment 20001560 PARAMETER Experiment Name: At_Drought_Soil_Dry_P Parameter: Organism Value: A. thaliana
  misc_feature: MA Experiment 20001560 PARAMETER Experiment Name: At_Drought_Soil_Dry_P Parameter: Plant Line Value: WS
  misc_feature: MA Experiment 20001560 PARAMETER Experiment Name: At_Drought_Soil_Dry_P Parameter: Post Timepoint (hr) Value: None
  misc_feature: MA Experiment 20001560 PARAMETER Experiment Name: At_Drought_Soil_Dry_P Parameter: Post-Treatment Value: None
  misc_feature: MA Experiment 20001560 PARAMETER Experiment Name: At_Drought_Soil_Dry_P Parameter: Timepoint (day) Value: 14
  misc_feature: MA Experiment 20001560 PARAMETER Experiment Name: At_Drought_Soil_Dry_P Parameter: Treatment Value: Drought vs. No Drought
  misc_feature: MA Experiment ID: 20001911 Result: Up-regulated in Transcription
  misc_feature: MA Experiment 20001911 PARAMETER Experiment Name: At_Drought_Reproduction_P Parameter: Age (day) Value: 40
  misc_feature: MA Experiment 20001911 PARAMETER Experiment Name: At_Drought_Reproduction_P Parameter: Organism Value: A. thaliana
  misc_feature: MA Experiment 20001911 PARAMETER Experiment Name: At_Drought_Reproduction_P Parameter: Plant Line Value: WS
  misc_feature: MA Experiment 20001911 PARAMETER Experiment Name: At_Drought_Reproduction_P Parameter: Timepoint (day) Value: 10
  misc_feature: MA Experiment 20001911 PARAMETER Experiment Name: At_Drought_Reproduction_P Parameter: Tissue Value: Flowers
  misc_feature: MA Experiment 20001911 PARAMETER Experiment Name: At_Drought_Reproduction_P Parameter: Treatment Value: Drought vs. No Drought
aaaaaaaacaaacacaaaacacgcttctcttgttgagaagctagcaaaacaacactaaacctgaaacaaacgtaaatccgccgcaacaacccagttttttccgacggcgtacaagcttcctccgccgtaacgccgtcgtttaataccaagaagcttgattaggtttccgtagtgtgtgatttgtgagattcttttaaggttctgaacactgatgtcaaacccattgaaagagtcaagagaggatattgcaaattctactcctcacatgagggataatgagtatgttcggctagttgtggctcatgaagcctccccagctgaaaccgtgttgtctctatcgcaatcagaggtgcagagtaagaaatttatgtggtggttaaaagctttgggaatatgtgcagttgctctcttgcttacgcttgttttcggaaaatggggagttccgtttgtgtttcaaaaggttcttattccaattttgcaatgggaagcaactgcgtttggccgtcctatgctcgcgattgtccttgttgtttccttggctttgtttcctgtgttcttgataccttctggtccttccatgtggttagctgggatgatttttggttatggtctcggttttgttattatcatggttggaaccaccattggcatggttctcccttacttaatcgggcttatgttccgtgatcgcctccatcaatggttaaaaagatggcctcgtcaagctgctgttctaagactagctgcagaaggaagctggttccatcaattcagagtcgtggcaatctttcgggtttccccatttccttacacgatttttaactacgcaatcgtcgtgacaagcatgagattctggccttacttcttcggatccatagcaggaatgataccagaagctttcatctacatttacagcggtcggttaatcagaacattcgcagatgtgcaatacggacatcaacgtttgacaacagtggagattgtgtacaatgtaatctccttagtcattgcggttgtgaccactgttgctttcactgtgtacgcgaaaagagctttgagagagcttcaaaacgcagaagctaatgaagatgaagaagttcaagtaagaaaagtgagattcgagatgaagaacgtagttcagcacgaagaagataatcatcagcgtttgccttagccgaaagttgacacaaagctaagataggtttgtataaagctttgaacgttgacatgttcttcagcaggatttagagtaaataacaaaaggggtaaaaaaagtctgatatagtaggaagactaagactagtcaagattggatttatattagtgtgactgattccaattattgaaacaaataaaagaagcatttaggc

SEQ ID NO: 105048 - protein, 320 aa, Arabidopsis thaliana; identical to SEQ ID NO: 77403
  peptide (1)..(320): Ceres Seq. ID no. 13616335
  misc_feature (96)..(232): Pfam Name: DedA family Pfam Description: DedA family
  misc_feature (1)..(320): Homolog of NCBI NO: 18395356 NR Description: expressed protein [Arabidopsis thaliana] At2g02370/T16F16.16 [Arabidopsis thaliana]
  misc_feature (8)..(289): Homolog of NCBI NO: 31249711 NR Description: hypothetical protein [Oryza sativa (japonica
  misc_feature (161)..(320): Homolog of NCBI NO: 25410981 NR Description: hypothetical protein At2g02370 [imported] -
  misc_feature (55)..(320): Homolog of NCBI NO: 34913316 NR Description: P0519E12.36 [Oryza sativa (japonica >gi|22093829|dbj|BAC07116.1| hypothetical protein [Oryza sativa
  misc_feature (32)..(289): Homolog of NCBI NO: 15221330 NR Description: expressed protein [Arabidopsis thaliana]
  misc_feature (24)..(289): Homolog of NCBI NO: 30685958 NR Description: expressed protein [Arabidopsis thaliana] unknown protein [Arabidopsis thaliana]
  misc_feature (24)..(286): Homolog of NCBI NO: 15234386 NR Description: expressed protein [Arabidopsis thaliana]
  misc_feature (148)..(289): Homolog of NCBI NO: 7486891 NR Description: hypothetical protein T12H17.240 - Arabidopsis >gi|2832606|emb|CAA16570.1| predicted protein [Arabidopsis >gi|3292810|emb|CAA19800.1| putative protein [Arabidopsis
  misc_feature (32)..(161): Homolog of NCBI NO: 8778630 NR Description: F5O11.19 [Arabidopsis thaliana]
  misc_feature (233)..(289): Homolog of NCBI NO: 8778630 NR Description: F5O11.19 [Arabidopsis thaliana]

SEQ ID NO: 105049 - protein, 302 aa, Arabidopsis thaliana; identical to SEQ ID NO: 77404
  peptide (1)..(302): Ceres Seq. ID no. 13616336
  misc_feature (78)..(214): Pfam Name: DedA family Pfam Description: DedA family
  misc_feature (1)..(302): Homolog of NCBI NO: 18395356 NR Description: expressed protein [Arabidopsis thaliana] At2g02370/T16F16.16 [Arabidopsis thaliana]
  misc_feature (1)..(271): Homolog of NCBI NO: 31249711 NR Description: hypothetical protein [Oryza sativa (japonica
  misc_feature (143)..(302): Homolog of NCBI NO: 25410981 NR Description: hypothetical protein At2g02370 [imported] -
  misc_feature (37)..(302): Homolog of NCBI NO: 34913316 NR Description: P0519E12.36 [Oryza sativa (japonica >gi|22093829|dbj|BAC07116.1| hypothetical protein [Oryza sativa
  misc_feature (14)..(271): Homolog of NCBI NO: 15221330 NR Description: expressed protein [Arabidopsis thaliana]
  misc_feature (6)..(271): Homolog of NCBI NO: 30685958 NR Description: expressed protein [Arabidopsis thaliana] unknown protein [Arabidopsis thaliana]
  misc_feature (6)..(268): Homolog of NCBI NO: 15234386 NR Description: expressed protein [Arabidopsis thaliana]
  misc_feature (130)..(271): Homolog of NCBI NO: 7486891 NR Description: hypothetical protein T12H17.240 - Arabidopsis >gi|2832606|emb|CAA16570.1| predicted protein [Arabidopsis >gi|3292810|emb|CAA19800.1| putative protein [Arabidopsis
  misc_feature (14)..(143): Homolog of NCBI NO: 8778630 NR Description: F5O11.19 [Arabidopsis thaliana]
  misc_feature (215)..(271): Homolog of NCBI NO: 8778630 NR Description: F5O11.19 [Arabidopsis thaliana]

SEQ ID NO: 105050 - protein, 268 aa, Arabidopsis thaliana; identical to SEQ ID NO: 77405
  peptide (1)..(268): Ceres Seq. ID no. 13616337
  misc_feature (44)..(180): Pfam Name: DedA family Pfam Description: DedA family
  misc_feature (1)..(268): Homolog of NCBI NO: 18395356 NR Description: expressed protein [Arabidopsis thaliana] At2g02370/T16F16.16 [Arabidopsis thaliana]
  misc_feature (1)..(237): Homolog of NCBI NO: 31249711 NR Description: hypothetical protein [Oryza sativa (japonica
  misc_feature (109)..(268): Homolog of NCBI NO: 25410981 NR Description: hypothetical protein At2g02370 [imported] -
  misc_feature (3)..(268): Homolog of NCBI NO: 34913316 NR Description: P0519E12.36 [Oryza sativa (japonica >gi|22093829|dbj|BAC07116.1| hypothetical protein [Oryza sativa
  misc_feature (1)..(237): Homolog of NCBI NO: 15221330 NR Description: expressed protein [Arabidopsis thaliana]
  misc_feature (1)..(237): Homolog of NCBI NO: 30685958 NR Description: expressed protein [Arabidopsis thaliana] unknown protein [Arabidopsis thaliana]
  misc_feature (1)..(234): Homolog of NCBI NO: 15234386 NR Description: expressed protein [Arabidopsis thaliana]
  misc_feature (96)..(237): Homolog of NCBI NO: 7486891 NR Description: hypothetical protein T12H17.240 - Arabidopsis >gi|2832606|emb|CAA16570.1| predicted protein [Arabidopsis >gi|3292810|emb|CAA19800.1| putative protein [Arabidopsis
  misc_feature (1)..(109): Homolog of NCBI NO: 8778630 NR Description: F5O11.19 [Arabidopsis thaliana]
  misc_feature (181)..(237): Homolog of NCBI NO: 8778630 NR Description: F5O11.19 [Arabidopsis thaliana]

SEQ ID NO: 105051 - DNA, 1262 bp, Arabidopsis thaliana
  misc_feature (1)..(1262): Ceres Seq. ID no. 13616342
  misc_feature: MA Experiment ID: 20000184 Result: Down-regulated in Transcription
  misc_feature: MA Experiment 20000184 PARAMETER Experiment Name: At_Shoots__P Parameter: Age (day) Value: 7
  misc_feature: MA Experiment 20000184 PARAMETER Experiment Name: At_Shoots__P Parameter: Tissue Value: Shoots vs. Whole Plant
gatcggtcccttttgttttatcgttttagggtttgtagctcctttctctttttttcttttctcaatttcccccaaattaaaaaaaaactctctctttcagagatttacaaatttcatttctccaaatccgaaaccccaaagtgaatatttttccttctgggtttcttttgtttgcctggaaacatttgtctcagattttgattttgaccggagtactcatattctccggcgatttctccggcgacatcgtttgtgaaatggagggaattactcatccaatacctcgtactgttgaagaggtctttagcgacttcagaggtcgacgagctggtcttattaaagctctcactaatgatatggtgaagttttaccaaacgtgtgatcctgagaaggagaatttgtgtctctatggacttccaaatgagacatgggaggttaatctacccgttgaggaagttcctcctgagcttcctgaaccagctttaggcatcaatttcgctagagacggaatgcaagaaaaggactgggtatctttggtcgcagttcacagtgattcatggctgctttctgttgcattttactttggtgcacgtttcggatttggcaagaatgagaggaagaggctgttccagatgattaatgagctgccaaccattttcgaagttgtgagcggcaatgcaaagcagtccaaggatctatctgttaacaacaataatagcaaaagcaaacctagtggcgtcaagtctcgccaatccgaatctctctcaaaggttgcaaagatgtcatctccaccgccaaaagaagaagaagaagaagaagatgagagtgaagatgagagtgaagacgatgaacaaggtgcggtttgtggtgcttgtggagacaactacggtacagatgagttctggatttgctgcgacgcgtgtgagaaatggttccatggaaaatgtgtgaagataacacctgcaaaagcagaacacatcaagcattacaaatgcccaacttgcagtaacaagagagctagaccttgaagttaaataaccaaattatgaaaaggtaaagcgagttaggagaaaattatgaaagaagaaggtgaagtttccagtttataagaaatgccagtaaaagggacttagaagatgtaagcaggtaaaaaaaaaaattgtattgcttagtctttattgttggattgagactatctacagttggtgatgtcttttcttttctttttttggatttttgttgttgttaatgttaattctact

SEQ ID NO: 105052 - protein, 256 aa, Arabidopsis thaliana
  peptide (1)..(256): Ceres Seq. ID no. 13616343
  misc_feature (202)..(252): Pfam Name: PHD-finger Pfam Description: PHD-finger
  misc_feature (1)..(256): Homolog of NCBI NO: 15226967 NR Description: PHD-type zinc finger protein -related
  misc_feature (1)..(256): Homolog of NCBI NO: 21593407 NR Description: putative PHD-type zinc finger protein
  misc_feature (1)..(253): Homolog of NCBI NO: 15223786 NR Description: nucleic acid binding protein (alfin-1) -related
  misc_feature (36)..(253): Homolog of NCBI NO: 25346630 NR Description: F14L17.29 protein - Arabidopsis thaliana
  misc_feature (1)..(31): Homolog of NCBI NO: 25346630 NR Description: F14L17.29 protein - Arabidopsis thaliana
  misc_feature (1)..(255): Homolog of NCBI NO: 7488751 NR Description: probable zinc finger protein - alfalfa (fragment)
  misc_feature (1)..(256): Homolog of NCBI NO: 30687843 NR Description: zinc finger protein - like [Arabidopsis thaliana]
  misc_feature (9)..(255): Homolog of NCBI NO: 15239624 NR Description: nucleic acid binding protein - like [Arabidopsis
  misc_feature (9)..(255): Homolog of NCBI NO: 15229157 NR Description: nucleic acid binding protein-related [Arabidopsis
  misc_feature (10)..(255): Homolog of NCBI NO: 34907474 NR Description: nucleic acid binding protein [Oryza sativa
MEGITHPIPRTVEEVFSDFRGRRAGLIKALTNDMVKFYQTCDPEKENLCLYGLPNETWEVNLPVEEVPPELPEPALGINFARDGMQEKDWVSLVAVHSDSWLLSVAFYFGARFGFGKNERKRLFQMINELPTIFEVVSGNAKQSKDLSVNNNNSKSKPSGVKSRQSESLSKVAKMSSPPPKEEEEEEDESEDESEDDEQGAVCGACGDNYGTDEFWICCDACEKWFHGKCVKITPAKAEHIKHYKCPTCSNKRARP

SEQ ID NO: 105053 - protein, 223 aa, Arabidopsis thaliana
  peptide (1)..(223): Ceres Seq. ID no. 13616344
  misc_feature (169)..(219): Pfam Name: PHD-finger Pfam Description: PHD-finger
  misc_feature (1)..(223): Homolog of NCBI NO: 15226967 NR Description: PHD-type zinc finger protein -related
  misc_feature (1)..(223): Homolog of NCBI NO: 21593407 NR Description: putative PHD-type zinc finger protein
  misc_feature (1)..(220): Homolog of NCBI NO: 15223786 NR Description: nucleic acid binding protein (alfin-1) -related
  misc_feature (3)..(220): Homolog of NCBI NO: 25346630 NR Description: F14L17.29 protein - Arabidopsis thaliana
  misc_feature (1)..(222): Homolog of NCBI NO: 7488751 NR Description: probable zinc finger protein - alfalfa (fragment)
  misc_feature (1)..(223): Homolog of NCBI NO: 30687843 NR Description: zinc finger protein - like [Arabidopsis thaliana]
  misc_feature (1)..(222): Homolog of NCBI NO: 15239624 NR Description: nucleic acid binding protein - like [Arabidopsis
  misc_feature (1)..(222): Homolog of NCBI NO: 15229157 NR Description: nucleic acid binding protein-related [Arabidopsis
  misc_feature (1)..(222): Homolog of NCBI NO: 34907474 NR Description: nucleic acid binding protein [Oryza sativa
  misc_feature (1)..(222): Homolog of NCBI NO: 4091080 NR Description: nucleic acid binding protein [Oryza sativa]
MVKFYQTCDPEKENLCLYGLPNETWEVNLPVEEVPPELPEPALGINFARDGMQEKDWVSLVAVHSDSWLLSVAFYFGARFGFGKNERKRLFQMINELPTIFEVVSGNAKQSKDLSVNNNNSKSKPSGVKSRQSESLSKVAKMSSPPPKEEEEEEDESEDESEDDEQGAVCGACGDNYGTDEFWICCDACEKWFHGKCVKITPAKAEHIKHYKCPTCSNKRARP

SEQ ID NO: 105054 - protein, 172 aa, Arabidopsis thaliana
  peptide (1)..(172): Ceres Seq. ID no. 13616345
  misc_feature (118)..(168): Pfam Name: PHD-finger Pfam Description: PHD-finger
  misc_feature (1)..(172): Homolog of NCBI NO: 15226967 NR Description: PHD-type zinc finger protein -related
  misc_feature (1)..(172): Homolog of NCBI NO: 21593407 NR Description: putative PHD-type zinc finger protein
  misc_feature (1)..(169): Homolog of NCBI NO: 15223786 NR Description: nucleic acid binding protein (alfin-1) -related
  misc_feature (1)..(169): Homolog of NCBI NO: 25346630 NR Description: F14L17.29 protein - Arabidopsis thaliana
  misc_feature (1)..(171): Homolog of NCBI NO: 7488751 NR Description: probable zinc finger protein - alfalfa (fragment)
  misc_feature (1)..(172): Homolog of NCBI NO: 30687843 NR Description: zinc finger protein - like [Arabidopsis thaliana]
  misc_feature (1)..(171): Homolog of NCBI NO: 15239624 NR Description: nucleic acid binding protein - like [Arabidopsis
  misc_feature (1)..(171): Homolog of NCBI NO: 15229157 NR Description: nucleic acid binding protein-related [Arabidopsis
  misc_feature (1)..(171): Homolog of NCBI NO: 34907474 NR Description: nucleic acid binding protein [Oryza sativa
  misc_feature (1)..(171): Homolog of NCBI NO: 4091080 NR Description: nucleic acid binding protein [Oryza sativa]
MQEKDWVSLVAVHSDSWLLSVAFYFGARFGFGKNERKRLFQMINELPTIFEVVSGNAKQSKDLSVNNNNSKSKPSGVKSRQSESLSKVAKMSSPPPKEEEEEEDESEDESEDDEQGAVCGACGDNYGTDEFWICCDACEKWFHGKCVKITPAKAEHIKHYKCPTCSNKRARP

SEQ ID NO: 105055 - DNA, 1714 bp, Arabidopsis thaliana
  misc_feature (1)..(1714): Ceres Seq. ID no. 13616358
  misc_feature: MA Experiment ID: 20000169 Result: Up-regulated in Transcription
  misc_feature: MA Experiment 20000169 PARAMETER Experiment Name: At_100uM_ABA_P Parameter: Age (day) Value: 14
  misc_feature: MA Experiment 20000169 PARAMETER Experiment Name: At_100uM_ABA_P Parameter: Organism Value: A. thaliana
  misc_feature: MA Experiment 20000169 PARAMETER Experiment Name: At_100uM_ABA_P Parameter: Plant Line Value: WS
  misc_feature: MA Experiment 20000169 PARAMETER Experiment Name: At_100uM_ABA_P Parameter: Timepoint (hr) Value: 6
  misc_feature: MA Experiment 20000169 PARAMETER Experiment Name: At_100uM_ABA_P Parameter: Tissue Value: Aerial
  misc_feature: MA Experiment 20000169 PARAMETER Experiment Name: At_100uM_ABA_P Parameter: Treatment Value: 100uM ABA vs. No Treatment
  misc_feature: MA Experiment ID: 20000184 Result: Down-regulated in Transcription
  misc_feature: MA Experiment 20000184 PARAMETER Experiment Name: At_Shoots__P Parameter: Age (day) Value: 7
  misc_feature: MA Experiment 20000184 PARAMETER Experiment Name: At_Shoots__P Parameter: Tissue Value: Shoots vs. Whole Plant
  misc_feature: MA Experiment ID: 20000227 Result: Down-regulated in Transcription
  misc_feature: MA Experiment 20000227 PARAMETER Experiment Name: At_Root-Tips-vs-Tops_P Parameter: Tissue Value: Root Tips vs. Root Tops
  misc_feature: MA Experiment ID: 20000234 Result: Down-regulated in Transcription
  misc_feature: MA Experiment 20000234 PARAMETER Experiment Name: At_Siliques_P Parameter: Age (day) Value: 21
  misc_feature: MA Experiment 20000234 PARAMETER Experiment Name: At_Siliques_P Parameter: Organism Value: A. thaliana
  misc_feature: MA Experiment 20000234 PARAMETER Experiment Name: At_Siliques_P Parameter: Plant Line Value: WS
  misc_feature: MA Experiment 20000234 PARAMETER Experiment Name: At_Siliques_P Parameter: Tissue Value: Less Than 5mm Siliques vs. Whole Plant
  misc_feature: MA Experiment ID: 20000235 Result: Down-regulated in Transcription
  misc_feature: MA Experiment 20000235 PARAMETER Experiment Name: At_Siliques_P Parameter: Age (day) Value: 21
  misc_feature: MA Experiment 20000235 PARAMETER Experiment Name: At_Siliques_P Parameter: Organism Value: A. thaliana
  misc_feature: MA Experiment 20000235 PARAMETER Experiment Name: At_Siliques_P Parameter: Plant Line Value: WS
  misc_feature: MA Experiment 20000235 PARAMETER Experiment Name: At_Siliques_P Parameter: Tissue Value: 5-10mm Siliques vs. Whole Plant
  misc_feature: MA Experiment ID: 20000265 Result: Down-regulated in Transcription
  misc_feature: MA Experiment 20000265 PARAMETER Experiment Name: At_Open_Flower_P Parameter: Age (day) Value: 21
  misc_feature: MA Experiment 20000265 PARAMETER Experiment Name: At_Open_Flower_P Parameter: Plant Line Value: WS
  misc_feature: MA Experiment 20000265 PARAMETER Experiment Name: At_Open_Flower_P Parameter: Tissue Value: Closed Flower vs. Whole Plant
  misc_feature: MA Experiment ID: 20000269 Result: Down-regulated in Transcription
  misc_feature: MA Experiment 20000269 PARAMETER Experiment Name: At_1mM_KNO3_L-vs-H_Roots_P Parameter: Age (day) Value: 7,10,12
  misc_feature: MA Experiment 20000269 PARAMETER Experiment Name: At_1mM_KNO3_L-vs-H_Roots_P Parameter: Organism Value: A. thaliana
  misc_feature: MA Experiment 20000269 PARAMETER Experiment Name: At_1mM_KNO3_L-vs-H_Roots_P Parameter: Plant Line Value: WS
  misc_feature: MA Experiment 20000269 PARAMETER Experiment Name: At_1mM_KNO3_L-vs-H_Roots_P Parameter: Timepoint (day) Value: 7,10,12
  misc_feature: MA Experiment 20000269 PARAMETER Experiment Name: At_1mM_KNO3_L-vs-H_Roots_P Parameter: Tissue Value: Roots
  misc_feature: MA Experiment 20000269 PARAMETER Experiment Name: At_1mM_KNO3_L-vs-H_Roots_P Parameter: Treatment Value: 1mM KNO3 vs. 50mM KNO3
  misc_feature: MA Experiment ID: 20000286 Result: Down-regulated in Transcription
  misc_feature: MA Experiment 20000286 PARAMETER Experiment Name: At_Open_Flower_P Parameter: Age (day) Value: 21
  misc_feature: MA Experiment 20000286 PARAMETER Experiment Name: At_Open_Flower_P Parameter: Plant Line Value: WS
  misc_feature: MA Experiment 20000286 PARAMETER Experiment Name: At_Open_Flower_P Parameter: Tissue Value: Half Open vs. Whole Plant
  misc_feature: MA Experiment ID: 20000308 Result: Down-regulated in Transcription
  misc_feature: MA Experiment 20000308 PARAMETER Experiment Name: At_100mM_NaCl__P Parameter: Age (day) Value: 17
  misc_feature: MA Experiment 20000308 PARAMETER Experiment Name: At_100mM_NaCl__P Parameter: Organism Value: A. thaliana
  misc_feature: MA Experiment 20000308 PARAMETER Experiment Name: At_100mM_NaCl__P Parameter: Plant Line Value: WS
  misc_feature: MA Experiment 20000308 PARAMETER Experiment Name: At_100mM_NaCl__P Parameter: Timepoint (hr) Value: 72
  misc_feature: MA Experiment 20000308 PARAMETER Experiment Name: At_100mM_NaCl__P Parameter: Tissue Value: Whole Plant
  misc_feature: MA Experiment 20000308 PARAMETER Experiment Name: At_100mM_NaCl__P Parameter: Treatment Value: 100mM NaCl vs. No Treatment
  misc_feature: MA Experiment ID: 20000436 Result: Up-regulated in Transcription
  misc_feature: MA Experiment 20000436 PARAMETER Experiment Name: At_Drought_P Parameter: Age (day) Value: 7
  misc_feature: MA Experiment 20000436 PARAMETER Experiment Name: At_Drought_P Parameter: Organism Value: A. thaliana
  misc_feature: MA Experiment 20000436 PARAMETER Experiment Name: At_Drought_P Parameter: Plant Line Value: WS
  misc_feature: MA Experiment 20000436 PARAMETER Experiment Name: At_Drought_P Parameter: Timepoint (hr) Value: 12
  misc_feature: MA Experiment 20000436 PARAMETER Experiment Name: At_Drought_P Parameter: Tissue Value: Whole Plant
  misc_feature: MA Experiment 20000436 PARAMETER Experiment Name: At_Drought_P Parameter: Treatment Value: Drought vs. No Drought
  misc_feature: MA Experiment ID: 20000437 Result: Up-regulated in Transcription
  misc_feature: MA Experiment 20000437 PARAMETER Experiment Name: At_Drought_P Parameter: Age (day) Value: 8
  misc_feature: MA Experiment 20000437 PARAMETER Experiment Name: At_Drought_P Parameter: Organism Value: A. thaliana
  misc_feature: MA Experiment 20000437 PARAMETER Experiment Name: At_Drought_P Parameter: Plant Line Value: WS
  misc_feature: MA Experiment 20000437 PARAMETER Experiment Name: At_Drought_P Parameter: Timepoint (hr) Value: 24
  misc_feature: MA Experiment 20000437 PARAMETER Experiment Name: At_Drought_P Parameter: Tissue Value: Whole Plant
  misc_feature: MA Experiment 20000437 PARAMETER Experiment Name: At_Drought_P Parameter: Treatment Value: Drought vs. No Drought
  misc_feature: MA Experiment ID: 20000439 Result: Down-regulated in Transcription
  misc_feature: MA Experiment 20000439 PARAMETER Experiment Name: At_Roots__P Parameter: Age (day) Value: 14 vs. 21
  misc_feature: MA Experiment 20000439 PARAMETER Experiment Name: At_Roots__P Parameter: Organism Value: A. thaliana
  misc_feature: MA Experiment 20000439 PARAMETER Experiment Name: At_Roots__P Parameter: Tissue Value: Roots vs. Whole Plant
  misc_feature: MA Experiment ID: 20000441 Result: Up-regulated in Transcription
  misc_feature: MA Experiment 20000441 PARAMETER Experiment Name: At_1uM_BR-BRZ__P Parameter: Tissue Value: Shoot Apices
  misc_feature: MA Experiment 20000441 PARAMETER Experiment Name: At_1uM_BR-BRZ__P Parameter: Treatment Value: 1uM BR vs. No Treatment
  misc_feature: MA Experiment ID: 20000443 Result: Up-regulated in Transcription
  misc_feature: MA Experiment 20000443 PARAMETER Experiment Name: At_1uM_BR-BRZ__P Parameter: Tissue Value: Shoot Apices
  misc_feature: MA Experiment 20000443 PARAMETER Experiment Name: At_1uM_BR-BRZ__P Parameter: Treatment Value: 1uM BRZ vs. No Treatment
  misc_feature: MA Experiment ID: 20000451 Result: Down-regulated in Transcription
  misc_feature: MA Experiment 20000451 PARAMETER Experiment Name: At_CS6879_Shoots-Roots_P Parameter: Age (day) Value: 14
  misc_feature: MA Experiment 20000451 PARAMETER Experiment Name: At_CS6879_Shoots-Roots_P Parameter: Organism Value: A. thaliana
  misc_feature: MA Experiment 20000451 PARAMETER Experiment Name: At_CS6879_Shoots-Roots_P Parameter: Plant Line Value: CS6879 vs. WS
  misc_feature: MA Experiment 20000451 PARAMETER Experiment Name: At_CS6879_Shoots-Roots_P Parameter: Tissue Value: Roots
  misc_feature: MA Experiment ID: 20001247 Result: Up-regulated in Transcription
  misc_feature: MA Experiment 20001247 PARAMETER Experiment Name: At_Far-red-induction_P Parameter: Age (day) Value: 7
  misc_feature: MA Experiment 20001247 PARAMETER Experiment Name: At_Far-red-induction_P Parameter: Light Value: Far-red vs. White
  misc_feature: MA Experiment 20001247 PARAMETER Experiment Name: At_Far-red-induction_P Parameter: Organism Value: A. thaliana
  misc_feature: MA Experiment 20001247 PARAMETER Experiment Name: At_Far-red-induction_P Parameter: Plant Line Value: Columbia
  misc_feature: MA Experiment 20001247 PARAMETER Experiment Name: At_Far-red-induction_P Parameter: Timepoint (hr) Value: 1
  misc_feature: MA Experiment 20001247 PARAMETER Experiment Name: At_Far-red-induction_P Parameter: Tissue Value: Whole Plant
  misc_feature: MA Experiment ID: 20001248 Result: Up-regulated in Transcription
  misc_feature: MA Experiment 20001248 PARAMETER Experiment Name: At_Far-red-induction_P Parameter: Age (day) Value: 7
  misc_feature: MA Experiment 20001248 PARAMETER Experiment Name: At_Far-red-induction_P Parameter: Light Value: Far-red vs. White
  misc_feature: MA Experiment 20001248 PARAMETER Experiment Name: At_Far-red-induction_P Parameter: Organism Value: A. thaliana
  misc_feature: MA Experiment 20001248 PARAMETER Experiment Name: At_Far-red-induction_P Parameter: Plant Line Value: Columbia
  misc_feature: MA Experiment 20001248 PARAMETER Experiment Name: At_Far-red-induction_P Parameter: Timepoint (hr) Value: 4
  misc_feature: MA Experiment 20001248 PARAMETER Experiment Name: At_Far-red-induction_P Parameter: Tissue Value: Whole Plant
  misc_feature: MA Experiment ID: 20001450 Result: Up-regulated in Transcription
  misc_feature: MA Experiment 20001450 PARAMETER Experiment Name: At_Far-red-induction_P Parameter: Age (day) Value: 7
  misc_feature: MA Experiment 20001450 PARAMETER Experiment Name: At_Far-red-induction_P Parameter: Light Value: Far-red vs. White
  misc_feature: MA Experiment 20001450 PARAMETER Experiment Name: At_Far-red-induction_P Parameter: Organism Value: A. thaliana
  misc_feature: MA Experiment 20001450 PARAMETER Experiment Name: At_Far-red-induction_P Parameter: Plant Line Value: Columbia
  misc_feature: MA Experiment 20001450 PARAMETER Experiment Name: At_Far-red-induction_P Parameter: Timepoint (hr) Value: 8
  misc_feature: MA Experiment 20001450 PARAMETER Experiment Name: At_Far-red-induction_P Parameter: Tissue Value: Whole Plant
  misc_feature: MA Experiment ID: 20001904 Result: Up-regulated in Transcription
  misc_feature: MA Experiment 20001904 PARAMETER Experiment Name: At_Drought_Reproduction_P Parameter: Age (day) Value: 37
  misc_feature: MA Experiment 20001904 PARAMETER Experiment Name: At_Drought_Reproduction_P Parameter: Organism Value: A. thaliana
  misc_feature: MA Experiment 20001904 PARAMETER Experiment Name: At_Drought_Reproduction_P Parameter: Plant Line Value: WS
  misc_feature: MA Experiment 20001904 PARAMETER Experiment Name: At_Drought_Reproduction_P Parameter: Timepoint (day) Value: 7
  misc_feature: MA Experiment 20001904 PARAMETER Experiment Name: At_Drought_Reproduction_P Parameter: Tissue Value: Rosettes
  misc_feature: MA Experiment 20001904 PARAMETER Experiment Name: At_Drought_Reproduction_P Parameter: Treatment Value: Drought vs. No Drought
  misc_feature: MA Experiment ID: 20001905 Result: Up-regulated in Transcription
  misc_feature: MA Experiment 20001905 PARAMETER Experiment Name: At_Drought_Reproduction_P Parameter: Age (day) Value: 40
  misc_feature: MA Experiment 20001905 PARAMETER Experiment Name: At_Drought_Reproduction_P Parameter: Organism Value: A. thaliana
  misc_feature: MA Experiment 20001905 PARAMETER Experiment Name: At_Drought_Reproduction_P Parameter: Plant Line Value: WS
  misc_feature: MA Experiment 20001905 PARAMETER Experiment Name: At_Drought_Reproduction_P Parameter: Timepoint (day) Value: 10
  misc_feature: MA Experiment 20001905 PARAMETER Experiment Name: At_Drought_Reproduction_P Parameter: Tissue Value: Rosettes
  misc_feature: MA Experiment 20001905 PARAMETER Experiment Name: At_Drought_Reproduction_P Parameter: Treatment Value: Drought vs. No Drought
gagaaacgcgacaaaaccaatcgtcctcttccgatagccacaaaacaaaaatcagacaagaagaaagaagaacgtttcttctaacagatagagattacaatcaaattgactcttaatttctcaattccgtatctctcatttcatcttcttcttcttctcctttacttaaggatctctggtttctctttctctcctctgtcttatcttctccaaagttacgctttttttcaatgaaaacattttcttgattcctgatttcaaatttcacaatctggatttcgtgtttcgaattcactttgaagaaaaagtttctcaatttcgcctgaaaacccacatgggattggaactaaacactagactgacaagaagaagaagagtaatcatcatcgagtgtttattacgattatgtccttaacgaaatcttcagaatcagttttcactgaagaagaagaagaagattcctttagcggtcgatacacgttatggatcaaagaagcattagaggagcttccacacaatttcacaatcaccgacccgtttatttcgggtcacccgattgttttcgcgagcttagggtttttgaaaatgactggctattcacgagaagaagtgatcggaagaaacggtaaagtttttcaaggacctaagactaatcgaagatcgatcatggagattcgtgaagcgattcgtgaagagagatcagtgcaagtgagcttgttgaattatcgtaaatctgggtctccgttttggatgttgtttcatatgtgtcctgtttttgggaaagatgatggtaaagtcaccaattttgtggcggttcaggtcccgatttcgggacgagaacatcatcggaagaagttgagaaatgtcggagatttgtcgtcggatacttctccgacatttggttcttgtcgaagagaggtttgttttggtaatttcgtgtgtcaggatcgagctttaccagtggaatgtgatgatgatgaacaaggattagaggattgggaacagtgtgaagcgagtgagtccgagaagctgaaagctacggaagctattaacaatgtgttatctatcttagtgcattacagcgagttgagtggtagattagtctgcggaaagcggtactgcttgcgaggagtagattgtctaagctcgtcgttagttatttctctcggtagaatcaaacaaagtttcgtattaaccaatccatgcttaccagacatgcctatcatttatgcgagtgatgcctttttgacactgaccggttacaagagacaggaagtgttgggacaaaactgtagatttctgagtggggttgatactgattcctcagtactatacgagatgaaggaatgcatcttaaagggacaatcatgcacagtgcaaatactaaattacagaaaagataagagctcattttggaatcttcttcacatctcaccagttcgtaatgcttcaggcaagacagcatattttgtgggtgttcaagtagaagcaagttgtagaaatactgaaattaaagagctgagaccagagacgagacaactgagtgttgtcggtgcggttagagttgcggttagaagctcattgatggtgacatgctaatatacgccagaaagaaaatgcgtcgacttagagaagagtctaaagtgaattggacatacatctttactatatgtataatcatttgacatactacattaatataagtctttatttt

SEQ ID NO: 105056 - protein, 397 aa, Arabidopsis thaliana
  peptide (1)..(397): Ceres Seq. ID no. 13616359
  misc_feature (101)..(144): Pfam Name: PAC motif Pfam Description: PAC motif
  misc_feature (1)..(397): Homolog of NCBI NO: 30678020 NR Description: receptor-related protein kinase [Arabidopsis >gi|18146960|dbj|BAB83170.1| twin LOV protein 1 [Arabidopsis
  misc_feature (1)..(397): Homolog of NCBI NO: 18395411 NR Description: receptor-related protein kinase [Arabidopsis >gi|15010682|gb|AAK74000.1| At2g02710/T20F6.15 [Arabidopsis >gi|16323302|gb|AAL15406.1| At2g02710/T20F6.15 [Arabidopsis
  misc_feature (1)..(350): Homolog of NCBI NO: 7487253 NR Description: probable receptor-like protein kinase [imported]
  misc_feature (250)..(391): Homolog of NCBI NO: 6006310 NR Description: nonphototrophic hypocotyl 1b [Oryza sativa
  misc_feature (5)..(142): Homolog of NCBI NO: 6006310 NR Description: nonphototrophic hypocotyl 1b [Oryza sativa
  misc_feature (12)..(142): Homolog of NCBI NO: 20260484 NR Description: unknown protein [Arabidopsis thaliana]
  misc_feature (250)..(363): Homolog of NCBI NO: 20260484 NR Description: unknown protein [Arabidopsis thaliana]
  misc_feature (12)..(142): Homolog of NCBI NO: 30697015 NR Description: non phototropic hypocotyl 1-related [Arabidopsis
  misc_feature (250)..(363): Homolog of NCBI NO: 30697015 NR Description: non phototropic hypocotyl 1-related [Arabidopsis
  misc_feature (28)..(155): Homolog of NCBI NO: 20797092 NR Description: putative blue light receptor [Chlamydomonas
MSLTKSSESVFTEEEEEDSFSGRYTLWIKEALEELPHNFTITDPFISGHPIVFASLGFLKMTGYSREEVIGRNGKVFQGPKTNRRSIMEIREAIREERSVQVSLLNYRKSGSPFWMLFHMCPVFGKDDGKVTNFVAVQVPISGREHHRKKLRNVGDLSSDTSPTFGSCRREVCFGNFVCQDRALPVECDDDEQGLEDWEQCEASESEKLKATEAINNVLSILVHYSELSGRLVCGKRYCLRGVDCLSSSLVISLGRIKQSFVLTNPCLPDMPIIYASDAFLTLTGYKRQEVLGQNCRFLSGVDTDSSVLYEMKECILKGQSCTVQILNYRKDKSSFWNLLHISPVRNASGKTAYFVGVQVEASCRNTEIKELRPETRQLSVVGAVRVAVRSSLMVTC

SEQ ID NO: 105057 - protein, 337 aa, Arabidopsis thaliana
  peptide (1)..(337): Ceres Seq. ID no. 13616360
  misc_feature (41)..(84): Pfam Name: PAC motif Pfam Description: PAC motif
  misc_feature (1)..(337): Homolog of NCBI NO: 30678020 NR Description: receptor-related protein kinase [Arabidopsis >gi|18146960|dbj|BAB83170.1| twin LOV protein 1 [Arabidopsis
  misc_feature (1)..(337): Homolog of NCBI NO: 18395411 NR Description: receptor-related protein kinase [Arabidopsis >gi|15010682|gb|AAK74000.1| At2g02710/T20F6.15 [Arabidopsis >gi|16323302|gb|AAL15406.1| At2g02710/T20F6.15 [Arabidopsis
  misc_feature (1)..(290): Homolog of NCBI NO: 7487253 NR Description: probable receptor-like protein kinase [imported]
  misc_feature (190)..(331): Homolog of NCBI NO: 6006310 NR Description: nonphototrophic hypocotyl 1b [Oryza sativa
  misc_feature (1)..(82): Homolog of NCBI NO: 6006310 NR Description: nonphototrophic hypocotyl 1b [Oryza sativa
  misc_feature (1)..(82): Homolog of NCBI NO: 20260484 NR Description: unknown protein [Arabidopsis thaliana]
  misc_feature (190)..(303): Homolog of NCBI NO: 20260484 NR Description: unknown protein [Arabidopsis thaliana]
  misc_feature (1)..(82): Homolog of NCBI NO: 30697015 NR Description: non phototropic hypocotyl 1-related [Arabidopsis
  misc_feature (190)..(303): Homolog of NCBI NO: 30697015 NR Description: non phototropic hypocotyl 1-related [Arabidopsis
  misc_feature (1)..(95): Homolog of NCBI NO: 20797092 NR Description: putative blue light receptor [Chlamydomonas
MTGYSREEVIGRNGKVFQGPKTNRRSIMEIREAIREERSVQVSLLNYRKSGSPFWMLFHMCPVFGKDDGKVTNFVAVQVPISGREHHRKKLRNVGDLSSDTSPTFGSCRREVCFGNFVCQDRALPVECDDDEQGLEDWEQCEASESEKLKATEAINNVLSILVHYSELSGRLVCGKRYCLRGVDCLSSSLVISLGRIKQSFVLTNPCLPDMPIIYASDAFLTLTGYKRQEVLGQNCRFLSGVDTDSSVLYEMKECILKGQSCTVQILNYRKDKSSFWNLLHISPVRNASGKTAYFVGVQVEASCRNTEIKELRPETRQLSVVGAVRVAVRSSLMVTC

SEQ ID NO: 105058 - protein, 310 aa, Arabidopsis thaliana
  peptide (1)..(310): Ceres Seq. ID no. 13616361
  misc_feature (14)..(57): Pfam Name: PAC motif Pfam Description: PAC motif
  misc_feature (1)..(310): Homolog of NCBI NO: 30678020 NR Description: receptor-related protein kinase [Arabidopsis >gi|18146960|dbj|BAB83170.1| twin LOV protein 1 [Arabidopsis
  misc_feature (1)..(310): Homolog of NCBI NO: 18395411 NR Description: receptor-related protein kinase [Arabidopsis >gi|15010682|gb|AAK74000.1| At2g02710/T20F6.15 [Arabidopsis >gi|16323302|gb|AAL15406.1| At2g02710/T20F6.15 [Arabidopsis
  misc_feature (1)..(263): Homolog of NCBI NO: 7487253 NR Description: probable receptor-like protein kinase [imported]
  misc_feature (163)..(304): Homolog of NCBI NO: 6006310 NR Description: nonphototrophic hypocotyl 1b [Oryza sativa
  misc_feature (1)..(55): Homolog of NCBI NO: 6006310 NR Description: nonphototrophic hypocotyl 1b [Oryza sativa
  misc_feature (1)..(55): Homolog of NCBI NO: 20260484 NR Description: unknown protein [Arabidopsis thaliana]
  misc_feature (163)..(276): Homolog of NCBI NO: 20260484 NR Description: unknown protein [Arabidopsis thaliana]
  misc_feature (1)..(55): Homolog of NCBI NO: 30697015 NR Description: non phototropic hypocotyl 1-related [Arabidopsis
  misc_feature (163)..(276): Homolog of NCBI NO: 30697015 NR Description: non phototropic hypocotyl 1-related [Arabidopsis
  misc_feature (1)..(68): Homolog of NCBI NO: 20797092 NR Description: putative blue light receptor [Chlamydomonas
MEIREAIREERSVQVSLLNYRKSGSPFWMLFHMCPVFGKDDGKVTNFVAVQVPISGREHHRKKLRNVGDLSSDTSPTFGSCRREVCFGNFVCQDRALPVECDDDEQGLEDWEQCEASESEKLKATEAINNVLSILVHYSELSGRLVCGKRYCLRGVDCLSSSLVISLGRIKQSFVLTNPCLPDMPIIYASDAFLTLTGYKRQEVLGQNCRFLSGVDTDSSVLYEMKECILKGQSCTVQILNYRKDKSSFWNLLHISPVRNASGKTAYFVGVQVEASCRNTEIKELRPETRQLSVVGAVRVAVRSSLMVTC

SEQ ID NO: 105059 - DNA, 829 bp, Arabidopsis thaliana
  misc_feature (1)..(829): Ceres Seq. ID no. 13616362
  misc_feature: MA Experiment ID: 20000171 Result: Up-regulated in Transcription
  misc_feature: MA Experiment 20000171 PARAMETER Experiment Name: At_42deg_Heat_P Parameter: Age (day) Value: 14
  misc_feature: MA Experiment 20000171 PARAMETER Experiment Name: At_42deg_Heat_P Parameter: Organism Value: A. thaliana
  misc_feature: MA Experiment 20000171 PARAMETER Experiment Name: At_42deg_Heat_P Parameter: Plant Line Value: WS
  misc_feature: MA Experiment 20000171 PARAMETER Experiment Name: At_42deg_Heat_P Parameter: Temperature (deg C) Value: 42 vs. 22
  misc_feature: MA Experiment 20000171 PARAMETER Experiment Name: At_42deg_Heat_P Parameter: Timepoint (hr) Value: 1
  misc_feature: MA Experiment 20000171 PARAMETER Experiment Name: At_42deg_Heat_P Parameter: Tissue Value: Aerial
  misc_feature: MA Experiment ID: 20000173 Result: Up-regulated in Transcription
  misc_feature: MA Experiment 20000173 PARAMETER Experiment Name: At_42deg_Heat_P Parameter: Age (day) Value: 14
  misc_feature: MA Experiment 20000173 PARAMETER Experiment Name: At_42deg_Heat_P Parameter: Organism Value: A. thaliana
  misc_feature: MA Experiment 20000173 PARAMETER Experiment Name: At_42deg_Heat_P Parameter: Plant Line Value: WS
  misc_feature: MA Experiment 20000173 PARAMETER Experiment Name: At_42deg_Heat_P Parameter: Temperature (deg C) Value: 42 vs. 22
  misc_feature: MA Experiment 20000173 PARAMETER Experiment Name: At_42deg_Heat_P Parameter: Timepoint (hr) Value: 6
  misc_feature: MA Experiment 20000173 PARAMETER Experiment Name: At_42deg_Heat_P Parameter: Tissue Value: Aerial
  misc_feature: MA Experiment ID: 20000227 Result: Down-regulated in Transcription
  misc_feature: MA Experiment 20000227 PARAMETER Experiment Name: At_Root-Tips-vs-Tops_P Parameter: Tissue Value: Root Tips vs. Root Tops
  misc_feature: MA Experiment ID: 20000437 Result: Up-regulated in Transcription
  misc_feature: MA Experiment 20000437 PARAMETER Experiment Name: At_Drought_P Parameter: Age (day) Value: 8
  misc_feature: MA Experiment 20000437 PARAMETER Experiment Name: At_Drought_P Parameter: Organism Value: A. thaliana
  misc_feature: MA Experiment 20000437 PARAMETER Experiment Name: At_Drought_P Parameter: Plant Line Value: WS
  misc_feature: MA Experiment 20000437 PARAMETER Experiment Name: At_Drought_P Parameter: Timepoint (hr) Value: 24
  misc_feature: MA Experiment 20000437 PARAMETER Experiment Name: At_Drought_P Parameter: Tissue Value: Whole Plant
  misc_feature: MA Experiment 20000437 PARAMETER Experiment Name: At_Drought_P Parameter: Treatment Value: Drought vs. No Drought
atcgctcggtgaattcgaggatcctcgagctttttgatcggagactttttctctcatcgtcgttgtttgaattctccggctgagagatgcttgcttgacgacgaatctccaccgatcttttaccttttcgcacaacaagtaagagaaggatgtcgactccagcgaggaagagattgatgagggatttcaagaggttgcagcaagacccacctgcaggaattagtggtgctccacaagacaacaatatcatgttgtggaatgctgttatattcgggcctgatgataccccttgggatggaggtactttcaaattgtcactgcagttttcggaagattatccaaataaaccaccaacagtgcggtttgtttcacggatgttccatccaaacatttatgctgatgggagtatatgcttggacattctccaaaaccaatggagtccaatatacgatgtcgctgctatactaacctccattcagtcattgctatgtgatcctaatccgaattctcctgcaaattcggaagctgcacgaatgttcagtgaaagcaagcgcgagtacaacagaagagtccgcgaggttgtcgaacaaagctggactgccgactagtaattatatcattgtagcatttgtcttcaaataacattaaacctcctctcttgtatctgatttcgaccatcacatctctgagagaagtttactctccctaccactctcttttatgtctttctgtgtttttcaaactctgtgatttgttgctcttcatgttttttttctttgtattttcgtaaccacattcatcttcataattatcatatgtatttcagtcg

SEQ ID NO: 105060 - protein, 152 aa, Arabidopsis thaliana
  peptide (1)..(152): Ceres Seq. ID no. 13616363
  misc_feature (1)..(152): Homolog of NCBI NO: 18395424 NR Description: ubiquitin-conjugating enzyme 2 (UBC2)
  misc_feature (1)..(152): Homolog of NCBI NO: 18394114 NR Description: ubiquitin-conjugating enzyme 1 (UBC1)
  misc_feature (1)..(152): Homolog of NCBI NO: 464980 NR Description: Ubiquitin-conjugating enzyme E2-17 kDa ligase) (Ubiquitin carrier protein) >gi|166422|gb|AAA18528.1|
  misc_feature (1)..(152): Homolog of NCBI NO: 8118527 NR Description: ubiquitin conjugating protein [Avicennia marina]
  misc_feature (1)..(152): Homolog of NCBI NO: 13516451 NR Description: ubiquitin-conjugating enzyme (E2) [Nicotiana
  misc_feature (1)..(152): Homolog of NCBI NO: 13516453 NR Description: ubiquitin-conjugating enzyme (E2) [Nicotiana
  misc_feature (1)..(152): Homolog of NCBI NO: 33146810 NR Description: OsRad6 [Oryza sativa (japonica cultivar-group)]
  misc_feature (1)..(152): Homolog of NCBI NO: 136640 NR Description: Ubiquitin-conjugating enzyme E2-17 kDa ligase) (Ubiquitin carrier protein) >gi|170785|gb|AAA34310.1|
  misc_feature (1)..(152): Homolog of NCBI NO: 18844990 NR Description: Rad6 [Oryza sativa (japonica cultivar-group)]
  misc_feature (1)..(149): Homolog of NCBI NO: 18424601 NR Description: ubiquitin-conjugating enzyme 3 (UBC3)
MSTPARKRLMRDFKRLQQDPPAGISGAPQDNNIMLWNAVIFGPDDTPWDGGTFKLSLQFSEDYPNKPPTVRFVSRMFHPNIYADGSICLDILQNQWSPIYDVAAILTSIQSLLCDPNPNSPANSEAARMFSESKREYNRRVREVVEQSWTAD

SEQ ID NO: 105061 - protein, 143 aa, Arabidopsis thaliana
  peptide (1)..(143): Ceres Seq. ID no. 13616364
  misc_feature (1)..(143): Homolog of NCBI NO: 18395424 NR Description: ubiquitin-conjugating enzyme 2 (UBC2)
  misc_feature (1)..(143): Homolog of NCBI NO: 18394114 NR Description: ubiquitin-conjugating enzyme 1 (UBC1)
  misc_feature (1)..(143): Homolog of NCBI NO: 464980 NR Description: Ubiquitin-conjugating enzyme E2-17 kDa ligase) (Ubiquitin carrier protein) >gi|166422|gb|AAA18528.1|
  misc_feature (1)..(143): Homolog of NCBI NO: 8118527 NR Description: ubiquitin conjugating protein [Avicennia marina]
  misc_feature (1)..(143): Homolog of NCBI NO: 13516451 NR Description: ubiquitin-conjugating enzyme (E2) [Nicotiana
  misc_feature (1)..(143): Homolog of NCBI NO: 13516453 NR Description: ubiquitin-conjugating enzyme (E2) [Nicotiana
  misc_feature (1)..(143): Homolog of NCBI NO: 33146810 NR Description: OsRad6 [Oryza sativa (japonica cultivar-group)]
  misc_feature (1)..(143): Homolog of NCBI NO: 136640 NR Description: Ubiquitin-conjugating enzyme E2-17 kDa ligase) (Ubiquitin carrier protein) >gi|170785|gb|AAA34310.1|
  misc_feature (1)..(143): Homolog of NCBI NO: 18844990 NR Description: Rad6 [Oryza sativa (japonica cultivar-group)]
  misc_feature (1)..(140): Homolog of NCBI NO: 18424601 NR Description: ubiquitin-conjugating enzyme 3 (UBC3)
MRDFKRLQQDPPAGISGAPQDNNIMLWNAVIFGPDDTPWDGGTFKLSLQFSEDYPNKPPTVRFVSRMFHPNIYADGSICLDILQNQWSPIYDVAAILTSIQSLLCDPNPNSPANSEAARMFSESKREYNRRVREVVEQSWTAD

SEQ ID NO: 105062 - protein, 119 aa, Arabidopsis thaliana
  peptide (1)..(119): Ceres Seq. ID no. 13616365
  misc_feature (1)..(119): Homolog of NCBI NO: 18395424 NR Description: ubiquitin-conjugating enzyme 2 (UBC2)
  misc_feature (1)..(119): Homolog of NCBI NO: 18394114 NR Description: ubiquitin-conjugating enzyme 1 (UBC1)
  misc_feature (1)..(119): Homolog of NCBI NO: 464980 NR Description: Ubiquitin-conjugating enzyme E2-17 kDa ligase) (Ubiquitin carrier protein) >gi|166422|gb|AAA18528.1|
  misc_feature (1)..(119): Homolog of NCBI NO: 8118527 NR Description: ubiquitin conjugating protein [Avicennia marina]
  misc_feature (1)..(119): Homolog of NCBI NO: 13516451 NR Description: ubiquitin-conjugating enzyme (E2) [Nicotiana
  misc_feature (1)..(119): Homolog of NCBI NO: 13516453 NR Description: ubiquitin-conjugating enzyme (E2) [Nicotiana
  misc_feature (1)..(119): Homolog of NCBI NO: 33146810 NR Description: OsRad6 [Oryza sativa (japonica cultivar-group)]
  misc_feature (1)..(119): Homolog of NCBI NO: 136640 NR Description: Ubiquitin-conjugating enzyme E2-17 kDa ligase) (Ubiquitin carrier protein) >gi|170785|gb|AAA34310.1|
  misc_feature (1)..(119): Homolog of NCBI NO: 18844990 NR Description: Rad6 [Oryza sativa (japonica cultivar-group)]
  misc_feature (1)..(116): Homolog of NCBI NO: 18424601 NR Description: ubiquitin-conjugating enzyme 3 (UBC3)
MLWNAVIFGPDDTPWDGGTFKLSLQFSEDYPNKPPTVRFVSRMFHPNIYADGSICLDILQNQWSPIYDVAAILTSIQSLLCDPNPNSPANSEAARMFSESKREYNRRVREVVEQSWTAD

SEQ ID NO: 105063 - DNA, 933 bp, Arabidopsis thaliana
  misc_feature (1)..(933): Ceres Seq. ID no. 13616377
  misc_feature: MA Experiment ID: 20000355 Result: Down-regulated in Transcription
  misc_feature: MA Experiment 20000355 PARAMETER Experiment Name: At_Siliques_Sub_P Parameter: Age (day) Value: 21
  misc_feature: MA Experiment 20000355 PARAMETER Experiment Name: At_Siliques_Sub_P Parameter: Organism Value: A. thaliana
  misc_feature: MA Experiment 20000355 PARAMETER Experiment Name: At_Siliques_Sub_P Parameter: Plant Line Value: WS
  misc_feature: MA Experiment 20000355 PARAMETER Experiment Name: At_Siliques_Sub_P Parameter: Tissue Value: Less Than 5mm Siliques vs. Whole Plant
  misc_feature: MA Experiment ID: 20000440 Result: Down-regulated in Transcription
  misc_feature: MA Experiment 20000440 PARAMETER Experiment Name: At_Closed-Flower__Sub_P Parameter: Tissue Value: Closed Flower vs. Whole Plant
catcaccttcaccttcaacatcaaacatcacatctctttctcttttatctctttttctcggtcttcaaagagtttcttagttaccaaatcaatggcaggtatcaaagttttcggacacccagcttccacttccaccaggagagtcctcatcgccctccatgagaaaaacctcgactttgagctcgttcatgttgaactcaaagacggtgagcacaagaaggagcctttcctctcccgcaacccttttggtcaagttccagcctttgaagatggagacctcaagctcttcgaatcaagagcgattactcagtacatagctcaccgatacgaaaaccaaggaaccaaccttctcccagctgactccaagaacatagctcagtatgcaatcatgtccattggaatacaagtagaagctcatcagttcgatcccgtggcttcaaagcttgcttgggaacaagtattcaagttcaactatggcttgaacacagaccaagccgttgttgcagaagaagaagctaagttagccaaggtccttgatgtctacgaggctaggctgaaggagttcaagtatttggctggtgaaactttcactttgaccgatcttcaccacattcccgtgattcaatacctgctcggaactcccaccaagaagctcttcacggagcgtccacgtgtcaacgagtgggtggctgagatcaccaagaggccagcttcagagaaggttctgtgagaaatttctaaaaggacaaaagtggttttgcttcagtcacagtaataatgctacaagtaaataagcgtctgcctcattgcccagtttctcagtactttctttctgttgtatcctctgtttttgtttcagcttatgtgagtgtgtgtacgttcttgagagtatcttaggcaaaaactatatatctaatcttcaagctcttctaa

SEQ ID NO: 105064 - protein, 242 aa, Arabidopsis thaliana
  peptide (1)..(242): Ceres Seq. ID no. 13616378
  misc_feature (128)..(236): Pfam Name: Glutathione S-transferase, C-terminal domain Pfam Description: Glutathione S-transferase, C-terminal domain
  misc_feature (31)..(242): Homolog of NCBI NO: 15227063 NR Description: glutathione transferase, putative [Arabidopsis
  misc_feature (31)..(241): Homolog of NCBI NO: 15235401 NR Description: glutathione transferase, putative [Arabidopsis
  misc_feature (31)..(242): Homolog of NCBI NO: 31790097 NR Description: glutathione S-transferase 3 [Brassica juncea]
  misc_feature (32)..(241): Homolog of NCBI NO: 2554769 NR Description: Chain A, Structure Of Glutathione S-Transferase
  misc_feature (31)..(241): Homolog of NCBI NO: 21555418 NR Description: Atpm24.1 glutathione S transferase [Arabidopsis
  misc_feature (31)..(242): Homolog of NCBI NO: 31790093 NR Description: glutathione S-transferase 1 [Brassica juncea]
  misc_feature (31)..(242): Homolog of NCBI NO: 31790099 NR Description: glutathione S-transferase 4 [Brassica juncea]
  misc_feature (31)..(242): Homolog of NCBI NO: 31790095 NR Description: glutathione S-transferase 2 [Brassica juncea]
  misc_feature (31)..(242): Homolog of NCBI NO: 31790105 NR Description: glutathione S-transferase 6 [Brassica juncea]
  misc_feature (31)..(242): Homolog of NCBI NO: 31790103 NR Description: glutathione S-transferase 5 [Brassica juncea]
ITFTFNIKHHISFSFISFSRSSKSFLVTKSMAGIKVFGHPASTSTRRVLIALHEKNLDFELVHVELKDGEHKKEPFLSRNPFGQVPAFEDGDLKLFESRAITQYIAHRYENQGTNLLPADSKNIAQYAIMSIGIQVEAHQFDPVASKLAWEQVFKFNYGLNTDQAVVAEEEAKLAKVLDVYEARLKEFKYLAGETFTLTDLHHIPVIQYLLGTPTKKLFTERPRVNEWVAEITKRPASEKVL

SEQ ID NO: 105065 - protein, 212 aa, Arabidopsis thaliana
  peptide (1)..(212): Ceres Seq. ID no. 13616379
  misc_feature (98)..(206): Pfam Name: Glutathione S-transferase, C-terminal domain Pfam Description: Glutathione S-transferase, C-terminal domain
  misc_feature (1)..(212): Homolog of NCBI NO: 15227063 NR Description: glutathione transferase, putative [Arabidopsis
  misc_feature (1)..(211): Homolog of NCBI NO: 15235401 NR Description: glutathione transferase, putative [Arabidopsis
  misc_feature (1)..(212): Homolog of NCBI NO: 31790097 NR Description: glutathione S-transferase 3 [Brassica juncea]
  misc_feature (2)..(211): Homolog of NCBI NO: 2554769 NR Description: Chain A, Structure Of Glutathione S-Transferase
  misc_feature (1)..(211): Homolog of NCBI NO: 21555418 NR Description: Atpm24.1 glutathione S transferase [Arabidopsis
  misc_feature (1)..(212): Homolog of NCBI NO: 31790093 NR Description: glutathione S-transferase 1 [Brassica juncea]
  misc_feature (1)..(212): Homolog of NCBI NO: 31790099 NR Description: glutathione S-transferase 4 [Brassica juncea]
  misc_feature (1)..(212): Homolog of NCBI NO: 31790095 NR Description: glutathione S-transferase 2 [Brassica juncea]
  misc_feature (1)..(212): Homolog of NCBI NO: 31790105 NR Description: glutathione S-transferase 6 [Brassica juncea]
  misc_feature (1)..(212): Homolog of NCBI NO: 31790103 NR Description: glutathione S-transferase 5 [Brassica juncea]
MAGIKVFGHPASTSTRRVLIALHEKNLDFELVHVELKDGEHKKEPFLSRNPFGQVPAFEDGDLKLFESRAITQYIAHRYENQGTNLLPADSKNIAQYAIMSIGIQVEAHQFDPVASKLAWEQVFKFNYGLNTDQAVVAEEEAKLAKVLDVYEARLKEFKYLAGETFTLTDLHHIPVIQYLLGTPTKKLFTERPRVNEWVAEITKRPASEKVL

SEQ ID NO: 105066 - DNA, 1372 bp, Arabidopsis thaliana
  misc_feature (1)..(1372): Ceres Seq. ID no. 13616380
  misc_feature: MA Experiment ID: 108434 Result: Up-regulated in Transcription
  misc_feature: MA Experiment 108434 PARAMETER Experiment Name: At_Root_Tips_cDNA_P Parameter: Tissue Value: Root Tips
  misc_feature: MA Experiment ID: 108463 Result: Down-regulated in Transcription
  misc_feature: MA Experiment 108463 PARAMETER Experiment Name: At_Germinating_Seeds_cDNA_P Parameter: Age (day) Value: 3 vs. 0
  misc_feature: MA Experiment 108463 PARAMETER Experiment Name: At_Germinating_Seeds_cDNA_P Parameter: Tissue Value: Germinating Seeds
  misc_feature: MA Experiment ID: 20000090 Result: Up-regulated in Transcription
  misc_feature: MA Experiment ID: 20000495 Result: Up-regulated in Transcription
  misc_feature: MA Experiment 20000495 PARAMETER Experiment Name: At_Guard_Cells_P Parameter: Harvest Date Value: 8/2/2002
  misc_feature: MA Experiment 20000495 PARAMETER Experiment Name: At_Guard_Cells_P Parameter: Organism Value: A. thaliana
  misc_feature: MA Experiment 20000495 PARAMETER Experiment Name: At_Guard_Cells_P Parameter: Tissue Value: Guard Cells vs. Leaves
ctcttcttcttcttcttcatctttttttttttaacagatctggtggaaattttatcttttgaccaccactggatctctctatatacacattcatctgagtaatagagtaaaaacgaaacacaagaagcaattatgaagaattgtgagagatttgctaatctcgctctcgcaggtttgacattggcaccactcgttgtgagagtaaatccaaatttgaatgttattctcacagcatgtatcactgtttatgtgggttgctttcgttcggtcaaggatactcctccaacggagacgatgtcaaaagaacatgccatgcgtttcccattggttgggagtgctatgcttctctcacttttcttattgttcaagtttctctcaaaggacttggttaatgctgtgctaacagcttacttctttgttcttgggattgtcgctctttcagcgacattgttaccagccatcagaagatttttaccaaatccttggaatgacaatcttatcgtctggcgttttccttatttcaagtctttggaggtagagttcacaaagtcccaagttgttgcgggaatccctggaacattcttctgtgcgtggtatgcgtggaaaaaacattggctggctaacaatatcctcggcctttccttctgcattcagggaattgagatgctctctctcggatcattcaagactggtgccatccttttggcaggactatttttctatgatatcttctgggttttctttactccagttatggttagtgttgccaaatccttcgatgctccaattaagctcttattccctacgggtgatgctctaagaccctattctatgcttggtcttggtgacattgtcattccgggtattttcgttgcactagctctaagatttgatgtgtcaagacgtagacaaccacaatacttcacaagtgcatttatcggatacgctgttggtgtgatcctcacgattgtagtcatgaactggtttcaagcagcacagcctgctttgttatacattgtcccagccgtaattgggttcttggcttctcactgcatttggaacggtgacatcaaaccgttgttggcgtttgatgaatcaaagacagaggaagcaacgactgatgaatcaaagactagtgaggaggttaataaagctcatgatgaatgaggaaaaatcgagaaagaagggcagaggagaaatatatacacataaatgtgtcttaatatatggaacaagaaggaaaacaattttgtttccaaatgatcatcaatcagtcccttctaaccccttttttgtttttttagattttcaaactttcttttggccaagacttgtgtaagttactataagttacaacaaattttctttgact

SEQ ID NO: 105067 - protein, 344 aa, Arabidopsis thaliana; identical to SEQ ID NO: 24100
  peptide (1)..(344): Ceres Seq. ID no. 13616381
  misc_feature (47)..(321): Pfam Name: Signal peptide peptidase Pfam Description: Signal peptide peptidase
  misc_feature (1)..(344): Homolog of NCBI NO: 18395487 NR Description: expressed protein [Arabidopsis thaliana]
  misc_feature (1)..(344): Homolog of NCBI NO: 21593273 NR Description: unknown [Arabidopsis thaliana]
  misc_feature (29)..(344): Homolog of NCBI NO: 17647929 NR Description: shanti CG11840-PA [Drosophila melanogaster]
  misc_feature (29)..(339): Homolog of NCBI NO: 22761270 NR Description: unnamed protein product [Homo sapiens]
  misc_feature (29)..(339): Homolog of NCBI NO: 23308607 NR Description: minor histocompatibility antigen 13 isoform 1;
  misc_feature (29)..(344): Homolog of NCBI NO: 25992191 NR Description: putative presenilin-like aspartyl protease [Mus
  misc_feature (29)..(344): Homolog of NCBI NO: 18034682 NR Description: histocompatibility 13; presenilin-like protein 3 musculus] >gi|25008565|sp|Q9D8V0|HM13_MOUSE Minor
  misc_feature (29)..(344): Homolog of NCBI NO: 34858994 NR Description: similar to histocompatibility 13; presenilin-like
  misc_feature (29)..(344): Homolog of NCBI NO: 26389558 NR Description: unnamed protein product [Mus musculus]
  misc_feature (29)..(339): Homolog of NCBI NO: 14286280 NR Description: Similar to histocompatibility 13 [Homo sapiens]

SEQ ID NO: 105068 - protein, 290 aa, Arabidopsis thaliana; identical to SEQ ID NO: 24101
  peptide (1)..(290): Ceres Seq. ID no. 13616382
  misc_feature (1)..(267): Pfam Name: Signal peptide peptidase Pfam Description: Signal peptide peptidase
  misc_feature (1)..(290): Homolog of NCBI NO: 18395487 NR Description: expressed protein [Arabidopsis thaliana]
  misc_feature (1)..(290): Homolog of NCBI NO: 21593273 NR Description: unknown [Arabidopsis thaliana]
  misc_feature (1)..(290): Homolog of NCBI NO: 17647929 NR Description: shanti CG11840-PA [Drosophila melanogaster]
  misc_feature (1)..(285): Homolog of NCBI NO: 22761270 NR Description: unnamed protein product [Homo sapiens]
  misc_feature (1)..(285): Homolog of NCBI NO: 23308607 NR Description: minor histocompatibility antigen 13 isoform 1;
  misc_feature (1)..(290): Homolog of NCBI NO: 25992191 NR Description: putative presenilin-like aspartyl protease [Mus
  misc_feature (1)..(290): Homolog of NCBI NO: 18034682 NR Description: histocompatibility 13; presenilin-like protein 3 musculus] >gi|25008565|sp|Q9D8V0|HM13_MOUSE Minor
  misc_feature (1)..(290): Homolog of NCBI NO: 34858994 NR Description: similar to histocompatibility 13; presenilin-like
  misc_feature (1)..(290): Homolog of NCBI NO: 26389558 NR Description: unnamed protein product [Mus musculus]
  misc_feature (1)..(285): Homolog of NCBI NO: 14286280 NR Description: Similar to histocompatibility 13 [Homo sapiens]

SEQ ID NO: 105069 - protein, 284 aa, Arabidopsis thaliana; identical to SEQ ID NO: 24102
  peptide (1)..(284): Ceres Seq. ID no. 13616383
  misc_feature (1)..(261): Pfam Name: Signal peptide peptidase Pfam Description: Signal peptide peptidase
  misc_feature (1)..(284): Homolog of NCBI NO: 18395487 NR Description: expressed protein [Arabidopsis thaliana]
  misc_feature (1)..(284): Homolog of NCBI NO: 21593273 NR Description: unknown [Arabidopsis thaliana]
  misc_feature (1)..(284): Homolog of NCBI NO: 17647929 NR Description: shanti CG11840-PA [Drosophila melanogaster]
  misc_feature (1)..(279): Homolog of NCBI NO: 22761270 NR Description: unnamed protein product [Homo sapiens]
  misc_feature (1)..(279): Homolog of NCBI NO: 23308607 NR Description: minor histocompatibility antigen 13 isoform 1;
  misc_feature (1)..(284): Homolog of NCBI NO: 25992191 NR Description: putative presenilin-like aspartyl protease [Mus
  misc_feature (1)..(284): Homolog of NCBI NO: 18034682 NR Description: histocompatibility 13; presenilin-like protein 3 musculus] >gi|25008565|sp|Q9D8V0|HM13_MOUSE Minor
  misc_feature (1)..(284): Homolog of NCBI NO: 34858994 NR Description: similar to histocompatibility 13; presenilin-like
  misc_feature (1)..(284): Homolog of NCBI NO: 26389558 NR Description: unnamed protein product [Mus musculus]
  misc_feature (1)..(279): Homolog of NCBI NO: 14286280 NR Description: Similar to histocompatibility 13 [Homo sapiens]

SEQ ID NO: 105070 - DNA, 1439 bp, Arabidopsis thaliana
  misc_feature (1)..(1439): Ceres Seq. ID no. 13616384
  misc_feature: MA Experiment ID: 108462 Result: Up-regulated in Transcription
  misc_feature: MA Experiment 108462 PARAMETER Experiment Name: At_Germinating_Seeds_cDNA_P Parameter: Age (day) Value: 2 vs. 0
  misc_feature: MA Experiment 108462 PARAMETER Experiment Name: At_Germinating_Seeds_cDNA_P Parameter: Tissue Value: Germinating Seeds
  misc_feature: MA Experiment ID: 108463 Result: Up-regulated in Transcription
  misc_feature: MA Experiment 108463 PARAMETER Experiment Name: At_Germinating_Seeds_cDNA_P Parameter: Age (day) Value: 3 vs. 0
  misc_feature: MA Experiment 108463 PARAMETER Experiment Name: At_Germinating_Seeds_cDNA_P Parameter: Tissue Value: Germinating Seeds
  misc_feature: MA Experiment ID: 108501 Result: Down-regulated in Transcription
  misc_feature: MA Experiment 108501 PARAMETER Experiment Name: At_ap2_floral_buds_cDNA_P Parameter: Plant Line Value: ap2 (Ler.)
  misc_feature: MA Experiment 108501 PARAMETER Experiment Name: At_ap2_floral_buds_cDNA_P Parameter: Tissue Value: Closed Flower
  misc_feature: MA Experiment ID: 108595 Result: Up-regulated in Transcription
  misc_feature: MA Experiment 108595 PARAMETER Experiment Name: At_Ler-pi_Ovule_cDNA_P Parameter: Plant Line Value: null
  misc_feature: MA Experiment ID: 20000185 Result: Up-regulated in Transcription
  misc_feature: MA Experiment 20000185 PARAMETER Experiment Name: At_Roots__P Parameter: Age (day) Value: 7 vs. 21
  misc_feature: MA Experiment 20000185 PARAMETER Experiment Name: At_Roots__P Parameter: Organism Value: A. thaliana
  misc_feature: MA Experiment 20000185 PARAMETER Experiment Name: At_Roots__P Parameter: Tissue Value: Roots vs. Whole Plant
  misc_feature: MA Experiment ID: 20000227 Result: Down-regulated in Transcription
  misc_feature: MA Experiment 20000227 PARAMETER Experiment Name: At_Root-Tips-vs-Tops_P Parameter: Tissue Value: Root Tips vs. Root Tops
  misc_feature: MA Experiment ID: 20000235 Result: Up-regulated in Transcription
  misc_feature: MA Experiment 20000235 PARAMETER Experiment Name: At_Siliques_P Parameter: Age (day) Value: 21
  misc_feature: MA Experiment 20000235 PARAMETER Experiment Name: At_Siliques_P Parameter: Organism Value: A. thaliana
  misc_feature: MA Experiment 20000235 PARAMETER Experiment Name: At_Siliques_P Parameter: Plant Line Value: WS
  misc_feature: MA Experiment 20000235 PARAMETER Experiment Name: At_Siliques_P Parameter: Tissue Value: 5-10mm Siliques vs. Whole Plant
  misc_feature: MA Experiment ID: 20000436 Result: Up-regulated in Transcription
  misc_feature: MA Experiment 20000436 PARAMETER Experiment Name: At_Drought_P Parameter: Age (day) Value: 7
  misc_feature: MA Experiment 20000436 PARAMETER Experiment Name: At_Drought_P Parameter: Organism Value: A. thaliana
  misc_feature: MA Experiment 20000436 PARAMETER Experiment Name: At_Drought_P Parameter: Plant Line Value: WS
  misc_feature: MA Experiment 20000436 PARAMETER Experiment Name: At_Drought_P Parameter: Timepoint (hr) Value: 12
  misc_feature: MA Experiment 20000436 PARAMETER Experiment Name: At_Drought_P Parameter: Tissue Value: Whole Plant
  misc_feature: MA Experiment 20000436 PARAMETER Experiment Name: At_Drought_P Parameter: Treatment Value: Drought vs. No Drought
  misc_feature: MA Experiment ID: 20000438 Result: Down-regulated in Transcription
  misc_feature: MA Experiment 20000438 PARAMETER Experiment Name: At_Shoots__P Parameter: Age (day) Value: 14
  misc_feature: MA Experiment 20000438 PARAMETER Experiment Name: At_Shoots__P Parameter: Tissue Value: Shoots vs. Whole Plant
  misc_feature: MA Experiment ID: 20000439 Result: Up-regulated in Transcription
  misc_feature: MA Experiment 20000439 PARAMETER Experiment Name: At_Roots__P Parameter: Age (day) Value: 14 vs. 21
  misc_feature: MA Experiment 20000439 PARAMETER Experiment Name: At_Roots__P Parameter: Organism Value: A. thaliana
  misc_feature: MA Experiment 20000439 PARAMETER Experiment Name: At_Roots__P Parameter: Tissue Value: Roots vs. Whole Plant
  misc_feature: MA Experiment ID: 20000453 Result: Up-regulated in Transcription
  misc_feature: MA Experiment 20000453 PARAMETER Experiment Name: At_100uM_ABA_P Parameter: Age (day) Value: 15
  misc_feature: MA Experiment 20000453 PARAMETER Experiment Name: At_100uM_ABA_P Parameter: Organism Value: A. thaliana
  misc_feature: MA Experiment 20000453 PARAMETER Experiment Name: At_100uM_ABA_P Parameter: Plant Line Value: WS
  misc_feature: MA Experiment 20000453 PARAMETER Experiment Name: At_100uM_ABA_P Parameter: Timepoint (hr) Value: 24
  misc_feature: MA Experiment 20000453 PARAMETER Experiment Name: At_100uM_ABA_P Parameter: Tissue Value: Aerial
  misc_feature: MA Experiment 20000453 PARAMETER Experiment Name: At_100uM_ABA_P Parameter: Treatment Value: 100uM ABA vs. No Treatment
  misc_feature: MA Experiment ID: 20000460 Result: Down-regulated in Transcription
  misc_feature: MA Experiment 20000460 PARAMETER Experiment Name: At_10percent_PEG_P Parameter: Age (day) Value: 12
  misc_feature: MA Experiment 20000460 PARAMETER Experiment Name: At_10percent_PEG_P Parameter: Organism Value: A. thaliana
  misc_feature: MA Experiment 20000460 PARAMETER Experiment Name: At_10percent_PEG_P Parameter: Plant Line Value: WS
  misc_feature: MA Experiment 20000460 PARAMETER Experiment Name: At_10percent_PEG_P Parameter: Timepoint (day) Value: 12
  misc_feature: MA Experiment 20000460 PARAMETER Experiment Name: At_10percent_PEG_P Parameter: Tissue Value: Whole Plant
  misc_feature: MA Experiment 20000460 PARAMETER Experiment Name: At_10percent_PEG_P Parameter: Treatment Value: 10percent PEG vs. No Treatment
  misc_feature: MA Experiment ID: 20000794 Result: Up-regulated in Transcription
  misc_feature: MA Experiment 20000794 PARAMETER Experiment Name: At_Petals_P Parameter: Age (day) Value: 23-25 days
  misc_feature: MA Experiment 20000794 PARAMETER Experiment Name: At_Petals_P Parameter: Plant Line Value: WS
  misc_feature: MA Experiment 20000794 PARAMETER Experiment Name: At_Petals_P Parameter: Tissue Value: Petals vs. Whole plant
  misc_feature: MA Experiment ID: 20001248 Result: Down-regulated in Transcription
  misc_feature: MA Experiment 20001248 PARAMETER Experiment Name: At_Far-red-induction_P Parameter: Age (day) Value: 7
  misc_feature: MA Experiment 20001248 PARAMETER Experiment Name: At_Far-red-induction_P Parameter: Light Value: Far-red vs. White
  misc_feature: MA Experiment 20001248 PARAMETER Experiment Name: At_Far-red-induction_P Parameter: Organism Value: A. thaliana
  misc_feature: MA Experiment 20001248 PARAMETER Experiment Name: At_Far-red-induction_P Parameter: Plant Line Value: Columbia
  misc_feature: MA Experiment 20001248 PARAMETER Experiment Name: At_Far-red-induction_P Parameter: Timepoint (hr) Value: 4
  misc_feature: MA Experiment 20001248 PARAMETER Experiment Name: At_Far-red-induction_P Parameter: Tissue Value: Whole Plant
  misc_feature: MA Experiment ID: 20001556 Result: Down-regulated in Transcription
  misc_feature: MA Experiment 20001556 PARAMETER Experiment Name: At_Drought_Soil_Dry_P Parameter: Age (day) Value: 26
  misc_feature: MA Experiment 20001556 PARAMETER Experiment Name: At_Drought_Soil_Dry_P Parameter: Organism Value: A. thaliana
  misc_feature: MA Experiment 20001556 PARAMETER Experiment Name: At_Drought_Soil_Dry_P Parameter: Plant Line Value: WS
  misc_feature: MA Experiment 20001556 PARAMETER Experiment Name: At_Drought_Soil_Dry_P Parameter: Post Timepoint (hr) Value: None
  misc_feature: MA Experiment 20001556 PARAMETER Experiment Name: At_Drought_Soil_Dry_P Parameter: Post-Treatment Value: None
  misc_feature: MA Experiment 20001556 PARAMETER Experiment Name: At_Drought_Soil_Dry_P Parameter: Timepoint (day) Value: 12
  misc_feature: MA Experiment 20001556 PARAMETER Experiment Name: At_Drought_Soil_Dry_P Parameter: Treatment Value: Drought vs. No Drought
  misc_feature: MA Experiment ID: 20001558 Result: Down-regulated in Transcription
  misc_feature: MA Experiment 20001558 PARAMETER Experiment Name: At_Drought_Soil_Dry_P Parameter: Age (day) Value: 27
  misc_feature: MA Experiment 20001558 PARAMETER Experiment Name: At_Drought_Soil_Dry_P Parameter: Organism Value: A. thaliana
  misc_feature: MA Experiment 20001558 PARAMETER Experiment Name: At_Drought_Soil_Dry_P Parameter: Plant Line Value: WS
  misc_feature: MA Experiment 20001558 PARAMETER Experiment Name: At_Drought_Soil_Dry_P Parameter: Post Timepoint (hr) Value: 6
  misc_feature: MA Experiment 20001558 PARAMETER Experiment Name: At_Drought_Soil_Dry_P Parameter: Post-Treatment Value: Re-Water vs. No Drought
  misc_feature: MA Experiment 20001558 PARAMETER Experiment Name: At_Drought_Soil_Dry_P Parameter: Timepoint (day) Value: 13
  misc_feature: MA Experiment 20001558 PARAMETER Experiment Name: At_Drought_Soil_Dry_P Parameter: Treatment Value: Drought vs. No Drought
  misc_feature: MA Experiment ID: 20001773 Result: Up-regulated in Transcription
  misc_feature: MA Experiment 20001773 PARAMETER Experiment Name: At_Far-red-enriched-adult_P Parameter: Age (day) Value: 30
  misc_feature: MA Experiment 20001773 PARAMETER Experiment Name: At_Far-red-enriched-adult_P Parameter: Light Value: Far-red enriched vs. White
  misc_feature: MA Experiment 20001773 PARAMETER Experiment Name: At_Far-red-enriched-adult_P Parameter: Organism Value: A. thaliana
  misc_feature: MA Experiment 20001773 PARAMETER Experiment Name: At_Far-red-enriched-adult_P Parameter: Plant Line Value: Columbia
  misc_feature: MA Experiment 20001773 PARAMETER Experiment Name: At_Far-red-enriched-adult_P Parameter: Timepoint (hr) Value: 48
  misc_feature: MA Experiment 20001773 PARAMETER Experiment Name: At_Far-red-enriched-adult_P Parameter: Tissue Value: Aerial
  misc_feature: MA Experiment ID: 20001904 Result: Up-regulated in Transcription
  misc_feature: MA Experiment 20001904 PARAMETER Experiment Name: At_Drought_Reproduction_P Parameter: Age (day) Value: 37
  misc_feature: MA Experiment 20001904 PARAMETER Experiment Name: At_Drought_Reproduction_P Parameter: Organism Value: A. thaliana
  misc_feature: MA Experiment 20001904 PARAMETER Experiment Name: At_Drought_Reproduction_P Parameter: Plant Line Value: WS
  misc_feature: MA Experiment 20001904 PARAMETER Experiment Name: At_Drought_Reproduction_P Parameter: Timepoint (day) Value: 7
  misc_feature: MA Experiment 20001904 PARAMETER Experiment Name: At_Drought_Reproduction_P Parameter: Tissue Value: Rosettes
  misc_feature: MA Experiment 20001904 PARAMETER Experiment Name: At_Drought_Reproduction_P Parameter: Treatment Value: Drought vs. No Drought
  misc_feature: MA Experiment ID: 20001905 Result: Up-regulated in Transcription
  misc_feature: MA Experiment 20001905 PARAMETER Experiment Name: At_Drought_Reproduction_P Parameter: Age (day) Value: 40
  misc_feature: MA Experiment 20001905 PARAMETER Experiment Name: At_Drought_Reproduction_P Parameter: Organism Value: A. thaliana
  misc_feature: MA Experiment 20001905 PARAMETER Experiment Name: At_Drought_Reproduction_P Parameter: Plant Line Value: WS
  misc_feature: MA Experiment 20001905 PARAMETER Experiment Name: At_Drought_Reproduction_P Parameter: Timepoint (day) Value: 10
  misc_feature: MA Experiment 20001905 PARAMETER Experiment Name: At_Drought_Reproduction_P Parameter: Tissue Value: Rosettes
  misc_feature: MA Experiment 20001905 PARAMETER Experiment Name: At_Drought_Reproduction_P Parameter: Treatment Value: Drought vs. No Drought
  misc_feature: MA Experiment ID: 20001906 Result: Down-regulated in Transcription
  misc_feature: MA Experiment 20001906 PARAMETER Experiment Name: At_Drought_Reproduction_P Parameter: Age (day) Value: 35
  misc_feature: MA Experiment 20001906 PARAMETER Experiment Name: At_Drought_Reproduction_P Parameter: Organism Value: A. thaliana
  misc_feature: MA Experiment 20001906 PARAMETER Experiment Name: At_Drought_Reproduction_P Parameter: Plant Line Value: WS
  misc_feature: MA Experiment 20001906 PARAMETER Experiment Name: At_Drought_Reproduction_P Parameter: Timepoint (day) Value: 5
  misc_feature: MA Experiment 20001906 PARAMETER Experiment Name: At_Drought_Reproduction_P Parameter: Tissue Value: Siliques
  misc_feature: MA Experiment 20001906 PARAMETER Experiment Name: At_Drought_Reproduction_P Parameter: Treatment Value: Drought vs. No Drought
  misc_feature: MA Experiment ID: 20001908 Result: Down-regulated in Transcription
  misc_feature: MA Experiment 20001908 PARAMETER Experiment Name: At_Drought_Reproduction_P Parameter: Age (day) Value: 40
  misc_feature: MA Experiment 20001908 PARAMETER Experiment Name: At_Drought_Reproduction_P Parameter: Organism Value: A. thaliana
  misc_feature: MA Experiment 20001908 PARAMETER Experiment Name: At_Drought_Reproduction_P Parameter: Plant Line Value: WS
  misc_feature: MA Experiment 20001908 PARAMETER Experiment Name: At_Drought_Reproduction_P Parameter: Timepoint (day) Value: 10
  misc_feature: MA Experiment 20001908 PARAMETER Experiment Name: At_Drought_Reproduction_P Parameter: Tissue Value: Siliques
  misc_feature: MA Experiment 20001908 PARAMETER Experiment Name: At_Drought_Reproduction_P Parameter: Treatment Value: Drought vs. No Drought
atggcttcttcttcttcttcttctttattatttcctttctttcttattcttttttcatgtttaatctcggtttcatcgtcaagaagatcattaatcgaccgtactcttccgaaaaaccttccgagatccggttttcgattgagtcttcgacatgtggattccggtaaaaacctcaccaagatccaaaagattcagagagggattaaccgtggattccatagattaaacagattaggagctgtagctgttttagctgtagcctctaagcctgatgatactaataacattaaagcacctactcatggaggaagcggtgagtttcttatggagttgtctattggaaacccggcggttaaatactctgctattgttgataccggaagtgaccttatttggactcaatgcaagccttgcactgaatgttttgatcaaccaactccgatttttgacccggagaaatcttcctcttactcgaaagtaggatgctcttctggtctttgtaacgcattgcctcgatcaaactgtaacgaagataaagatgcttgtgagtatttgtatacttatggagattactcatctacaagagggctcttggccacggaaacgttcactttcgaggacgagaactcgatttctggtatcgggtttgggtgtggggttgagaacgaaggcgacgggttctctcaagggtcaggtcttgtaggtcttggtcgcggaccgctctcgcttatttctcagctcaaagagactaagttttcttattgcttgacctcgattgaggatagtgaagcatctagctcgttgtttattggatctttagcctcgggtatcgtcaacaaaacaggtgcaagtttagatggtgaagtcaccaaaacgatgtctttgctacgaaatccagatcagccttcgttctattaccttgagttacaaggcatcaccgttggagcaaaacgcctttctgttgaaaagtctacttttgaactagccgaagatggaaccggaggtatgatcatagactcaggcacgaccatcacgtatctcgaggagaccgcgtttaaagtgttgaaagaggagtttacttctcggatgagtttaccagtagatgactctggatccacgggacttgacttgtgcttcaagttacctgatgctgccaagaatattgctgttcctaagatgatttttcattttaaaggtgctgatttggagcttcccggagagaactacatggtggcggattcaagcaccggcgttttgtgtttggccatgggaagttctaatgggatgtctattttcggaaatgttcaacagcagaattttaatgtacttcatgatcttgagaaagaaacggtgtcgtttgttcccactgaatgtggaaaattgtagatttttaatttgttttttttttcttttattataaatgaaatttatactttgtg

SEQ ID NO: 105071 - protein, 461 aa, Arabidopsis thaliana
  peptide (1)..(461): Ceres Seq. ID no. 13616385
  misc_feature (109)..(456): Pfam Name: Eukaryotic aspartyl protease Pfam Description: Eukaryotic aspartyl protease
  misc_feature (1)..(461): Homolog of NCBI NO: 30678047 NR Description: chloroplast nucleoid DNA binding protein -related
  misc_feature (109)..(461): Homolog of NCBI NO: 20197342 NR Description: putative chloroplast nucleoid DNA binding protein
  misc_feature (44)..(461): Homolog of NCBI NO: 38344829 NR Description: OSJNBa0064H22.10 [Oryza sativa (japonica
  misc_feature (44)..(461): Homolog of NCBI NO: 34898756 NR Description: OJ1131_E05.2 [Oryza sativa (japonica
  misc_feature (44)..(461): Homolog of NCBI NO: 34898762 NR Description: OJ1131_E05.5 [Oryza sativa (japonica
  misc_feature (43)..(458): Homolog of NCBI NO: 15223368 NR Description: chloroplast nucleoid DNA binding protein -related
  misc_feature (103)..(458): Homolog of NCBI NO: 34895664 NR Description: nucleoid DNA-binding protein cnd41-like protein
  misc_feature (41)..(461): Homolog of NCBI NO: 15242803 NR Description: hypothetical protein [Arabidopsis thaliana]
  misc_feature (43)..(458): Homolog of NCBI NO: 21594980 NR Description: chloroplast nucleoid DNA binding protein,
  misc_feature (41)..(461): Homolog of NCBI NO: 15217764 NR Description: hypothetical protein [Arabidopsis thaliana]
MASSSSSSLLFPFFLILFSCLISVSSSRRSLIDRTLPKNLPRSGFRLSLRHVDSGKNLTKIQKIQRGINRGFHRLNRLGAVAVLAVASKPDDTNNIKAPTHGGSGEFLMELSIGNPAVKYSAIVDTGSDLIWTQCKPCTECFDQPTPIFDPEKSSSYSKVGCSSGLCNALPRSNCNEDKDACEYLYTYGDYSSTRGLLATETFTFEDENSISGIGFGCGVENEGDGFSQGSGLVGLGRGPLSLISQLKETKFSYCLTSIEDSEASSSLFIGSLASGIVNKTGASLDGEVTKTMSLLRNPDQPSFYYLELQGITVGAKRLSVEKSTFELAEDGTGGMIIDSGTTITYLEETAFKVLKEEFTSRMSLPVDDSGSTGLDLCFKLPDAAKNIAVPKMIFHFKGADLELPGENYMVADSSTGVLCLAMGSSNGMSIFGNVQQQNFNVLHDLEKETVSFVPTECGKL

SEQ ID NO: 105072 - protein, 353 aa, Arabidopsis thaliana; identical to SEQ ID NO: 91535
  peptide (1)..(353): Ceres Seq. ID no. 13616386
  misc_feature (1)..(348): Pfam Name: Eukaryotic aspartyl protease Pfam Description: Eukaryotic aspartyl protease
  misc_feature (1)..(353): Homolog of NCBI NO: 30678047 NR Description: chloroplast nucleoid DNA binding protein -related
  misc_feature (1)..(353): Homolog of NCBI NO: 20197342 NR Description: putative chloroplast nucleoid DNA binding protein
  misc_feature (1)..(353): Homolog of NCBI NO: 38344829 NR Description: OSJNBa0064H22.10 [Oryza sativa (japonica
  misc_feature (1)..(353): Homolog of NCBI NO: 34898756 NR Description: OJ1131_E05.2 [Oryza sativa (japonica
  misc_feature (1)..(353): Homolog of NCBI NO: 34898762 NR Description: OJ1131_E05.5 [Oryza sativa (japonica
  misc_feature (1)..(350): Homolog of NCBI NO: 15223368 NR Description: chloroplast nucleoid DNA binding protein -related
  misc_feature (1)..(350): Homolog of NCBI NO: 34895664 NR Description: nucleoid DNA-binding protein cnd41-like protein
  misc_feature (1)..(353): Homolog of NCBI NO: 15242803 NR Description: hypothetical protein [Arabidopsis thaliana]
  misc_feature (1)..(350): Homolog of NCBI NO: 21594980 NR Description: chloroplast nucleoid DNA binding protein,
  misc_feature (1)..(353): Homolog of NCBI NO: 15217764 NR Description: hypothetical protein [Arabidopsis thaliana]

SEQ ID NO: 105073 - DNA, 983 bp, Arabidopsis thaliana
  misc_feature (1)..(983): Ceres Seq. ID no. 13616389
  misc_feature: MA Experiment ID: 20000173 Result: Down-regulated in Transcription
  misc_feature: MA Experiment 20000173 PARAMETER Experiment Name: At_42deg_Heat_P Parameter: Age (day) Value: 14
  misc_feature: MA Experiment 20000173 PARAMETER Experiment Name: At_42deg_Heat_P Parameter: Organism Value: A. thaliana
  misc_feature: MA Experiment 20000173 PARAMETER Experiment Name: At_42deg_Heat_P Parameter: Plant Line Value: WS
  misc_feature: MA Experiment 20000173 PARAMETER Experiment Name: At_42deg_Heat_P Parameter: Temperature (deg C) Value: 42 vs. 22
  misc_feature: MA Experiment 20000173 PARAMETER Experiment Name: At_42deg_Heat_P Parameter: Timepoint (hr) Value: 6
  misc_feature: MA Experiment 20000173 PARAMETER Experiment Name: At_42deg_Heat_P Parameter: Tissue Value: Aerial
  misc_feature: MA Experiment ID: 20000179 Result: Down-regulated in Transcription
  misc_feature: MA Experiment 20000179 PARAMETER Experiment Name: At_Germinating_Seeds_P Parameter: Age (hr) Value: 6 vs. 0
  misc_feature: MA Experiment 20000179 PARAMETER Experiment Name: At_Germinating_Seeds_P Parameter: Tissue Value: Germinating Seeds
  misc_feature: MA Experiment ID: 20000180 Result: Down-regulated in Transcription
  misc_feature: MA Experiment 20000180 PARAMETER Experiment Name: At_Germinating_Seeds_P Parameter: Age (hr) Value: 24 vs. 0
  misc_feature: MA Experiment 20000180 PARAMETER Experiment Name: At_Germinating_Seeds_P Parameter: Tissue Value: Germinating Seeds
  misc_feature: MA Experiment ID: 20000265 Result: Up-regulated in Transcription
  misc_feature: MA Experiment 20000265 PARAMETER Experiment Name: At_Open_Flower_P Parameter: Age (day) Value: 21
  misc_feature: MA Experiment 20000265 PARAMETER Experiment Name: At_Open_Flower_P Parameter: Plant Line Value: WS
  misc_feature: MA Experiment 20000265 PARAMETER Experiment Name: At_Open_Flower_P Parameter: Tissue Value: Closed Flower vs. Whole Plant
catcgctgtctggaacagtcctcttgtctttgatcttttgtacactttctctggattttctgaattcgaactttggaagaagaagaagctttgatcaatcatggaaattgcaaccgatacagcaaagcagatgagagacgaagagttgttcaaagcagcggaatggggagattcatcgttgttcatgtcattatctgaagaacagctctctaaatctctcaatttcagaaacgaagatggtcgctctctcctccatgtcgctgcttccttcggccattctcaaatagtgaagttgttatcaagttcagatgaagcaaagactgtaatcaatagcaaggatgatgaaggatgggctcctttgcattccgctgctagcatcggtaatgctgagctcgttgaggtgcttttgaccagaggtgctgatgtcaatgccaaaaataacggtggtcgcactgctcttcactatgctgctagcaaaggccggttggagattgctcagcttttattaacacacggtgcaaagattaacatcacagacaaggttggttgcactccgcttcacagggcagcaagcgtgggaaagttagaagtttgtgaatttcttattgaagaaggagcagagatcgatgctacggataaaatgggtcaaactgcactcatgcattcagttatctgcgatgacaaacaggttgcgttcctgcttataagacatggtgcagatgtggatgtagaagacaaggaaggctacactgttctaggccgagctaccaatgaattccgacctgcacttatcgatgctgctaaggccatgcttgaaggataaaatgactctggattactttaaaacttactaactctgagagttgtttagttacttaaaaggatttttctttactgtatcatgtttgcaaaatgtttctgccttatcaattcatgttctgtctttagaaattttctcaaaagcaattttggaaacaagtgag

SEQ ID NO: 105074 - protein, 240 aa, Arabidopsis thaliana
  peptide (1)..(240): Ceres Seq. ID no. 13616390
  misc_feature (46)..(81): Pfam Name: Ankyrin repeat Pfam Description: Ankyrin repeat
  misc_feature (1)..(240): Homolog of NCBI NO: 30678058 NR Description: ankyrin -related [Arabidopsis thaliana] putative ankyrin [Arabidopsis thaliana]
  misc_feature (1)..(240): Homolog of NCBI NO: 25295712 NR Description: probable ankyrin [imported] - Arabidopsis >gi|4335756|gb|AAD17433.1| putative ankyrin [Arabidopsis
  misc_feature (13)..(240): Homolog of NCBI NO: 15341604 NR Description: putative ankyrin [Oryza sativa]
  misc_feature (44)..(219): Homolog of NCBI NO: 37681913 NR Description: proteasome 26S subunit, non-ATPase, 10 [Danio
  misc_feature (31)..(240): Homolog of NCBI NO: 4506217 NR Description: proteasome 26S non-ATPase subunit 10 isoform 1;
  misc_feature (47)..(217): Homolog of NCBI NO: 28274852 NR Description: ankyrin repeat protein E4_2 [synthetic construct]
  misc_feature (31)..(240): Homolog of NCBI NO: 39654744 NR Description: Chain A, X-Ray Structure Of Human Gankyrin
  misc_feature (31)..(219): Homolog of NCBI NO: 16758980 NR Description: proteasome (prosome, macropain) 26S subunit,
  misc_feature (31)..(219): Homolog of NCBI NO: 12857852 NR Description: unnamed protein product [Mus musculus]
  misc_feature (31)..(219): Homolog of NCBI NO: 20532221 NR Description: 26S proteasome non-ATPase regulatory subunit 10 proteasome regulatory subunit p28) (Gankyrin)
MEIATDTAKQMRDEELFKAAEWGDSSLFMSLSEEQLSKSLNFRNEDGRSLLHVAASFGHSQIVKLLSSSDEAKTVINSKDDEGWAPLHSAASIGNAELVEVLLTRGADVNAKNNGGRTALHYAASKGRLEIAQLLLTHGAKINITDKVGCTPLHRAASVGKLEVCEFLIEEGAEIDATDKMGQTALMHSVICDDKQVAFLLIRHGADVDVEDKEGYTVLGRATNEFRPALIDAAKAMLEG

SEQ ID NO: 105075 - protein, 230 aa, Arabidopsis thaliana
  peptide (1)..(230): Ceres Seq. ID no. 13616391
  misc_feature (36)..(71): Pfam Name: Ankyrin repeat Pfam Description: Ankyrin repeat
  misc_feature (1)..(230): Homolog of NCBI NO: 30678058 NR Description: ankyrin -related [Arabidopsis thaliana] putative ankyrin [Arabidopsis thaliana]
  misc_feature (1)..(230): Homolog of NCBI NO: 25295712 NR Description: probable ankyrin [imported] - Arabidopsis >gi|4335756|gb|AAD17433.1| putative ankyrin [Arabidopsis
  misc_feature (3)..(230): Homolog of NCBI NO: 15341604 NR Description: putative ankyrin [Oryza sativa]
  misc_feature (34)..(209): Homolog of NCBI NO: 37681913 NR Description: proteasome 26S subunit, non-ATPase, 10 [Danio
  misc_feature (21)..(230): Homolog of NCBI NO: 4506217 NR Description: proteasome 26S non-ATPase subunit 10 isoform 1;
  misc_feature (37)..(207): Homolog of NCBI NO: 28274852 NR Description: ankyrin repeat protein E4_2 [synthetic construct]
  misc_feature (21)..(230): Homolog of NCBI NO: 39654744 NR Description: Chain A, X-Ray Structure Of Human Gankyrin
  misc_feature (21)..(209): Homolog of NCBI NO: 16758980 NR Description: proteasome (prosome, macropain) 26S subunit,
  misc_feature (21)..(209): Homolog of NCBI NO: 12857852 NR Description: unnamed protein product [Mus musculus]
  misc_feature (21)..(209): Homolog of NCBI NO: 20532221 NR Description: 26S proteasome non-ATPase regulatory subunit 10 proteasome regulatory subunit p28) (Gankyrin)
MRDEELFKAAEWGDSSLFMSLSEEQLSKSLNFRNEDGRSLLHVAASFGHSQIVKLLSSSDEAKTVINSKDDEGWAPLHSAASIGNAELVEVLLTRGADVNAKNNGGRTALHYAASKGRLEIAQLLLTHGAKINITDKVGCTPLHRAASVGKLEVCEFLIEEGAEIDATDKMGQTALMHSVICDDKQVAFLLIRHGADVDVEDKEGYTVLGRATNEFRPALIDAAKAMLEG

SEQ ID NO: 105076 - protein, 212 aa, Arabidopsis thaliana
  peptide (1)..(212): Ceres Seq. ID no. 13616392
  misc_feature (18)..(53): Pfam Name: Ankyrin repeat Pfam Description: Ankyrin repeat
  misc_feature (1)..(212): Homolog of NCBI NO: 30678058 NR Description: ankyrin -related [Arabidopsis thaliana] putative ankyrin [Arabidopsis thaliana]
  misc_feature (1)..(212): Homolog of NCBI NO: 25295712 NR Description: probable ankyrin [imported] - Arabidopsis >gi|4335756|gb|AAD17433.1| putative ankyrin [Arabidopsis
  misc_feature (1)..(212): Homolog of NCBI NO: 15341604 NR Description: putative ankyrin [Oryza sativa]
  misc_feature (16)..(191): Homolog of NCBI NO: 37681913 NR Description: proteasome 26S subunit, non-ATPase, 10 [Danio
  misc_feature (3)..(212): Homolog of NCBI NO: 4506217 NR Description: proteasome 26S non-ATPase subunit 10 isoform 1;
  misc_feature (19)..(189): Homolog of NCBI NO: 28274852 NR Description: ankyrin repeat protein E4_2 [synthetic construct]
  misc_feature (3)..(212): Homolog of NCBI NO: 39654744 NR Description: Chain A, X-Ray Structure Of Human Gankyrin
  misc_feature (3)..(191): Homolog of NCBI NO: 16758980 NR Description: proteasome (prosome, macropain) 26S subunit,
  misc_feature (3)..(191): Homolog of NCBI NO: 12857852 NR Description: unnamed protein product [Mus musculus]
  misc_feature (3)..(191): Homolog of NCBI NO: 20532221 NR Description: 26S proteasome non-ATPase regulatory subunit 10 proteasome regulatory subunit p28) (Gankyrin)
MSLSEEQLSKSLNFRNEDGRSLLHVAASFGHSQIVKLLSSSDEAKTVINSKDDEGWAPLHSAASIGNAELVEVLLTRGADVNAKNNGGRTALHYAASKGRLEIAQLLLTHGAKINITDKVGCTPLHRAASVGKLEVCEFLIEEGAEIDATDKMGQTALMHSVICDDKQVAFLLIRHGADVDVEDKEGYTVLGRATNEFRPALIDAAKAMLEG

SEQ ID NO: 105077 - DNA, 1376 bp, Arabidopsis thaliana
  misc_feature (1)..(1376): Ceres Seq. ID no. 13616405
  misc_feature: MA Experiment ID: 108434 Result: Down-regulated in Transcription
  misc_feature: MA Experiment 108434 PARAMETER Experiment Name: At_Root_Tips_cDNA_P Parameter: Tissue Value: Root Tips
  misc_feature: MA Experiment ID: 108462 Result: Up-regulated in Transcription
  misc_feature: MA Experiment 108462 PARAMETER Experiment Name: At_Germinating_Seeds_cDNA_P Parameter: Age (day) Value: 2 vs. 0
  misc_feature: MA Experiment 108462 PARAMETER Experiment Name: At_Germinating_Seeds_cDNA_P Parameter: Tissue Value: Germinating Seeds
  misc_feature: MA Experiment ID: 108463 Result: Up-regulated in Transcription
  misc_feature: MA Experiment 108463 PARAMETER Experiment Name: At_Germinating_Seeds_cDNA_P Parameter: Age (day) Value: 3 vs. 0
  misc_feature: MA Experiment 108463 PARAMETER Experiment Name: At_Germinating_Seeds_cDNA_P Parameter: Tissue Value: Germinating Seeds
  misc_feature: MA Experiment ID: 108488 Result: Down-regulated in Transcription
  misc_feature: MA Experiment ID: 108594 Result: Down-regulated in Transcription
  misc_feature: MA Experiment 108594 PARAMETER Experiment Name: At_Ler-rhl_Root_cDNA_P Parameter: Plant Line Value: null
  misc_feature: MA Experiment ID: 108595 Result: Down-regulated in Transcription
  misc_feature: MA Experiment 108595 PARAMETER Experiment Name: At_Ler-pi_Ovule_cDNA_P Parameter: Plant Line Value: null
  misc_feature: MA Experiment ID: 20000071 Result: Up-regulated in Transcription
  misc_feature: MA Experiment 20000071 PARAMETER Experiment Name: At_100uM_ABA_Mutants_cDNA_P Parameter: Plant Line Value: CS8104
  misc_feature: MA Experiment 20000071 PARAMETER Experiment Name: At_100uM_ABA_Mutants_cDNA_P Parameter: Timepoint (hr) Value: 6
  misc_feature: MA Experiment 20000071 PARAMETER Experiment Name: At_100uM_ABA_Mutants_cDNA_P Parameter: Tissue Value: Aerial
  misc_feature: MA Experiment 20000071 PARAMETER Experiment Name: At_100uM_ABA_Mutants_cDNA_P Parameter: Treatment Value: 100uM ABA vs. No Treatment
  misc_feature: MA Experiment ID: 20000306 Result: Up-regulated in Transcription
  misc_feature: MA Experiment 20000306 PARAMETER Experiment Name: At_Germinating_Seeds_Sub_P Parameter: Age (hr) Value: 6 vs. 0
  misc_feature: MA Experiment 20000306 PARAMETER Experiment Name: At_Germinating_Seeds_Sub_P Parameter: Organism Value: A. thaliana
  misc_feature: MA Experiment 20000306 PARAMETER Experiment Name: At_Germinating_Seeds_Sub_P Parameter: Plant Line Value: WS
  misc_feature: MA Experiment 20000306 PARAMETER Experiment Name: At_Germinating_Seeds_Sub_P Parameter: Tissue Value: Germinating Seeds
  misc_feature: MA Experiment ID: 20000307 Result: Up-regulated in Transcription
  misc_feature: MA Experiment 20000307 PARAMETER Experiment Name: At_Germinating_Seeds_Sub_P Parameter: Age (hr) Value: 24 vs. 0
  misc_feature: MA Experiment 20000307 PARAMETER Experiment Name: At_Germinating_Seeds_Sub_P Parameter: Organism Value: A. thaliana
  misc_feature: MA Experiment 20000307 PARAMETER Experiment Name: At_Germinating_Seeds_Sub_P Parameter: Plant Line Value: WS
  misc_feature: MA Experiment 20000307 PARAMETER Experiment Name: At_Germinating_Seeds_Sub_P Parameter: Tissue Value: Germinating Seeds
  misc_feature: MA Experiment ID: 20000328 Result: Down-regulated in Transcription
  misc_feature: MA Experiment 20000328 PARAMETER Experiment Name: At_42deg_Heat_Sub_P Parameter: Age (day) Value: 14
  misc_feature: MA Experiment 20000328 PARAMETER Experiment Name: At_42deg_Heat_Sub_P Parameter: Organism Value: A. thaliana
  misc_feature: MA Experiment 20000328 PARAMETER Experiment Name: At_42deg_Heat_Sub_P Parameter: Plant Line Value: WS
  misc_feature: MA Experiment 20000328 PARAMETER Experiment Name: At_42deg_Heat_Sub_P Parameter: Temperature (deg C) Value: 42 vs. 22
  misc_feature: MA Experiment 20000328 PARAMETER Experiment Name: At_42deg_Heat_Sub_P Parameter: Timepoint (hr) Value: 6
  misc_feature: MA Experiment 20000328 PARAMETER Experiment Name: At_42deg_Heat_Sub_P Parameter: Tissue Value: Aerial
  misc_feature: MA Experiment ID: 20000329 Result: Down-regulated in Transcription
  misc_feature: MA Experiment 20000329 PARAMETER Experiment Name: At_4deg_Cold_Sub_P Parameter: Age (day) Value: 14
  misc_feature: MA Experiment 20000329 PARAMETER Experiment Name: At_4deg_Cold_Sub_P Parameter: Organism Value: A. thaliana
  misc_feature: MA Experiment 20000329 PARAMETER Experiment Name: At_4deg_Cold_Sub_P Parameter: Plant Line Value: WS
  misc_feature: MA Experiment 20000329 PARAMETER Experiment Name: At_4deg_Cold_Sub_P Parameter: Temperature (deg C) Value: 4 vs. 22
  misc_feature: MA Experiment 20000329 PARAMETER Experiment Name: At_4deg_Cold_Sub_P Parameter: Timepoint (hr) Value: 6
  misc_feature: MA Experiment 20000329 PARAMETER Experiment Name: At_4deg_Cold_Sub_P Parameter: Tissue Value: Aerial
  misc_feature: MA Experiment ID: 20000355 Result: Down-regulated in Transcription
  misc_feature: MA Experiment 20000355 PARAMETER Experiment Name: At_Siliques_Sub_P Parameter: Age (day) Value: 21
  misc_feature: MA Experiment 20000355 PARAMETER Experiment Name: At_Siliques_Sub_P Parameter: Organism Value: A. thaliana
  misc_feature: MA Experiment 20000355 PARAMETER Experiment Name: At_Siliques_Sub_P Parameter: Plant Line Value: WS
  misc_feature: MA Experiment 20000355 PARAMETER Experiment Name: At_Siliques_Sub_P Parameter: Tissue Value: Less Than 5mm Siliques vs. Whole Plant
  misc_feature: MA Experiment ID: 20000440 Result: Down-regulated in Transcription
  misc_feature: MA Experiment 20000440 PARAMETER Experiment Name: At_Closed-Flower__Sub_P Parameter: Tissue Value: Closed Flower vs. Whole Plant
acttccctttgttcagacgtttctttattcttcttccttccttcttctccttcttcttgatcgtgttcagaaatcatattcatcacctctctctctctatgtctctatatttggattctttataacatgtgagatcgatctatttttgatcagagacagagagaagactagaagaagcaaagaatatttcaagaatgatgaagatgaatacaggaacatcgccgtcggtcatcggcggcgggactagtggtaatgagtgggagtctcgacctggaggaatggttgttcaacgtcggacagatcagaactccgatgtgccacgtgtctttcgtgttcgggttaaatacgggtcggtttatcacgagatcaacatcaattcccaatcttccttcggagagttgaagaagatgttgtctgatcaagtgggacttcaccatgaagacatgaaggttttgtacaaagacaaagagagagattcaaagatgtttcttgatctttgtggagttaaagatcggtcaaagcttgttgttaaagaagatccaatttctcaggagaaacgtctccttgcaaaaaggaaaaacgccgccattgaaaaagcttctaaatctatctctgatattagtttcgaagtcgacagactcgccggacaggtgtcggcgtttgagacggtgattaataaaggaggtaaagttgaagagaagagtcttgtgaatctgatagagatgttgatgaatcagttattgagacttgatgctattattgctgatggtgatgtcaaattgatgaggaagatgcaggtgcaaagagttcagaagtacgttgaggcactcgacctcttgaaagtcaaaaactctgccaaaaaagttgaagtcaacaagtccgtccgccacaaaccgcaaacgcaaacgcgatttgagcaacgcgatttgttatcgtttgtggaggaagaggaggaggagcctaggaattccaatgcatcatcctcatcaggtactccggcggttgtagcttcaaaatgggaaatgtttgattccgcatcgacggccaaggcggctgaaacggttaaaccggtccctccgcgattcaaatgggaattcttcgattaagatgaacactatatatacatacatgataaatatgtcttttttttctccggtttcatatgtgatttgttttgtttttcatctcaactgagatgtgtatgatttgtgatttgatcttggctattttttgaggctttgtctagaatatcttttggttggactcccttttaagtcaatcaaaaataataggggagtttcaacaattactatcattgtaatacctaaagatttggattttctttactattacaataaaaagctatcaaaaagatg

SEQ ID NO: 105078 - protein, 300 aa, Arabidopsis thaliana; identical to SEQ ID NO: 28839
  peptide (1)..(300): Ceres Seq. ID no. 13616406
  misc_feature (135)..(213): Pfam Name: BAG domain Pfam Description: BAG domain
  misc_feature (1)..(300): Homolog of NCBI NO: 15240726 NR Description: BAG domain containing protein [Arabidopsis
  misc_feature (1)..(300): Homolog of NCBI NO: 21537107 NR Description: unknown [Arabidopsis thaliana]
  misc_feature (1)..(300): Homolog of NCBI NO: 30697630 NR Description: BAG domain containing protein [Arabidopsis
  misc_feature (1)..(300): Homolog of NCBI NO: 30697627 NR Description: BAG domain containing protein [Arabidopsis
  misc_feature (10)..(300): Homolog of NCBI NO: 21553443 NR Description: unknown [Arabidopsis thaliana]
  misc_feature (11)..(276): Homolog of NCBI NO: 15242267 NR Description: BAG domain containing protein [Arabidopsis >gi|10177741|dbj|BAB11054.1| contains similarity to unknown
  misc_feature (65)..(300): Homolog of NCBI NO: 10176928 NR Description: contains similarity to unknown
  misc_feature (4)..(299): Homolog of NCBI NO: 25553557 NR Description: OSJNBa0038F22.4 [Oryza sativa (japonica
  misc_feature (4)..(299): Homolog of NCBI NO: 34898024 NR Description: ESTs AU082174(S13676),AU032395(R3986) correspond a region of the predicted gene.~Similar to Arabidopsis thaliana
  misc_feature (75)..(252): Homolog of NCBI NO: 10334497 NR Description: hypothetical protein [Cicer arietinum]

SEQ ID NO: 105079 - protein, 303 aa, Arabidopsis thaliana; identical to SEQ ID NO: 28837
  peptide (1)..(303): Ceres Seq. ID no. 13616407
  misc_feature (138)..(216): Pfam Name: BAG domain Pfam Description: BAG domain
  misc_feature (1)..(303): Homolog of NCBI NO: 15240726 NR Description: BAG domain containing protein [Arabidopsis
  misc_feature (4)..(303): Homolog of NCBI NO: 21537107 NR Description: unknown [Arabidopsis thaliana]
  misc_feature (1)..(303): Homolog of NCBI NO: 30697630 NR Description: BAG domain containing protein [Arabidopsis
  misc_feature (1)..(303): Homolog of NCBI NO: 30697627 NR Description: BAG domain containing protein [Arabidopsis
  misc_feature (13)..(303): Homolog of NCBI NO: 21553443 NR Description: unknown [Arabidopsis thaliana]
  misc_feature (14)..(279): Homolog of NCBI NO: 15242267 NR Description: BAG domain containing protein [Arabidopsis >gi|10177741|dbj|BAB11054.1| contains similarity to unknown
  misc_feature (68)..(303): Homolog of NCBI NO: 10176928 NR Description: contains similarity to unknown
  misc_feature (7)..(302): Homolog of NCBI NO: 25553557 NR Description: OSJNBa0038F22.4 [Oryza sativa (japonica
  misc_feature (7)..(302): Homolog of NCBI NO: 34898024 NR Description: ESTs AU082174(S13676),AU032395(R3986) correspond a region of the predicted gene.~Similar to Arabidopsis thaliana
  misc_feature (78)..(255): Homolog of NCBI NO: 10334497 NR Description: hypothetical protein [Cicer arietinum]

SEQ ID NO: 105080 - protein, 302 aa, Arabidopsis thaliana; identical to SEQ ID NO: 28838
  peptide (1)..(302): Ceres Seq. ID no. 13616408
  misc_feature (137)..(215): Pfam Name: BAG domain Pfam Description: BAG domain
  misc_feature (1)..(302): Homolog of NCBI NO: 15240726 NR Description: BAG domain containing protein [Arabidopsis
  misc_feature (3)..(302): Homolog of NCBI NO: 21537107 NR Description: unknown [Arabidopsis thaliana]
  misc_feature (1)..(302): Homolog of NCBI NO: 30697630 NR Description: BAG domain containing protein [Arabidopsis
  misc_feature (1)..(302): Homolog of NCBI NO: 30697627 NR Description: BAG domain containing protein [Arabidopsis
  misc_feature (12)..(302): Homolog of NCBI NO: 21553443 NR Description: unknown [Arabidopsis thaliana]
  misc_feature (13)..(278): Homolog of NCBI NO: 15242267 NR Description: BAG domain containing protein [Arabidopsis >gi|10177741|dbj|BAB11054.1| contains similarity to unknown
  misc_feature (67)..(302): Homolog of NCBI NO: 10176928 NR Description: contains similarity to unknown
  misc_feature (6)..(301): Homolog of NCBI NO: 25553557 NR Description: OSJNBa0038F22.4 [Oryza sativa (japonica
  misc_feature (6)..(301): Homolog of NCBI NO: 34898024 NR Description: ESTs AU082174(S13676),AU032395(R3986) correspond a region of the predicted gene.~Similar to Arabidopsis thaliana
  misc_feature (77)..(254): Homolog of NCBI NO: 10334497 NR Description: hypothetical protein [Cicer arietinum]

SEQ ID NO: 105081 - DNA, 1776 bp, Arabidopsis thaliana
  misc_feature (1)..(1776): Ceres Seq. ID no. 13616417
  misc_feature: MA Experiment ID: 108462 Result: Down-regulated in Transcription
  misc_feature: MA Experiment 108462 PARAMETER Experiment Name: At_Germinating_Seeds_cDNA_P Parameter: Age (day) Value: 2 vs. 0
  misc_feature: MA Experiment 108462 PARAMETER Experiment Name: At_Germinating_Seeds_cDNA_P Parameter: Tissue Value: Germinating Seeds
  misc_feature: MA Experiment ID: 108463 Result: Down-regulated in Transcription
  misc_feature: MA Experiment 108463 PARAMETER Experiment Name: At_Germinating_Seeds_cDNA_P Parameter: Age (day) Value: 3 vs. 0
  misc_feature: MA Experiment 108463 PARAMETER Experiment Name: At_Germinating_Seeds_cDNA_P Parameter: Tissue Value: Germinating Seeds
  misc_feature: MA Experiment ID: 108464 Result: Down-regulated in Transcription
  misc_feature: MA Experiment 108464 PARAMETER Experiment Name: At_Germinating_Seeds_cDNA_P Parameter: Age (day) Value: 4 vs. 0
  misc_feature: MA Experiment 108464 PARAMETER Experiment Name: At_Germinating_Seeds_cDNA_P Parameter: Tissue Value: Germinating Seeds
  misc_feature: MA Experiment ID: 108572 Result: Down-regulated in Transcription
  misc_feature: MA Experiment 108572 PARAMETER Experiment Name: At_Drought_cDNA_P Parameter: Timepoint (hr) Value: 1
  misc_feature: MA Experiment 108572 PARAMETER Experiment Name: At_Drought_cDNA_P Parameter: Tissue Value: Aerial
  misc_feature: MA Experiment 108572 PARAMETER Experiment Name: At_Drought_cDNA_P Parameter: Treatment Value: Drought vs. No Drought
  misc_feature: MA Experiment ID: 108573 Result: Down-regulated in Transcription
  misc_feature: MA Experiment 108573 PARAMETER Experiment Name: At_Drought_cDNA_P Parameter: Timepoint (hr) Value: 6
  misc_feature: MA Experiment 108573 PARAMETER Experiment Name: At_Drought_cDNA_P Parameter: Tissue Value: Aerial
  misc_feature: MA Experiment 108573 PARAMETER Experiment Name: At_Drought_cDNA_P Parameter: Treatment Value: Drought vs. No Drought
  misc_feature: MA Experiment ID: 108585 Result: Down-regulated in Transcription
  misc_feature: MA Experiment 108585 PARAMETER Experiment Name: At_5mM_NaNP_cDNA_P Parameter: Timepoint (hr) Value: 6
  misc_feature: MA Experiment 108585 PARAMETER Experiment Name: At_5mM_NaNP_cDNA_P Parameter: Tissue Value: Aerial
  misc_feature: MA Experiment 108585 PARAMETER Experiment Name: At_5mM_NaNP_cDNA_P Parameter: Treatment Value: null
  misc_feature: MA Experiment ID: 20000087 Result: Down-regulated in Transcription
  misc_feature: MA Experiment 20000087 PARAMETER Experiment Name: At_100uM_ABA_Mutants_cDNA_P Parameter: Plant Line Value: WS
  misc_feature: MA Experiment 20000087 PARAMETER Experiment Name: At_100uM_ABA_Mutants_cDNA_P Parameter: Timepoint (hr) Value: 6
  misc_feature: MA Experiment 20000087 PARAMETER Experiment Name: At_100uM_ABA_Mutants_cDNA_P Parameter: Tissue Value: Aerial
  misc_feature: MA Experiment 20000087 PARAMETER Experiment Name: At_100uM_ABA_Mutants_cDNA_P Parameter: Treatment Value: 100uM ABA vs. No Treatment
  misc_feature: MA Experiment ID: 20000088 Result: Up-regulated in Transcription
  misc_feature: MA Experiment 20000088 PARAMETER Experiment Name: At_100uM_ABA_Mutants_cDNA_P Parameter: Plant Line Value: Landsberg
  misc_feature: MA Experiment 20000088 PARAMETER Experiment Name: At_100uM_ABA_Mutants_cDNA_P Parameter: Timepoint (hr) Value: 6
  misc_feature: MA Experiment 20000088 PARAMETER Experiment Name: At_100uM_ABA_Mutants_cDNA_P Parameter: Tissue Value: Aerial
  misc_feature: MA Experiment 20000088 PARAMETER Experiment Name: At_100uM_ABA_Mutants_cDNA_P Parameter: Treatment Value: 100uM ABA vs. No Treatment
  misc_feature: MA Experiment ID: 20000089 Result: Up-regulated in Transcription
  misc_feature: MA Experiment ID: 20000090 Result: Up-regulated in Transcription
  misc_feature: MA Experiment ID: 20000093 Result: Up-regulated in Transcription
  misc_feature: MA Experiment 20000093 PARAMETER Experiment Name: At_42deg_Heat_cDNA_P Parameter: Temperature (deg C) Value: 42 vs. 22
  misc_feature: MA Experiment 20000093 PARAMETER Experiment Name: At_42deg_Heat_cDNA_P Parameter: Timepoint (hr) Value: 0.5
  misc_feature: MA Experiment 20000093 PARAMETER Experiment Name: At_42deg_Heat_cDNA_P Parameter: Tissue Value: Aerial
  misc_feature: MA Experiment ID: 20001556 Result: Up-regulated in Transcription
  misc_feature: MA Experiment 20001556 PARAMETER Experiment Name: At_Drought_Soil_Dry_P Parameter: Age (day) Value: 26
  misc_feature: MA Experiment 20001556 PARAMETER Experiment Name: At_Drought_Soil_Dry_P Parameter: Organism Value: A. thaliana
  misc_feature: MA Experiment 20001556 PARAMETER Experiment Name: At_Drought_Soil_Dry_P Parameter: Plant Line Value: WS
  misc_feature: MA Experiment 20001556 PARAMETER Experiment Name: At_Drought_Soil_Dry_P Parameter: Post Timepoint (hr) Value: None
  misc_feature: MA Experiment 20001556 PARAMETER Experiment Name: At_Drought_Soil_Dry_P Parameter: Post-Treatment Value: None
  misc_feature: MA Experiment 20001556 PARAMETER Experiment Name: At_Drought_Soil_Dry_P Parameter: Timepoint (day) Value: 12
  misc_feature: MA Experiment 20001556 PARAMETER Experiment Name: At_Drought_Soil_Dry_P Parameter: Treatment Value: Drought vs. No Drought
ttatttgattttgagtctctgttttgtctcttctcttgagattgcgataatgagagaacggattattacattcgtttcgctgcttcttgtagctttgctttcgtttcccagtgttagctactgtgacgaccaaacgatcctgtatgaatcgtttgacgagccttttgatggtcgctgggtcgtttcagagaaagctgaataccaaggtgtgtggaagcacgagaagagtgaagggcatgatgattatggacttctagtgagtgagaaagctaagaagtacggaatagttaaagagcttgatgttgatgagcctctaaaccttaacgaaggaactgttgttcttcaatacgaggctcgtttccaagaagggcttgagtgtggtggtgcttacttaaagtatcttcgtcctcaagaagctggatgggttcctcaagggtttgataatgattctccttactctatcatgtttggacctgataagtgtggtgctaccaacaaggttcatttcatcttgaagcataagaatcccaagagtggcgagtttgttgagcaccatctcaagttccctccttctgttccgtttgacatgctttctcatgtctacactgcggtcttgaaatctgataatgaggtgaggattttggtcgatggtgaggagaagaagaagggtaatttactgtctgctgaagactttgagcctccgttgattccttccaagaccatccctgatccagaggacaagaagccagaagactgggatgagagagccaagattcctgatcctaatgctgtgaagcctgatgactgggatgaggatgcacccatggagattgaagatgaggaagctgagaaacccgaaggatggttggatgatgagcctgtagaggttgaagaccccgaggcaagcaagccagaagattgggatgacgaggaagatggtgagtgggaggctcctaaggtttccaacaccaagtgtgaggcagcacccggatgtggcgaatggaagagaccgatgaagaggaaccctgcttacaagggcaaatggagctcacctctcatagataacccagcttacaagggaatctggaaaccaagagacattccaaatcctgattattttgagcttgagaggccgaatttggagcccattgctgccattggtattgagatatggacaatgcaagacggtatcttatttgacaacatcttgatatctaaagacgagaaggttgctgaaacttacagacaaagcacttggaagcccaagtttgatgtggagaaagagaaacaaaaggcagaggatgaagctgctggtgaggcagatggtctcaagagttaccagaagaaggtgttcgacctcttgtacaaggttgcagacatttctttccttagtgcgtacaagtcaaagattatggaacttattgagaaagctgaaacacagccaaacttaaccatcggtgtgctcatttccatcgtgatcgtcttcctctctctcttcttcaagctcatatttggtggtgcaaaggctaaggtagaaaagaagaaaccggaaacagctgcagagacctcgacaagcgaggcaaagacagaggagaaagcagaagcggtggctgcaccacgaaagaggcagacgaggcgtgagagttagataaaaagaggattagattttgatttttggggctttttgttttgatttatcaccgtatagacaaacagtagtggacctgatattaagacgattattgtaacatgttttttttgtatgcttttagtttc

SEQ ID NO: 105082 - protein, 548 aa, Arabidopsis thaliana
  peptide (1)..(548): Ceres Seq. ID no. 13616418
  misc_feature (17)..(548): Homolog of NCBI NO: 15240773 NR Description: calnexin, putative [Arabidopsis thaliana]
  misc_feature (17)..(548): Homolog of NCBI NO: 473878 NR Description: calnexin homolog
  misc_feature (17)..(548): Homolog of NCBI NO: 15240353 NR Description: calnexin 1 (CNX1) [Arabidopsis thaliana]
  misc_feature (17)..(548): Homolog of NCBI NO: 31321896 NR Description: putative papillar cell-specific calnexin
  misc_feature (43)..(548): Homolog of NCBI NO: 3334138 NR Description: CALNEXIN HOMOLOG PRECURSOR
  misc_feature (26)..(548): Homolog of NCBI NO: 21740628 NR Description: OSJNBb0012E08.10 [Oryza sativa (japonica
  misc_feature (25)..(548): Homolog of NCBI NO: 11131469 NR Description: Calnexin homolog precursor
  misc_feature (16)..(548): Homolog of NCBI NO: 11131766 NR Description: Calnexin homolog precursor
  misc_feature (130)..(545): Homolog of NCBI NO: 7441503 NR Description: calnexin - maize (fragment)
  misc_feature (49)..(545): Homolog of NCBI NO: 40740610 NR Description: hypothetical protein AN3592.2 [Aspergillus
YLILSLCFVSSLEIAIMRERIITFVSLLLVALLSFPSVSYCDDQTILYESFDEPFDGRWVVSEKAEYQGVWKHEKSEGHDDYGLLVSEKAKKYGIVKELDVDEPLNLNEGTVVLQYEARFQEGLECGGAYLKYLRPQEAGWVPQGFDNDSPYSIMFGPDKCGATNKVHFILKHKNPKSGEFVEHHLKFPPSVPFDMLSHVYTAVLKSDNEVRILVDGEEKKKGNLLSAEDFEPPLIPSKTIPDPEDKKPEDWDERAKIPDPNAVKPDDWDEDAPMEIEDEEAEKPEGWLDDEPVEVEDPEASKPEDWDDEEDGEWEAPKVSNTKCEAAPGCGEWKRPMKRNPAYKGKWSSPLIDNPAYKGIWKPRDIPNPDYFELERPNLEPIAAIGIEIWTMQDGILFDNILISKDEKVAETYRQSTWKPKFDVEKEKQKAEDEAAGEADGLKSYQKKVFDLLYKVADISFLSAYKSKIMELIEKAETQPNLTIGVLISIVIVFLSLFFKLIFGGAKAKVEKKKPETAAETSTSEAKTEEKAEAVAAPRKRQTRRES

SEQ ID NO: 105083 - protein, 532 aa, Arabidopsis thaliana; identical to SEQ ID NO: 28155
  peptide (1)..(532): Ceres Seq. ID no. 13616419
  misc_feature (1)..(532): Homolog of NCBI NO: 15240773 NR Description: calnexin, putative [Arabidopsis thaliana]
  misc_feature (1)..(532): Homolog of NCBI NO: 473878 NR Description: calnexin homolog
  misc_feature (1)..(532): Homolog of NCBI NO: 15240353 NR Description: calnexin 1 (CNX1) [Arabidopsis thaliana]
  misc_feature (1)..(532): Homolog of NCBI NO: 31321896 NR Description: putative papillar cell-specific calnexin
  misc_feature (27)..(532): Homolog of NCBI NO: 3334138 NR Description: CALNEXIN HOMOLOG PRECURSOR
  misc_feature (10)..(532): Homolog of NCBI NO: 21740628 NR Description: OSJNBb0012E08.10 [Oryza sativa (japonica
  misc_feature (9)..(532): Homolog of NCBI NO: 11131469 NR Description: Calnexin homolog precursor
  misc_feature (1)..(532): Homolog of NCBI NO: 11131766 NR Description: Calnexin homolog precursor
  misc_feature (114)..(529): Homolog of NCBI NO: 7441503 NR Description: calnexin - maize (fragment)
  misc_feature (33)..(529): Homolog of NCBI NO: 40740610 NR Description: hypothetical protein AN3592.2 [Aspergillus

SEQ ID NO: 105084 - protein, 394 aa, Arabidopsis thaliana; identical to SEQ ID NO: 28156
  peptide (1)..(394): Ceres Seq. ID no. 13616420
  misc_feature (1)..(394): Homolog of NCBI NO: 15240773 NR Description: calnexin, putative [Arabidopsis thaliana]
  misc_feature (1)..(394): Homolog of NCBI NO: 473878 NR Description: calnexin homolog
  misc_feature (1)..(394): Homolog of NCBI NO: 15240353 NR Description: calnexin 1 (CNX1) [Arabidopsis thaliana]
  misc_feature (1)..(394): Homolog of NCBI NO: 31321896 NR Description: putative papillar cell-specific calnexin
  misc_feature (1)..(394): Homolog of NCBI NO: 3334138 NR Description: CALNEXIN HOMOLOG PRECURSOR
  misc_feature (1)..(394): Homolog of NCBI NO: 21740628 NR Description: OSJNBb0012E08.10 [Oryza sativa (japonica
  misc_feature (1)..(394): Homolog of NCBI NO: 11131469 NR Description: Calnexin homolog precursor
  misc_feature (1)..(394): Homolog of NCBI NO: 11131766 NR Description: Calnexin homolog precursor
  misc_feature (1)..(391): Homolog of NCBI NO: 7441503 NR Description: calnexin - maize (fragment)
  misc_feature (1)..(391): Homolog of NCBI NO: 40740610 NR Description: hypothetical protein AN3592.2 [Aspergillus

SEQ ID NO: 105085 - DNA, 1233 bp, Arabidopsis thaliana
  misc_feature (1)..(1233): Ceres Seq. ID no. 13616421
  misc_feature: MA Experiment ID: 108474 Result: Down-regulated in Transcription
  misc_feature: MA Experiment 108474 PARAMETER Experiment Name: At_Drought_Flowers_cDNA_P Parameter: Timepoint (hr) Value: null
  misc_feature: MA Experiment 108474 PARAMETER Experiment Name: At_Drought_Flowers_cDNA_P Parameter: Treatment Value: Drought vs. No Drought
  misc_feature: MA Experiment ID: 20000234 Result: Up-regulated in Transcription
  misc_feature: MA Experiment 20000234 PARAMETER Experiment Name: At_Siliques_P Parameter: Age (day) Value: 21
  misc_feature: MA Experiment 20000234 PARAMETER Experiment Name: At_Siliques_P Parameter: Organism Value: A. thaliana
  misc_feature: MA Experiment 20000234 PARAMETER Experiment Name: At_Siliques_P Parameter: Plant Line Value: WS
  misc_feature: MA Experiment 20000234 PARAMETER Experiment Name: At_Siliques_P Parameter: Tissue Value: Less Than 5mm Siliques vs. Whole Plant
  misc_feature: MA Experiment ID: 20000264 Result: Up-regulated in Transcription
  misc_feature: MA Experiment 20000264 PARAMETER Experiment Name: At_Open_Flower_P Parameter: Age (day) Value: 21
  misc_feature: MA Experiment 20000264 PARAMETER Experiment Name: At_Open_Flower_P Parameter: Plant Line Value: WS
  misc_feature: MA Experiment 20000264 PARAMETER Experiment Name: At_Open_Flower_P Parameter: Tissue Value: Open Flower vs. Whole Plant
  misc_feature: MA Experiment ID: 20000265 Result: Up-regulated in Transcription
  misc_feature: MA Experiment 20000265 PARAMETER Experiment Name: At_Open_Flower_P Parameter: Age (day) Value: 21
  misc_feature: MA Experiment 20000265 PARAMETER Experiment Name: At_Open_Flower_P Parameter: Plant Line Value: WS
  misc_feature: MA Experiment 20000265 PARAMETER Experiment Name: At_Open_Flower_P Parameter: Tissue Value: Closed Flower vs. Whole Plant
  misc_feature: MA Experiment ID: 20000286 Result: Up-regulated in Transcription
  misc_feature: MA Experiment 20000286 PARAMETER Experiment Name: At_Open_Flower_P Parameter: Age (day) Value: 21
  misc_feature: MA Experiment 20000286 PARAMETER Experiment Name: At_Open_Flower_P Parameter: Plant Line Value: WS
  misc_feature: MA Experiment 20000286 PARAMETER Experiment Name: At_Open_Flower_P Parameter: Tissue Value: Half Open vs. Whole Plant
  misc_feature: MA Experiment ID: 20000794 Result: Up-regulated in Transcription
  misc_feature: MA Experiment 20000794 PARAMETER Experiment Name: At_Petals_P Parameter: Age (day) Value: 23-25 days
  misc_feature: MA Experiment 20000794 PARAMETER Experiment Name: At_Petals_P Parameter: Plant Line Value: WS
  misc_feature: MA Experiment 20000794 PARAMETER Experiment Name: At_Petals_P Parameter: Tissue Value: Petals vs. Whole plant
  misc_feature: MA Experiment ID: 20001911 Result: Up-regulated in Transcription
  misc_feature: MA Experiment 20001911 PARAMETER Experiment Name: At_Drought_Reproduction_P Parameter: Age (day) Value: 40
  misc_feature: MA Experiment 20001911 PARAMETER Experiment Name: At_Drought_Reproduction_P Parameter: Organism Value: A. thaliana
  misc_feature: MA Experiment 20001911 PARAMETER Experiment Name: At_Drought_Reproduction_P Parameter: Plant Line Value: WS
  misc_feature: MA Experiment 20001911 PARAMETER Experiment Name: At_Drought_Reproduction_P Parameter: Timepoint (day) Value: 10
  misc_feature: MA Experiment 20001911 PARAMETER Experiment Name: At_Drought_Reproduction_P Parameter: Tissue Value: Flowers
  misc_feature: MA Experiment 20001911 PARAMETER Experiment Name: At_Drought_Reproduction_P Parameter: Treatment Value: Drought vs. No Drought
atccagaaaaaacaaaaaaaaacaaaaaaataataaaacaaaaaaatatcttttttttttctaataaaaaaaaaataataaataaatatgagatacacaaatgtgtccattttattaggcatgttggtgatctttgtttcaccaatggtgttcgcagatgatttgacaccaatcccagagggcaaaccccaagtggtgcagtggttcaatacccacgttggtccattggctcaacgtaaaggcttagatcctgctctcgtagctgctgaggctgctccacgtatcatcaacgtgaatccaaagggaggtgaattcaaaacactaacagacgcaataaagagcgttcccgcagggaacacaaagcgggtgatcataaagatggctcatggtgagtacagagagaaggtcactatcgacaggaacaaacccttcattacattgatgggacaacccaatgccatgcctgttatcacctacgacggtaccgccgccaagtatggaaccgttgatagtgcctctctcattatcttatccgactatttcatggccgttaacatcgtcgttaagaacactgcaccggcaccagatggtaaaactaagggagcacaagccttatccatgagaatctccggaaactttgctgctttctacaactgcaaattctacggtttccaagatacaatctgtgatgataccggaaaccatttcttcaaggattgttacgtcgaaggaacattcgatttcatcttcggaagtggaacctctatgtacttgggaacacaattgcacgtggttggagacggtattagagtgatcgcagcgcatgcaggaaagagcgcagaagaaaagagtggatactctttcgtgcactgcaaggtgactggaactggaggaggaatctatttgggaagagcatggatgagccaccctaaggttgtctatgcctacaccgagatgaccagcgttgtcaaccccaccggatggcaagaaaacaagactcccgcacatgacaagaccgtgttctacggagagtacaagtgttcaggaccagggtcacacaaagccaagagagtgccattcacacaagacatcgacgacaaagaagctaactgtttcctatccctcggctacatccaaggatccaagtggcttctcccaccacccgctttgtaaattctttaatatcaacctattaaaattaaaattaaaacgtaaaactaaaattaaaacttc

SEQ ID NO: 105086 - protein, 361 aa, Arabidopsis thaliana
  peptide (1)..(361): Ceres Seq. ID no. 13616422
  misc_feature (74)..(352): Pfam Name: Pectinesterase Pfam Description: Pectinesterase
  misc_feature (1)..(361): Homolog of NCBI NO: 18415486 NR Description: pectinesterase family [Arabidopsis thaliana]
  misc_feature (1)..(361): Homolog of NCBI NO: 30697951 NR Description: pectinesterase family [Arabidopsis thaliana]
  misc_feature (20)..(361): Homolog of NCBI NO: 11358603 NR Description: pectin methyl-esterase-like protein - Arabidopsis
  misc_feature (20)..(361): Homolog of NCBI NO: 21593398 NR Description: pectin methyl-esterase-like protein [Arabidopsis
  misc_feature (20)..(361): Homolog of NCBI NO: 25404855 NR Description: probable pectin methylesterase T17F3.3 [imported] Arabidopsis thaliana >gi|12325236|gb|AAG52566.1|AC010675_14
  misc_feature (1)..(360): Homolog of NCBI NO: 9758483 NR Description: pectin methylesterase-like protein [Arabidopsis
  misc_feature (68)..(360): Homolog of NCBI NO: 15240325 NR Description: pectinesterase family [Arabidopsis thaliana]
  misc_feature (1)..(44): Homolog of NCBI NO: 15240325 NR Description: pectinesterase family [Arabidopsis thaliana]
  misc_feature (1)..(359): Homolog of NCBI NO: 15240792 NR Description: pectinesterase family [Arabidopsis thaliana]
  misc_feature (1)..(360): Homolog of NCBI NO: 15240781 NR Description: pectinesterase family [Arabidopsis thaliana]
MRYTNVSILLGMLVIFVSPMVFADDLTPIPEGKPQVVQWFNTHVGPLAQRKGLDPALVAAEAAPRIINVNPKGGEFKTLTDAIKSVPAGNTKRVIIKMAHGEYREKVTIDRNKPFITLMGQPNAMPVITYDGTAAKYGTVDSASLIILSDYFMAVNIVVKNTAPAPDGKTKGAQALSMRISGNFAAFYNCKFYGFQDTICDDTGNHFFKDCYVEGTFDFIFGSGTSMYLGTQLHVVGDGIRVIAAHAGKSAEEKSGYSFVHCKVTGTGGGIYLGRAWMSHPKVVYAYTEMTSVVNPTGWQENKTPAHDKTVFYGEYKCSGPGSHKAKRVPFTQDIDDKEANCFLSLGYIQGSKWLLPPPAL

SEQ ID NO: 105087 - protein, 350 aa, Arabidopsis thaliana
  peptide (1)..(350): Ceres Seq. ID no. 13616423
  misc_feature (63)..(341): Pfam Name: Pectinesterase Pfam Description: Pectinesterase
  misc_feature (1)..(350): Homolog of NCBI NO: 18415486 NR Description: pectinesterase family [Arabidopsis thaliana]
  misc_feature (1)..(350): Homolog of NCBI NO: 30697951 NR Description: pectinesterase family [Arabidopsis thaliana]
  misc_feature (9)..(350): Homolog of NCBI NO: 11358603 NR Description: pectin methyl-esterase-like protein - Arabidopsis
  misc_feature (9)..(350): Homolog of NCBI NO: 21593398 NR Description: pectin methyl-esterase-like protein [Arabidopsis
  misc_feature (9)..(350): Homolog of NCBI NO: 25404855 NR Description: probable pectin methylesterase T17F3.3 [imported] Arabidopsis thaliana >gi|12325236|gb|AAG52566.1|AC010675_14
  misc_feature (1)..(349): Homolog of NCBI NO: 9758483 NR Description: pectin methylesterase-like protein [Arabidopsis
  misc_feature (57)..(349): Homolog of NCBI NO: 15240325 NR Description: pectinesterase family [Arabidopsis thaliana]
  misc_feature (1)..(33): Homolog of NCBI NO: 15240325 NR Description: pectinesterase family [Arabidopsis thaliana]
  misc_feature (1)..(348): Homolog of NCBI NO: 15240792 NR Description: pectinesterase family [Arabidopsis thaliana]
  misc_feature (1)..(349): Homolog of NCBI NO: 15240781 NR Description: pectinesterase family [Arabidopsis thaliana]
MLVIFVSPMVFADDLTPIPEGKPQVVQWFNTHVGPLAQRKGLDPALVAAEAAPRIINVNPKGGEFKTLTDAIKSVPAGNTKRVIIKMAHGEYREKVTIDRNKPFITLMGQPNAMPVITYDGTAAKYGTVDSASLIILSDYFMAVNIVVKNTAPAPDGKTKGAQALSMRISGNFAAFYNCKFYGFQDTICDDTGNHFFKDCYVEGTFDFIFGSGTSMYLGTQLHVVGDGIRVIAAHAGKSAEEKSGYSFVHCKVTGTGGGIYLGRAWMSHPKVVYAYTEMTSVVNPTGWQENKTPAHDKTVFYGEYKCSGPGSHKAKRVPFTQDIDDKEANCFLSLGYIQGSKWLLPPPAL

SEQ ID NO: 105088 - protein, 342 aa, Arabidopsis thaliana
  peptide (1)..(342): Ceres Seq. ID no. 13616424
  misc_feature (55)..(333): Pfam Name: Pectinesterase Pfam Description: Pectinesterase
  misc_feature (1)..(342): Homolog of NCBI NO: 18415486 NR Description: pectinesterase family [Arabidopsis thaliana]
  misc_feature (1)..(342): Homolog of NCBI NO: 30697951 NR Description: pectinesterase family [Arabidopsis thaliana]
  misc_feature (1)..(342): Homolog of NCBI NO: 11358603 NR Description: pectin methyl-esterase-like protein - Arabidopsis
  misc_feature (1)..(342): Homolog of NCBI NO: 21593398 NR Description: pectin methyl-esterase-like protein [Arabidopsis
  misc_feature (1)..(342): Homolog of NCBI NO: 25404855 NR Description: probable pectin methylesterase T17F3.3 [imported] Arabidopsis thaliana >gi|12325236|gb|AAG52566.1|AC010675_14
  misc_feature (1)..(341): Homolog of NCBI NO: 9758483 NR Description: pectin methylesterase-like protein [Arabidopsis
  misc_feature (49)..(341): Homolog of NCBI NO: 15240325 NR Description: pectinesterase family [Arabidopsis thaliana]
  misc_feature (1)..(25): Homolog of NCBI NO: 15240325 NR Description: pectinesterase family [Arabidopsis thaliana]
  misc_feature (1)..(340): Homolog of NCBI NO: 15240792 NR Description: pectinesterase family [Arabidopsis thaliana]
  misc_feature (1)..(341): Homolog of NCBI NO: 15240781 NR Description: pectinesterase family [Arabidopsis thaliana]
MVFADDLTPIPEGKPQVVQWFNTHVGPLAQRKGLDPALVAAEAAPRIINVNPKGGEFKTLTDAIKSVPAGNTKRVIIKMAHGEYREKVTIDRNKPFITLMGQPNAMPVITYDGTAAKYGTVDSASLIILSDYFMAVNIVVKNTAPAPDGKTKGAQALSMRISGNFAAFYNCKFYGFQDTICDDTGNHFFKDCYVEGTFDFIFGSGTSMYLGTQLHVVGDGIRVIAAHAGKSAEEKSGYSFVHCKVTGTGGGIYLGRAWMSHPKVVYAYTEMTSVVNPTGWQENKTPAHDKTVFYGEYKCSGPGSHKAKRVPFTQDIDDKEANCFLSLGYIQGSKWLLPPPAL

SEQ ID NO: 105089 - DNA, 826 bp, Arabidopsis thaliana
  misc_feature (1)..(826): Ceres Seq. ID no. 13616425
  misc_feature: MA Experiment ID: 20000180 Result: Up-regulated in Transcription
  misc_feature: MA Experiment 20000180 PARAMETER Experiment Name: At_Germinating_Seeds_P Parameter: Age (hr) Value: 24 vs. 0
  misc_feature: MA Experiment 20000180 PARAMETER Experiment Name: At_Germinating_Seeds_P Parameter: Tissue Value: Germinating Seeds
  misc_feature: MA Experiment ID: 20000211 Result: Up-regulated in Transcription
  misc_feature: MA Experiment 20000211 PARAMETER Experiment Name: At_0.001percent_MeJA__P Parameter: Age (day) Value: 14
  misc_feature: MA Experiment 20000211 PARAMETER Experiment Name: At_0.001percent_MeJA__P Parameter: Organism Value: A. thaliana
  misc_feature: MA Experiment 20000211 PARAMETER Experiment Name: At_0.001percent_MeJA__P Parameter: Plant Line Value: WS
  misc_feature: MA Experiment 20000211 PARAMETER Experiment Name: At_0.001percent_MeJA__P Parameter: Timepoint (hr) Value: 1
  misc_feature: MA Experiment 20000211 PARAMETER Experiment Name: At_0.001percent_MeJA__P Parameter: Tissue Value: Aerial
  misc_feature: MA Experiment 20000211 PARAMETER Experiment Name: At_0.001percent_MeJA__P Parameter: Treatment Value: 0.001percent MeJA vs. No Treatment
  misc_feature: MA Experiment ID: 20000265 Result: Down-regulated in Transcription
  misc_feature: MA Experiment 20000265 PARAMETER Experiment Name: At_Open_Flower_P Parameter: Age (day) Value: 21
  misc_feature: MA Experiment 20000265 PARAMETER Experiment Name: At_Open_Flower_P Parameter: Plant Line Value: WS
  misc_feature: MA Experiment 20000265 PARAMETER Experiment Name: At_Open_Flower_P Parameter: Tissue Value: Closed Flower vs. Whole Plant
  misc_feature: MA Experiment ID: 20000794 Result: Down-regulated in Transcription
  misc_feature: MA Experiment 20000794 PARAMETER Experiment Name: At_Petals_P Parameter: Age (day) Value: 23-25 days
  misc_feature: MA Experiment 20000794 PARAMETER Experiment Name: At_Petals_P Parameter: Plant Line Value: WS
  misc_feature: MA Experiment 20000794 PARAMETER Experiment Name: At_Petals_P Parameter: Tissue Value: Petals vs. Whole plant
  misc_feature: MA Experiment ID: 20001248 Result: Down-regulated in Transcription
  misc_feature: MA Experiment 20001248 PARAMETER Experiment Name: At_Far-red-induction_P Parameter: Age (day) Value: 7
  misc_feature: MA Experiment 20001248 PARAMETER Experiment Name: At_Far-red-induction_P Parameter: Light Value: Far-red vs. White
  misc_feature: MA Experiment 20001248 PARAMETER Experiment Name: At_Far-red-induction_P Parameter: Organism Value: A. thaliana
  misc_feature: MA Experiment 20001248 PARAMETER Experiment Name: At_Far-red-induction_P Parameter: Plant Line Value: Columbia
  misc_feature: MA Experiment 20001248 PARAMETER Experiment Name: At_Far-red-induction_P Parameter: Timepoint (hr) Value: 4
  misc_feature: MA Experiment 20001248 PARAMETER Experiment Name: At_Far-red-induction_P Parameter: Tissue Value: Whole Plant
  misc_feature: MA Experiment ID: 20001450 Result: Down-regulated in Transcription
  misc_feature: MA Experiment 20001450 PARAMETER Experiment Name: At_Far-red-induction_P Parameter: Age (day) Value: 7
  misc_feature: MA Experiment 20001450 PARAMETER Experiment Name: At_Far-red-induction_P Parameter: Light Value: Far-red vs. White
  misc_feature: MA Experiment 20001450 PARAMETER Experiment Name: At_Far-red-induction_P Parameter: Organism Value: A. thaliana
  misc_feature: MA Experiment 20001450 PARAMETER Experiment Name: At_Far-red-induction_P Parameter: Plant Line Value: Columbia
  misc_feature: MA Experiment 20001450 PARAMETER Experiment Name: At_Far-red-induction_P Parameter: Timepoint (hr) Value: 8
  misc_feature: MA Experiment 20001450 PARAMETER Experiment Name: At_Far-red-induction_P Parameter: Tissue Value: Whole Plant
  misc_feature: MA Experiment ID: 20001908 Result: Up-regulated in Transcription
  misc_feature: MA Experiment 20001908 PARAMETER Experiment Name: At_Drought_Reproduction_P Parameter: Age (day) Value: 40
  misc_feature: MA Experiment 20001908 PARAMETER Experiment Name: At_Drought_Reproduction_P Parameter: Organism Value: A. thaliana
  misc_feature: MA Experiment 20001908 PARAMETER Experiment Name: At_Drought_Reproduction_P Parameter: Plant Line Value: WS
  misc_feature: MA Experiment 20001908 PARAMETER Experiment Name: At_Drought_Reproduction_P Parameter: Timepoint (day) Value: 10
  misc_feature: MA Experiment 20001908 PARAMETER Experiment Name: At_Drought_Reproduction_P Parameter: Tissue Value: Siliques
  misc_feature: MA Experiment 20001908 PARAMETER Experiment Name: At_Drought_Reproduction_P Parameter: Treatment Value: Drought vs. No Drought
aaacaatacacttaacaatggattcttctctgaaaactcaggaacctcaagtagtggaaacttctccttctccggtagctcaggagcctcctcaagtagctgacaaacctgcgattgttccttctccgatagctcaagagccagacaacgatgttccggcgccgggaaacgagtttgctgagttcgccgccggttgtttctggggagtggagcttgctttccagagaatccctggcgtgaccgtgactgaggtcggttacactcatgggatctctcacaatccgtcttatgaagatgtctgtacgaacaccacgaaccatgcagaagttgtcagggttcaatatgatcctaaagaatgcacttatgagacacttcttgatttgttttggtctagacataatcctaccaccttgaatcgtcagggagaacttttgggagcacaataccgatcaggtatatatttctacacaccggagcaagagaaactagcacgcgagtctctagagaaagagcagaaaaaactggaggataagattgtgactgagatcttaccggcaaagaaattctacaaagctgaagaataccatcagcagtaccttgtcaaaggtgggatgcatggaaacgctcaatcacctgcaaagagctgcaaggaccctatccgctgctatggctaatcaaaagcctttgttcctcttctcccaaaacagaggattctcccagaggacctctttacctgttgctttgttggtttgtgtgtgtgcgtgtgtttatatgtacttgtcatctcatcatacataataaaagatgtgggatcatctcacctttg

SEQ ID NO: 105090 - protein, 223 aa, Arabidopsis thaliana
  peptide (1)..(223): Ceres Seq. ID no. 13616426
  misc_feature (57)..(206): Pfam Name: Peptide methionine sulfoxide reductase Pfam Description: Peptide methionine sulfoxide reductase
  misc_feature (6)..(223): Homolog of NCBI NO: 15240795 NR Description: peptide methionine sulfoxide reductase-related [Arabidopsis thaliana] >gi|11278972|pir||T49885 peptide
  misc_feature (40)..(223): Homolog of NCBI NO: 21592658 NR Description: peptide methionine sulfoxide reductase (msr)
  misc_feature (40)..(223): Homolog of NCBI NO: 15240796 NR Description: peptide methionine sulfoxide reductase (msr) thaliana] >gi|11278973|pir||T49886 peptide methionine sulfoxide
  misc_feature (40)..(223): Homolog of NCBI NO: 26451744 NR Description: putative peptide methionine sulfoxide reductase
  misc_feature (40)..(223): Homolog of NCBI NO: 18424492 NR Description: peptide methionine sulfoxide reductase - like [Arabidopsis thaliana] >gi|9758479|dbj|BAB09008.1| peptide sulfoxide reductase [Arabidopsis thaliana]
  misc_feature (30)..(223): Homolog of NCBI NO: 21593143 NR Description: protein-methionine-S-oxide reductase [Arabidopsis
  misc_feature (30)..(223): Homolog of NCBI NO: 15146324 NR Description: AT4g25130/F13M23_270 [Arabidopsis thaliana]
  misc_feature (30)..(223): Homolog of NCBI NO: 15234942 NR Description: protein-methionine-S-oxide reductase [Arabidopsis >gi|12644314|sp|P54150|MSRA_ARATH Peptide methionine sulfoxide
  misc_feature (40)..(223): Homolog of NCBI NO: 25308493 NR Description: protein-methionine-S-oxide reductase (EC 1.8.4.6)
  misc_feature (30)..(223): Homolog of NCBI NO: 1279212 NR Description: methionine sulfoxide reductase [Arabidopsis
TIHLTMDSSLKTQEPQVVETSPSPVAQEPPQVADKPAIVPSPIAQEPDNDVPAPGNEFAEFAAGCFWGVELAFQRIPGVTVTEVGYTHGISHNPSYEDVCTNTTNHAEVVRVQYDPKECTYETLLDLFWSRHNPTTLNRQGELLGAQYRSGIYFYTPEQEKLARESLEKEQKKLEDKIVTEILPAKKFYKAEEYHQQYLVKGGMHGNAQSPAKSCKDPIRCYG

SEQ ID NO: 105091 - protein, 218 aa, Arabidopsis thaliana
  peptide (1)..(218): Ceres Seq. ID no. 13616427
  misc_feature (52)..(201): Pfam Name: Peptide methionine sulfoxide reductase Pfam Description: Peptide methionine sulfoxide reductase
  misc_feature (1)..(218): Homolog of NCBI NO: 15240795 NR Description: peptide methionine sulfoxide reductase-related [Arabidopsis thaliana] >gi|11278972|pir||T49885 peptide
  misc_feature (35)..(218): Homolog of NCBI NO: 21592658 NR Description: peptide methionine sulfoxide reductase (msr)
  misc_feature (35)..(218): Homolog of NCBI NO: 15240796 NR Description: peptide methionine sulfoxide reductase (msr) thaliana] >gi|11278973|pir||T49886 peptide methionine sulfoxide
  misc_feature (35)..(218): Homolog of NCBI NO: 26451744 NR Description: putative peptide methionine sulfoxide reductase
  misc_feature (35)..(218): Homolog of NCBI NO: 18424492 NR Description: peptide methionine sulfoxide reductase - like [Arabidopsis thaliana] >gi|9758479|dbj|BAB09008.1| peptide sulfoxide reductase [Arabidopsis thaliana]
  misc_feature (25)..(218): Homolog of NCBI NO: 21593143 NR Description: protein-methionine-S-oxide reductase [Arabidopsis
  misc_feature (25)..(218): Homolog of NCBI NO: 15146324 NR Description: AT4g25130/F13M23_270 [Arabidopsis thaliana]
  misc_feature (25)..(218): Homolog of NCBI NO: 15234942 NR Description: protein-methionine-S-oxide reductase [Arabidopsis >gi|12644314|sp|P54150|MSRA_ARATH Peptide methionine sulfoxide
  misc_feature (35)..(218): Homolog of NCBI NO: 25308493 NR Description: protein-methionine-S-oxide reductase (EC 1.8.4.6)
  misc_feature (25)..(218): Homolog of NCBI NO: 1279212 NR Description: methionine sulfoxide reductase [Arabidopsis
MDSSLKTQEPQVVETSPSPVAQEPPQVADKPAIVPSPIAQEPDNDVPAPGNEFAEFAAGCFWGVELAFQRIPGVTVTEVGYTHGISHNPSYEDVCTNTTNHAEVVRVQYDPKECTYETLLDLFWSRHNPTTLNRQGELLGAQYRSGIYFYTPEQEKLARESLEKEQKKLEDKIVTEILPAKKFYKAEEYHQQYLVKGGMHGNAQSPAKSCKDPIRCYG

SEQ ID NO: 105092 - DNA, 1399 bp, Arabidopsis thaliana
  misc_feature (1)..(1399): Ceres Seq. ID no. 13616439
  misc_feature: MA Experiment ID: 108462 Result: Down-regulated in Transcription
  misc_feature: MA Experiment 108462 PARAMETER Experiment Name: At_Germinating_Seeds_cDNA_P Parameter: Age (day) Value: 2 vs. 0
  misc_feature: MA Experiment 108462 PARAMETER Experiment Name: At_Germinating_Seeds_cDNA_P Parameter: Tissue Value: Germinating Seeds
  misc_feature: MA Experiment ID: 108463 Result: Down-regulated in Transcription
  misc_feature: MA Experiment 108463 PARAMETER Experiment Name: At_Germinating_Seeds_cDNA_P Parameter: Age (day) Value: 3 vs. 0
  misc_feature: MA Experiment 108463 PARAMETER Experiment Name: At_Germinating_Seeds_cDNA_P Parameter: Tissue Value: Germinating Seeds
  misc_feature: MA Experiment ID: 108464 Result: Down-regulated in Transcription
  misc_feature: MA Experiment 108464 PARAMETER Experiment Name: At_Germinating_Seeds_cDNA_P Parameter: Age (day) Value: 4 vs. 0
  misc_feature: MA Experiment 108464 PARAMETER Experiment Name: At_Germinating_Seeds_cDNA_P Parameter: Tissue Value: Germinating Seeds
  misc_feature: MA Experiment ID: 108474 Result: Down-regulated in Transcription
  misc_feature: MA Experiment 108474 PARAMETER Experiment Name: At_Drought_Flowers_cDNA_P Parameter: Timepoint (hr) Value: null
  misc_feature: MA Experiment 108474 PARAMETER Experiment Name: At_Drought_Flowers_cDNA_P Parameter: Treatment Value: Drought vs. No Drought
  misc_feature: MA Experiment ID: 108579 Result: Down-regulated in Transcription
  misc_feature: MA Experiment 108579 PARAMETER Experiment Name: At_4deg_Cold_cDNA_P Parameter: Temperature (deg C) Value: 4 vs. 22
  misc_feature: MA Experiment 108579 PARAMETER Experiment Name: At_4deg_Cold_cDNA_P Parameter: Timepoint (hr) Value: 6
  misc_feature: MA Experiment 108579 PARAMETER Experiment Name: At_4deg_Cold_cDNA_P Parameter: Tissue Value: Aerial
  misc_feature: MA Experiment ID: 108594 Result: Down-regulated in Transcription
  misc_feature: MA Experiment 108594 PARAMETER Experiment Name: At_Ler-rhl_Root_cDNA_P Parameter: Plant Line Value: null
  misc_feature: MA Experiment ID: 108595 Result: Up-regulated in Transcription
  misc_feature: MA Experiment 108595 PARAMETER Experiment Name: At_Ler-pi_Ovule_cDNA_P Parameter: Plant Line Value: null
  misc_feature: MA Experiment ID: 20000166 Result: Up-regulated in Transcription
  misc_feature: MA Experiment 20000166 PARAMETER Experiment Name: At_100uM_ABA_P Parameter: Age (day) Value: 14
  misc_feature: MA Experiment 20000166 PARAMETER Experiment Name: At_100uM_ABA_P Parameter: Organism Value: A. thaliana
  misc_feature: MA Experiment 20000166 PARAMETER Experiment Name: At_100uM_ABA_P Parameter: Plant Line Value: WS
  misc_feature: MA Experiment 20000166 PARAMETER Experiment Name: At_100uM_ABA_P Parameter: Timepoint (hr) Value: 1
  misc_feature: MA Experiment 20000166 PARAMETER Experiment Name: At_100uM_ABA_P Parameter: Tissue Value: Aerial
  misc_feature: MA Experiment 20000166 PARAMETER Experiment Name: At_100uM_ABA_P Parameter: Treatment Value: 100uM ABA vs. No Treatment
  misc_feature: MA Experiment ID: 20000182 Result: Up-regulated in Transcription
  misc_feature: MA Experiment 20000182 PARAMETER Experiment Name: At_2mM_SA_P Parameter: Age (day) Value: 14
  misc_feature: MA Experiment 20000182 PARAMETER Experiment Name: At_2mM_SA_P Parameter: Organism Value: A. thaliana
  misc_feature: MA Experiment 20000182 PARAMETER Experiment Name: At_2mM_SA_P Parameter: Plant Line Value: WS
  misc_feature: MA Experiment 20000182 PARAMETER Experiment Name: At_2mM_SA_P Parameter: Timepoint (hr) Value: 6
  misc_feature: MA Experiment 20000182 PARAMETER Experiment Name: At_2mM_SA_P Parameter: Tissue Value: Aerial
  misc_feature: MA Experiment 20000182 PARAMETER Experiment Name: At_2mM_SA_P Parameter: Treatment Value: 2mM SA vs. No Treatment
  misc_feature: MA Experiment ID: 20000185 Result: Up-regulated in Transcription
  misc_feature: MA Experiment 20000185 PARAMETER Experiment Name: At_Roots__P Parameter: Age (day) Value: 7 vs. 21
  misc_feature: MA Experiment 20000185 PARAMETER Experiment Name: At_Roots__P Parameter: Organism Value: A. thaliana
  misc_feature: MA Experiment 20000185 PARAMETER Experiment Name: At_Roots__P Parameter: Tissue Value: Roots vs. Whole Plant
  misc_feature: MA Experiment ID: 20000227 Result: Down-regulated in Transcription
  misc_feature: MA Experiment 20000227 PARAMETER Experiment Name: At_Root-Tips-vs-Tops_P Parameter: Tissue Value: Root Tips vs. Root Tops
  misc_feature: MA Experiment ID: 20000234 Result: Down-regulated in Transcription
  misc_feature: MA Experiment 20000234 PARAMETER Experiment Name: At_Siliques_P Parameter: Age (day) Value: 21
  misc_feature: MA Experiment 20000234 PARAMETER Experiment Name: At_Siliques_P Parameter: Organism Value: A. thaliana
  misc_feature: MA Experiment 20000234 PARAMETER Experiment Name: At_Siliques_P Parameter: Plant Line Value: WS
  misc_feature: MA Experiment 20000234 PARAMETER Experiment Name: At_Siliques_P Parameter: Tissue Value: Less Than 5mm Siliques vs. Whole Plant
  misc_feature: MA Experiment ID: 20000235 Result: Down-regulated in Transcription
  misc_feature: MA Experiment 20000235 PARAMETER Experiment Name: At_Siliques_P Parameter: Age (day) Value: 21
  misc_feature: MA Experiment 20000235 PARAMETER Experiment Name: At_Siliques_P Parameter: Organism Value: A. thaliana
  misc_feature: MA Experiment 20000235 PARAMETER Experiment Name: At_Siliques_P Parameter: Plant Line Value: WS
  misc_feature: MA Experiment 20000235 PARAMETER Experiment Name: At_Siliques_P Parameter: Tissue Value: 5-10mm Siliques vs. Whole Plant
  misc_feature: MA Experiment ID: 20000264 Result: Up-regulated in Transcription
  misc_feature: MA Experiment 20000264 PARAMETER Experiment Name: At_Open_Flower_P Parameter: Age (day) Value: 21
  misc_feature: MA Experiment 20000264 PARAMETER Experiment Name: At_Open_Flower_P Parameter: Plant Line Value: WS
  misc_feature: MA Experiment 20000264 PARAMETER Experiment Name: At_Open_Flower_P Parameter: Tissue Value: Open Flower vs. Whole Plant
  misc_feature: MA Experiment ID: 20000265 Result: Up-regulated in Transcription
  misc_feature: MA Experiment 20000265 PARAMETER Experiment Name: At_Open_Flower_P Parameter: Age (day) Value: 21
  misc_feature: MA Experiment 20000265 PARAMETER Experiment Name: At_Open_Flower_P Parameter: Plant Line Value: WS
  misc_feature: MA Experiment 20000265 PARAMETER Experiment Name: At_Open_Flower_P Parameter: Tissue Value: Closed Flower vs. Whole Plant
  misc_feature: MA Experiment ID: 20000286 Result: Up-regulated in Transcription
  misc_feature: MA Experiment 20000286 PARAMETER Experiment Name: At_Open_Flower_P Parameter: Age (day) Value: 21
  misc_feature: MA Experiment 20000286 PARAMETER Experiment Name: At_Open_Flower_P Parameter: Plant Line Value: WS
  misc_feature: MA Experiment 20000286 PARAMETER Experiment Name: At_Open_Flower_P Parameter: Tissue Value: Half Open vs. Whole Plant
  misc_feature: MA Experiment ID: 20000439 Result: Up-regulated in Transcription
  misc_feature: MA Experiment 20000439 PARAMETER Experiment Name: At_Roots__P Parameter: Age (day) Value: 14 vs. 21
  misc_feature: MA Experiment 20000439 PARAMETER Experiment Name: At_Roots__P Parameter: Organism Value: A. thaliana
  misc_feature: MA Experiment 20000439 PARAMETER Experiment Name: At_Roots__P Parameter: Tissue Value: Roots vs. Whole Plant
  misc_feature: MA Experiment ID: 20000453 Result: Up-regulated in Transcription
  misc_feature: MA Experiment 20000453 PARAMETER Experiment Name: At_100uM_ABA_P Parameter: Age (day) Value: 15
  misc_feature: MA Experiment 20000453 PARAMETER Experiment Name: At_100uM_ABA_P Parameter: Organism Value: A. thaliana
  misc_feature: MA Experiment 20000453 PARAMETER Experiment Name: At_100uM_ABA_P Parameter: Plant Line Value: WS
  misc_feature: MA Experiment 20000453 PARAMETER Experiment Name: At_100uM_ABA_P Parameter: Timepoint (hr) Value: 24
  misc_feature: MA Experiment 20000453 PARAMETER Experiment Name: At_100uM_ABA_P Parameter: Tissue Value: Aerial
  misc_feature: MA Experiment 20000453 PARAMETER Experiment Name: At_100uM_ABA_P Parameter: Treatment Value: 100uM ABA vs. No Treatment
  misc_feature: MA Experiment ID: 20000574 Result: Up-regulated in Transcription
  misc_feature: MA Experiment 20000574 PARAMETER Experiment Name: At_100uM_ABA_Mutants__P Parameter: Organism Value: A. thaliana
  misc_feature: MA Experiment 20000574 PARAMETER Experiment Name: At_100uM_ABA_Mutants__P Parameter: Plant Line Value: CS23 vs. Ler wt
  misc_feature: MA Experiment 20000574 PARAMETER Experiment Name: At_100uM_ABA_Mutants__P Parameter: Timepoint (hr) Value: N/A
  misc_feature: MA Experiment 20000574 PARAMETER Experiment Name: At_100uM_ABA_Mutants__P Parameter: Tissue Value: Whole Plant
  misc_feature: MA Experiment 20000574 PARAMETER Experiment Name: At_100uM_ABA_Mutants__P Parameter: Treatment Value: None
  misc_feature: MA Experiment ID: 20000794 Result: Up-regulated in Transcription
  misc_feature: MA Experiment 20000794 PARAMETER Experiment Name: At_Petals_P Parameter: Age (day) Value: 23-25 days
  misc_feature: MA Experiment 20000794 PARAMETER Experiment Name: At_Petals_P Parameter: Plant Line Value: WS
  misc_feature: MA Experiment 20000794 PARAMETER Experiment Name: At_Petals_P Parameter: Tissue Value: Petals vs. Whole plant
  misc_feature: MA Experiment ID: 20001904 Result: Up-regulated in Transcription
  misc_feature: MA Experiment 20001904 PARAMETER Experiment Name: At_Drought_Reproduction_P Parameter: Age (day) Value: 37
  misc_feature: MA Experiment 20001904 PARAMETER Experiment Name: At_Drought_Reproduction_P Parameter: Organism Value: A. thaliana
  misc_feature: MA Experiment 20001904 PARAMETER Experiment Name: At_Drought_Reproduction_P Parameter: Plant Line Value: WS
  misc_feature: MA Experiment 20001904 PARAMETER Experiment Name: At_Drought_Reproduction_P Parameter: Timepoint (day) Value: 7
  misc_feature: MA Experiment 20001904 PARAMETER Experiment Name: At_Drought_Reproduction_P Parameter: Tissue Value: Rosettes
  misc_feature: MA Experiment 20001904 PARAMETER Experiment Name: At_Drought_Reproduction_P Parameter: Treatment Value: Drought vs. No Drought
  misc_feature: MA Experiment ID: 20001905 Result: Up-regulated in Transcription
  misc_feature: MA Experiment 20001905 PARAMETER Experiment Name: At_Drought_Reproduction_P Parameter: Age (day) Value: 40
  misc_feature: MA Experiment 20001905 PARAMETER Experiment Name: At_Drought_Reproduction_P Parameter: Organism Value: A. thaliana
  misc_feature: MA Experiment 20001905 PARAMETER Experiment Name: At_Drought_Reproduction_P Parameter: Plant Line Value: WS
  misc_feature: MA Experiment 20001905 PARAMETER Experiment Name: At_Drought_Reproduction_P Parameter: Timepoint (day) Value: 10
  misc_feature: MA Experiment 20001905 PARAMETER Experiment Name: At_Drought_Reproduction_P Parameter: Tissue Value: Rosettes
  misc_feature: MA Experiment 20001905 PARAMETER Experiment Name: At_Drought_Reproduction_P Parameter: Treatment Value: Drought vs. No Drought
  misc_feature: MA Experiment ID: 20001906 Result: Up-regulated in Transcription
  misc_feature: MA Experiment 20001906 PARAMETER Experiment Name: At_Drought_Reproduction_P Parameter: Age (day) Value: 35
  misc_feature: MA Experiment 20001906 PARAMETER Experiment Name: At_Drought_Reproduction_P Parameter: Organism Value: A. thaliana
  misc_feature: MA Experiment 20001906 PARAMETER Experiment Name: At_Drought_Reproduction_P Parameter: Plant Line Value: WS
  misc_feature: MA Experiment 20001906 PARAMETER Experiment Name: At_Drought_Reproduction_P Parameter: Timepoint (day) Value: 5
  misc_feature: MA Experiment 20001906 PARAMETER Experiment Name: At_Drought_Reproduction_P Parameter: Tissue Value: Siliques
  misc_feature: MA Experiment 20001906 PARAMETER Experiment Name: At_Drought_Reproduction_P Parameter: Treatment Value: Drought vs. No Drought
  misc_feature: MA Experiment ID: 20001908 Result: Up-regulated in Transcription
  misc_feature: MA Experiment 20001908 PARAMETER Experiment Name: At_Drought_Reproduction_P Parameter: Age (day) Value: 40
  misc_feature: MA Experiment 20001908 PARAMETER Experiment Name: At_Drought_Reproduction_P Parameter: Organism Value: A. thaliana
  misc_feature: MA Experiment 20001908 PARAMETER Experiment Name: At_Drought_Reproduction_P Parameter: Plant Line Value: WS
  misc_feature: MA Experiment 20001908 PARAMETER Experiment Name: At_Drought_Reproduction_P Parameter: Timepoint (day) Value: 10
  misc_feature: MA Experiment 20001908 PARAMETER Experiment Name: At_Drought_Reproduction_P Parameter: Tissue Value: Siliques
  misc_feature: MA Experiment 20001908 PARAMETER Experiment Name: At_Drought_Reproduction_P Parameter: Treatment Value: Drought vs. No Drought
acctttctagttcctctgcgtctccttaatctctctccctaacttctctttcacctttactctctctatctctcttacatatatctatatatattccctgaacccatctcttgaaaacattcaagatcaaatctttctcgatctattcaaagaaaaactatttaagaaacatatgttttggatcaagtaagggtttgatcttgtaccggaatcaggtttttgcttttcttctagggtttaaggttatttaaaaacagatggaaactttcggtgtgtttcacaaggaagatgatgagcagatggatttgcctcctggttttaggtttcatccaacagacgaagaactcataacccactatctccacaagaaggttcttgaccttggtttctcggctaaagctattggtgaggttgatttgaacaaagctgagccatgggagttgccatataaagcaaaaattggtgagaaagaatggtactttttctgtgtgagggatagaaagtatccgactggtctgaggactaaccgagcaactcaagccggttattggaaggcgacagggaaggataaagagatcttccgaggcaaatcgcttgttggtatgaagaaaacacttgttttctacagaggaagagctcctaaaggccagaaaacaaattgggtgatgcatgagtataggctagatggaaaactctctgctcacaacttgcctaaaaccgctaagaatgaatgggtgatctgcagggtatttcataaaactgctggaggtaagaagatcccgatttcgacgttaatccgaatcggttcttacggaaccgggtctagtttaccacctttaactgattcttcaccatacaacgacaaaaccaagaccgaaccagtttacgtgccctgcttctccaaccaagctgaaactagaggaacaatactcaattgcttcagcaacccttcccttagctccatccaaccagattttctccagatgattccactctaccaacctcaatctctcaacatttccgagagttccaatccggttcttacgcaagaacaatcagttttacaagcgatgatggaaaacaacagaaggcagaacttcaaaacattgagcatctcgcaagaaaccggggtttcgaacaccgataactcatcggtttttgaatttgggaggaagcgatttgatcatcaagaagttccatctccctcttccggtccggttgatcttgaacctttctggaattactgaagattcagaacctgaaaagtctattaatttaggtcacaagtaagaaaatctttgcaaagttttatccttttagcgtggtgtgctaagcttgtatagattattgacactacttcctgtattagtgttttatattattatattcaactaaagtt

SEQ ID NO: 105093 - protein, 329 aa, Arabidopsis thaliana; identical to SEQ ID NO: 23927
  peptide (1)..(329): Ceres Seq. ID no. 13616440
  misc_feature (17)..(143): Pfam Name: No apical meristem (NAM) protein Pfam Description: No apical meristem (NAM) protein
  misc_feature (1)..(329): Homolog of NCBI NO: 30682048 NR Description: NAM (no apical meristem)-related protein
  misc_feature (15)..(329): Homolog of NCBI NO: 30682054 NR Description: NAM (no apical meristem)-related protein
  misc_feature (1)..(329): Homolog of NCBI NO: 15240252 NR Description: NAM, no apical meristem, - like protein
  misc_feature (15)..(329): Homolog of NCBI NO: 21537315 NR Description: NAM, no apical meristem,-like protein

SEQ ID NO: 105094 - protein, 315 aa, Arabidopsis thaliana; identical to SEQ ID NO: 23928
  peptide (1)..(315): Ceres Seq. ID no. 13616441
  misc_feature (3)..(129): Pfam Name: No apical meristem (NAM) protein Pfam Description: No apical meristem (NAM) protein
  misc_feature (1)..(315): Homolog of NCBI NO: 30682048 NR Description: NAM (no apical meristem)-related protein
  misc_feature (1)..(315): Homolog of NCBI NO: 30682054 NR Description: NAM (no apical meristem)-related protein
  misc_feature (1)..(315): Homolog of NCBI NO: 15240252 NR Description: NAM, no apical meristem, - like protein
  misc_feature (1)..(315): Homolog of NCBI NO: 21537315 NR Description: NAM, no apical meristem,-like protein

SEQ ID NO: 105095 - protein, 214 aa, Arabidopsis thaliana; identical to SEQ ID NO: 23929
  peptide (1)..(214): Ceres Seq. ID no. 13616442
  misc_feature (1)..(214): Homolog of NCBI NO: 30682048 NR Description: NAM (no apical meristem)-related protein
  misc_feature (1)..(214): Homolog of NCBI NO: 30682054 NR Description: NAM (no apical meristem)-related protein
  misc_feature (1)..(214): Homolog of NCBI NO: 15240252 NR Description: NAM, no apical meristem, - like protein
  misc_feature (1)..(214): Homolog of NCBI NO: 21537315 NR Description: NAM, no apical meristem,-like protein

SEQ ID NO: 105096 - DNA, 1789 bp, Arabidopsis thaliana
  misc_feature (1)..(1789): Ceres Seq. ID no. 13616443
  misc_feature: MA Experiment ID: 108434 Result: Down-regulated in Transcription
  misc_feature: MA Experiment 108434 PARAMETER Experiment Name: At_Root_Tips_cDNA_P Parameter: Tissue Value: Root Tips
  misc_feature: MA Experiment ID: 108573 Result: Up-regulated in Transcription
  misc_feature: MA Experiment 108573 PARAMETER Experiment Name: At_Drought_cDNA_P Parameter: Timepoint (hr) Value: 6
  misc_feature: MA Experiment 108573 PARAMETER Experiment Name: At_Drought_cDNA_P Parameter: Tissue Value: Aerial
  misc_feature: MA Experiment 108573 PARAMETER Experiment Name: At_Drought_cDNA_P Parameter: Treatment Value: Drought vs. No Drought
  misc_feature: MA Experiment ID: 108609 Result: Up-regulated in Transcription
  misc_feature: MA Experiment 108609 PARAMETER Experiment Name: At_100uM_ABA_cDNA_P Parameter: Timepoint (hr) Value: 24
  misc_feature: MA Experiment 108609 PARAMETER Experiment Name: At_100uM_ABA_cDNA_P Parameter: Tissue Value: Aerial
  misc_feature: MA Experiment 108609 PARAMETER Experiment Name: At_100uM_ABA_cDNA_P Parameter: Treatment Value: 100uM ABA vs. No Treatment
  misc_feature: MA Experiment ID: 20000070 Result: Up-regulated in Transcription
  misc_feature: MA Experiment 20000070 PARAMETER Experiment Name: At_100uM_ABA_Mutants_cDNA_P Parameter: Plant Line Value: CS24
  misc_feature: MA Experiment 20000070 PARAMETER Experiment Name: At_100uM_ABA_Mutants_cDNA_P Parameter: Timepoint (hr) Value: 6
  misc_feature: MA Experiment 20000070 PARAMETER Experiment Name: At_100uM_ABA_Mutants_cDNA_P Parameter: Tissue Value: Aerial
  misc_feature: MA Experiment 20000070 PARAMETER Experiment Name: At_100uM_ABA_Mutants_cDNA_P Parameter: Treatment Value: 100uM ABA vs. No Treatment
  misc_feature: MA Experiment ID: 20000071 Result: Up-regulated in Transcription
  misc_feature: MA Experiment 20000071 PARAMETER Experiment Name: At_100uM_ABA_Mutants_cDNA_P Parameter: Plant Line Value: CS8104
  misc_feature: MA Experiment 20000071 PARAMETER Experiment Name: At_100uM_ABA_Mutants_cDNA_P Parameter: Timepoint (hr) Value: 6
  misc_feature: MA Experiment 20000071 PARAMETER Experiment Name: At_100uM_ABA_Mutants_cDNA_P Parameter: Tissue Value: Aerial
  misc_feature: MA Experiment 20000071 PARAMETER Experiment Name: At_100uM_ABA_Mutants_cDNA_P Parameter: Treatment Value: 100uM ABA vs. No Treatment
  misc_feature: MA Experiment ID: 20000072 Result: Up-regulated in Transcription
  misc_feature: MA Experiment 20000072 PARAMETER Experiment Name: At_100uM_ABA_Mutants_cDNA_P Parameter: Plant Line Value: CS8105
  misc_feature: MA Experiment 20000072 PARAMETER Experiment Name: At_100uM_ABA_Mutants_cDNA_P Parameter: Timepoint (hr) Value: 6
  misc_feature: MA Experiment 20000072 PARAMETER Experiment Name: At_100uM_ABA_Mutants_cDNA_P Parameter: Tissue Value: Aerial
  misc_feature: MA Experiment 20000072 PARAMETER Experiment Name: At_100uM_ABA_Mutants_cDNA_P Parameter: Treatment Value: 100uM ABA vs. No Treatment
  misc_feature: MA Experiment ID: 20000086 Result: Up-regulated in Transcription
  misc_feature: MA Experiment 20000086 PARAMETER Experiment Name: At_100uM_ABA_Mutants_cDNA_P Parameter: Plant Line Value: CS22
  misc_feature: MA Experiment 20000086 PARAMETER Experiment Name: At_100uM_ABA_Mutants_cDNA_P Parameter: Timepoint (hr) Value: 6
  misc_feature: MA Experiment 20000086 PARAMETER Experiment Name: At_100uM_ABA_Mutants_cDNA_P Parameter: Tissue Value: Aerial
  misc_feature: MA Experiment 20000086 PARAMETER Experiment Name: At_100uM_ABA_Mutants_cDNA_P Parameter: Treatment Value: 100uM ABA vs. No Treatment
  misc_feature: MA Experiment ID: 20000088 Result: Up-regulated in Transcription
  misc_feature: MA Experiment 20000088 PARAMETER Experiment Name: At_100uM_ABA_Mutants_cDNA_P Parameter: Plant Line Value: Landsberg
  misc_feature: MA Experiment 20000088 PARAMETER Experiment Name: At_100uM_ABA_Mutants_cDNA_P Parameter: Timepoint (hr) Value: 6
  misc_feature: MA Experiment 20000088 PARAMETER Experiment Name: At_100uM_ABA_Mutants_cDNA_P Parameter: Tissue Value: Aerial
  misc_feature: MA Experiment 20000088 PARAMETER Experiment Name: At_100uM_ABA_Mutants_cDNA_P Parameter: Treatment Value: 100uM ABA vs. No Treatment
  misc_feature: MA Experiment ID: 20000111 Result: Down-regulated in Transcription
  misc_feature: MA Experiment 20000111 PARAMETER Experiment Name: At_42deg_Heat_cDNA_P Parameter: Temperature (deg C) Value: 42 vs. 22
  misc_feature: MA Experiment 20000111 PARAMETER Experiment Name: At_42deg_Heat_cDNA_P Parameter: Timepoint (hr) Value: 6
  misc_feature: MA Experiment 20000111 PARAMETER Experiment Name: At_42deg_Heat_cDNA_P Parameter: Tissue Value: Aerial
  misc_feature: MA Experiment ID: 20000113 Result: Down-regulated in Transcription
  misc_feature: MA Experiment 20000113 PARAMETER Experiment Name: At_42deg_Heat_cDNA_P Parameter: Temperature (deg C) Value: 42 vs. 22
  misc_feature: MA Experiment 20000113 PARAMETER Experiment Name: At_42deg_Heat_cDNA_P Parameter: Timepoint (hr) Value: 8
  misc_feature: MA Experiment 20000113 PARAMETER Experiment Name: At_42deg_Heat_cDNA_P Parameter: Tissue Value: Aerial
  misc_feature: MA Experiment ID: 20000117 Result: Up-regulated in Transcription
  misc_feature: MA Experiment 20000117 PARAMETER Experiment Name: At_100uM_ABA_Mutants_cDNA_P Parameter: Plant Line Value: Columbia
  misc_feature: MA Experiment 20000117 PARAMETER Experiment Name: At_100uM_ABA_Mutants_cDNA_P Parameter: Timepoint (hr) Value: 6
  misc_feature: MA Experiment 20000117 PARAMETER Experiment Name: At_100uM_ABA_Mutants_cDNA_P Parameter: Tissue Value: Aerial
  misc_feature: MA Experiment 20000117 PARAMETER Experiment Name: At_100uM_ABA_Mutants_cDNA_P Parameter: Treatment Value: 100uM ABA vs. No Treatment
  misc_feature: MA Experiment ID: 20000179 Result: Up-regulated in Transcription
  misc_feature: MA Experiment 20000179 PARAMETER Experiment Name: At_Germinating_Seeds_P Parameter: Age (hr) Value: 6 vs. 0
  misc_feature: MA Experiment 20000179 PARAMETER Experiment Name: At_Germinating_Seeds_P Parameter: Tissue Value: Germinating Seeds
  misc_feature: MA Experiment ID: 20000436 Result: Up-regulated in Transcription
  misc_feature: MA Experiment 20000436 PARAMETER Experiment Name: At_Drought_P Parameter: Age (day) Value: 7
  misc_feature: MA Experiment 20000436 PARAMETER Experiment Name: At_Drought_P Parameter: Organism Value: A. thaliana
  misc_feature: MA Experiment 20000436 PARAMETER Experiment Name: At_Drought_P Parameter: Plant Line Value: WS
  misc_feature: MA Experiment 20000436 PARAMETER Experiment Name: At_Drought_P Parameter: Timepoint (hr) Value: 12
  misc_feature: MA Experiment 20000436 PARAMETER Experiment Name: At_Drought_P Parameter: Tissue Value: Whole Plant
  misc_feature: MA Experiment 20000436 PARAMETER Experiment Name: At_Drought_P Parameter: Treatment Value: Drought vs. No Drought
  misc_feature: MA Experiment ID: 20000437 Result: Up-regulated in Transcription
  misc_feature: MA Experiment 20000437 PARAMETER Experiment Name: At_Drought_P Parameter: Age (day) Value: 8
  misc_feature: MA Experiment 20000437 PARAMETER Experiment Name: At_Drought_P Parameter: Organism Value: A. thaliana
  misc_feature: MA Experiment 20000437 PARAMETER Experiment Name: At_Drought_P Parameter: Plant Line Value: WS
  misc_feature: MA Experiment 20000437 PARAMETER Experiment Name: At_Drought_P Parameter: Timepoint (hr) Value: 24
  misc_feature: MA Experiment 20000437 PARAMETER Experiment Name: At_Drought_P Parameter: Tissue Value: Whole Plant
  misc_feature: MA Experiment 20000437 PARAMETER Experiment Name: At_Drought_P Parameter: Treatment Value: Drought vs. No Drought
  misc_feature: MA Experiment ID: 20000453 Result: Up-regulated in Transcription
  misc_feature: MA Experiment 20000453 PARAMETER Experiment Name: At_100uM_ABA_P Parameter: Age (day) Value: 15
  misc_feature: MA Experiment 20000453 PARAMETER Experiment Name: At_100uM_ABA_P Parameter: Organism Value: A. thaliana
  misc_feature: MA Experiment 20000453 PARAMETER Experiment Name: At_100uM_ABA_P Parameter: Plant Line Value: WS
  misc_feature: MA Experiment 20000453 PARAMETER Experiment Name: At_100uM_ABA_P Parameter: Timepoint (hr) Value: 24
  misc_feature: MA Experiment 20000453 PARAMETER Experiment Name: At_100uM_ABA_P Parameter: Tissue Value: Aerial
  misc_feature: MA Experiment 20000453 PARAMETER Experiment Name: At_100uM_ABA_P Parameter: Treatment Value: 100uM ABA vs. No Treatment
  misc_feature: MA Experiment ID: 20000794 Result: Up-regulated in Transcription
  misc_feature: MA Experiment 20000794 PARAMETER Experiment Name: At_Petals_P Parameter: Age (day) Value: 23-25 days
  misc_feature: MA Experiment 20000794 PARAMETER Experiment Name: At_Petals_P Parameter: Plant Line Value: WS
  misc_feature: MA Experiment 20000794 PARAMETER Experiment Name: At_Petals_P Parameter: Tissue Value: Petals vs. Whole plant
  misc_feature: MA Experiment ID: 20001560 Result: Down-regulated in Transcription
  misc_feature: MA Experiment 20001560 PARAMETER Experiment Name: At_Drought_Soil_Dry_P Parameter: Age (day) Value: 28
  misc_feature: MA Experiment 20001560 PARAMETER Experiment Name: At_Drought_Soil_Dry_P Parameter: Organism Value: A. thaliana
  misc_feature: MA Experiment 20001560 PARAMETER Experiment Name: At_Drought_Soil_Dry_P Parameter: Plant Line Value: WS
  misc_feature: MA Experiment 20001560 PARAMETER Experiment Name: At_Drought_Soil_Dry_P Parameter: Post Timepoint (hr) Value: None
  misc_feature: MA Experiment 20001560 PARAMETER Experiment Name: At_Drought_Soil_Dry_P Parameter: Post-Treatment Value: None
  misc_feature: MA Experiment 20001560 PARAMETER Experiment Name: At_Drought_Soil_Dry_P Parameter: Timepoint (day) Value: 14
  misc_feature: MA Experiment 20001560 PARAMETER Experiment Name: At_Drought_Soil_Dry_P Parameter: Treatment Value: Drought vs. No Drought
  misc_feature: MA Experiment ID: 20001905 Result: Down-regulated in Transcription
  misc_feature: MA Experiment 20001905 PARAMETER Experiment Name: At_Drought_Reproduction_P Parameter: Age (day) Value: 40
  misc_feature: MA Experiment 20001905 PARAMETER Experiment Name: At_Drought_Reproduction_P Parameter: Organism Value: A. thaliana
  misc_feature: MA Experiment 20001905 PARAMETER Experiment Name: At_Drought_Reproduction_P Parameter: Plant Line Value: WS
  misc_feature: MA Experiment 20001905 PARAMETER Experiment Name: At_Drought_Reproduction_P Parameter: Timepoint (day) Value: 10
  misc_feature: MA Experiment 20001905 PARAMETER Experiment Name: At_Drought_Reproduction_P Parameter: Tissue Value: Rosettes
  misc_feature: MA Experiment 20001905 PARAMETER Experiment Name: At_Drought_Reproduction_P Parameter: Treatment Value: Drought vs. No Drought
aggaaagttatcaaaagttttgagagctttggatagtgaagctcaaagaactaaacaatgggcttcagagtttgtgttattgtcgtcttcttgggttgtcttcttctagtccctgagaaaacaatggctcaagaaatgaaacgtgcatcgatcgttatccaaggagctcgacgagtttgtgagaccgatgagaactttgtctgtgcgacattggactggtggcctcatgacaagtgcaactatgaccaatgtccttggggttactcttcagttatcaatatggatttaacgcgtccccttcttactaaagctattaaagctttcaagccgttgaggataagaattggtggttcgctgcaagatcaagttatttacgacgtaggaaatctcaaaactccttgccgtccattccaaaaaatgaacagcggtttgtttggattctctaaaggatgcttgcacatgaaacgatgggacgagctcaacagtttcctaaccgcaaccggagcggtagtgacattcggtttaaacgctttgcgtgggagacacaaactccgcggaaaggcgtggggtggtgcatgggatcacataaacactcaagatttcttaaactacacagtctcgaagggttacgttattgattcttgggaattcggaaacgagctgagtggaagcggagttggtgcgagcgtgagcgcagagctttacgggaaagacttgattgtacttaaagatgtaatcaacaaagtttataaaaattcttggttacacaagcctatacttgtcgctcctggagggttctatgaacaacaatggtacaccaaacttcttgaaatttccggtcctagtgttgtcgacgttgtgactcatcatatatacaatcttggttcaggaaatgatcccgcgctggtgaagaagataatggatccgagttatttaagccaggtatcaaaaacattcaaggacgtgaaccagacgattcaagaacatggaccgtgggcttctccttgggttggagaatctggtggagcttacaatagtggtggccgtcatgtttctgacacattcatagatagcttctggtatctagatcagcttggaatgtcagcgagacacaacactaaagtttactgcagacagactttggttggagggttttacggcttgctcgaaaagggaacgtttgttccaaatcctgattactatagcgcgctgctttggcatcgtttaatgggaaaaggggttcttgcggtgcagacagatggaccgccacagctacgggtttacgcacattgttcaaaaggaagagccggtgtgacattgctactgataaatctaagcaatcaatcggattttacggttagtgtcagcaatggcataaacgtggttttgaatgcggaatcaaggaagaagaagtcattgttggatactttaaaaagaccattttcttggattggaagcaaagcttctgatggatatttgaatagagaagagtatcatctgacaccagaaaacggtgtgttgcgcagcaaaacaatggtcttgaatggtaaatcgttaaaaccgacggcaacaggagatatcccgagccttgaaccggtcctccgtagtgtgaactctccgcttaatgtcttgccattgtcgatgtcgttcattgtgttacctaattttgatgcttctgcttgttcatgatgttaatggggtctctctttgcttattgggaaaaaataaataaaaataaagaatagttgtaatttttttggtaattgtatctaatgctggtgataaatgt

SEQ ID NO: 105097 - protein, 543 aa, Arabidopsis thaliana
  peptide (1)..(543): Ceres Seq. ID no. 13616444
  misc_feature (27)..(347): Pfam Name: Glycosyl hydrolase family 79, N-terminal domain Pfam Description: Glycosyl hydrolase family 79, N-terminal domain
  misc_feature (1)..(543): Homolog of NCBI NO: 10176717 NR Description: contains similarity to heparanase~gene_id:MXM12.7
  misc_feature (23)..(543): Homolog of NCBI NO: 15240869 NR Description: glycosyl hydrolase family 79 (endo-beta-
  misc_feature (1)..(543): Homolog of NCBI NO: 22327999 NR Description: glycosyl hydrolase family 79 (endo-beta-
  misc_feature (27)..(543): Homolog of NCBI NO: 9757846 NR Description: contains similarity to heparanase~gene_id:MFB13.2
  misc_feature (4)..(542): Homolog of NCBI NO: 38174813 NR Description: putative heparanase [Hordeum vulgare subsp.
  misc_feature (7)..(439): Homolog of NCBI NO: 34393590 NR Description: putative beta-glucuronidase precursor [Oryza
  misc_feature (476)..(543): Homolog of NCBI NO: 34393590 NR Description: putative beta-glucuronidase precursor [Oryza
  misc_feature (76)..(543): Homolog of NCBI NO: 24413987 NR Description: contains ESTs
  misc_feature (11)..(75): Homolog of NCBI NO: 24413987 NR Description: contains ESTs
  misc_feature (1)..(543): Homolog of NCBI NO: 30692670 NR Description: expressed protein [Arabidopsis thaliana]
MGFRVCVIVVFLGCLLLVPEKTMAQEMKRASIVIQGARRVCETDENFVCATLDWWPHDKCNYDQCPWGYSSVINMDLTRPLLTKAIKAFKPLRIRIGGSLQDQVIYDVGNLKTPCRPFQKMNSGLFGFSKGCLHMKRWDELNSFLTATGAVVTFGLNALRGRHKLRGKAWGGAWDHINTQDFLNYTVSKGYVIDSWEFGNELSGSGVGASVSAELYGKDLIVLKDVINKVYKNSWLHKPILVAPGGFYEQQWYTKLLEISGPSVVDVVTHHIYNLGSGNDPALVKKIMDPSYLSQVSKTFKDVNQTIQEHGPWASPWVGESGGAYNSGGRHVSDTFIDSFWYLDQLGMSARHNTKVYCRQTLVGGFYGLLEKGTFVPNPDYYSALLWHRLMGKGVLAVQTDGPPQLRVYAHCSKGRAGVTLLLINLSNQSDFTVSVSNGINVVLNAESRKKKSLLDTLKRPFSWIGSKASDGYLNREEYHLTPENGVLRSKTMVLNGKSLKPTATGDIPSLEPVLRSVNSPLNVLPLSMSFIVLPNFDASACS

SEQ ID NO: 105098 - protein, 521 aa, Arabidopsis thaliana
  peptide (1)..(521): Ceres Seq. ID no. 13616445
  misc_feature (5)..(325): Pfam Name: Glycosyl hydrolase family 79, N-terminal domain Pfam Description: Glycosyl hydrolase family 79, N-terminal domain
  misc_feature (1)..(521): Homolog of NCBI NO: 10176717 NR Description: contains similarity to heparanase~gene_id:MXM12.7
  misc_feature (1)..(521): Homolog of NCBI NO: 15240869 NR Description: glycosyl hydrolase family 79 (endo-beta-
  misc_feature (1)..(521): Homolog of NCBI NO: 22327999 NR Description: glycosyl hydrolase family 79 (endo-beta-
  misc_feature (5)..(521): Homolog of NCBI NO: 9757846 NR Description: contains similarity to heparanase~gene_id:MFB13.2
  misc_feature (1)..(520): Homolog of NCBI NO: 38174813 NR Description: putative heparanase [Hordeum vulgare subsp.
  misc_feature (1)..(417): Homolog of NCBI NO: 34393590 NR Description: putative beta-glucuronidase precursor [Oryza
  misc_feature (454)..(521): Homolog of NCBI NO: 34393590 NR Description: putative beta-glucuronidase precursor [Oryza
  misc_feature (54)..(521): Homolog of NCBI NO: 24413987 NR Description: contains ESTs
  misc_feature (1)..(53): Homolog of NCBI NO: 24413987 NR Description: contains ESTs
  misc_feature (1)..(521): Homolog of NCBI NO: 30692670 NR Description: expressed protein [Arabidopsis thaliana]
MAQEMKRASIVIQGARRVCETDENFVCATLDWWPHDKCNYDQCPWGYSSVINMDLTRPLLTKAIKAFKPLRIRIGGSLQDQVIYDVGNLKTPCRPFQKMNSGLFGFSKGCLHMKRWDELNSFLTATGAVVTFGLNALRGRHKLRGKAWGGAWDHINTQDFLNYTVSKGYVIDSWEFGNELSGSGVGASVSAELYGKDLIVLKDVINKVYKNSWLHKPILVAPGGFYEQQWYTKLLEISGPSVVDVVTHHIYNLGSGNDPALVKKIMDPSYLSQVSKTFKDVNQTIQEHGPWASPWVGESGGAYNSGGRHVSDTFIDSFWYLDQLGMSARHNTKVYCRQTLVGGFYGLLEKGTFVPNPDYYSALLWHRLMGKGVLAVQTDGPPQLRVYAHCSKGRAGVTLLLINLSNQSDFTVSVSNGINVVLNAESRKKKSLLDTLKRPFSWIGSKASDGYLNREEYHLTPENGVLRSKTMVLNGKSLKPTATGDIPSLEPVLRSVNSPLNVLPLSMSFIVLPNFDASACS

SEQ ID NO: 105099 - protein, 517 aa, Arabidopsis thaliana
  peptide (1)..(517): Ceres Seq. ID no. 13616446
  misc_feature (1)..(321): Pfam Name: Glycosyl hydrolase family 79, N-terminal domain Pfam Description: Glycosyl hydrolase family 79, N-terminal domain
  misc_feature (1)..(517): Homolog of NCBI NO: 10176717 NR Description: contains similarity to heparanase~gene_id:MXM12.7
  misc_feature (1)..(517): Homolog of NCBI NO: 15240869 NR Description: glycosyl hydrolase family 79 (endo-beta-
  misc_feature (1)..(517): Homolog of NCBI NO: 22327999 NR Description: glycosyl hydrolase family 79 (endo-beta-
  misc_feature (1)..(517): Homolog of NCBI NO: 9757846 NR Description: contains similarity to heparanase~gene_id:MFB13.2
  misc_feature (1)..(516): Homolog of NCBI NO: 38174813 NR Description: putative heparanase [Hordeum vulgare subsp.
  misc_feature (1)..(413): Homolog of NCBI NO: 34393590 NR Description: putative beta-glucuronidase precursor [Oryza
  misc_feature (450)..(517): Homolog of NCBI NO: 34393590 NR Description: putative beta-glucuronidase precursor [Oryza
  misc_feature (50)..(517): Homolog of NCBI NO: 24413987 NR Description: contains ESTs
  misc_feature (1)..(49): Homolog of NCBI NO: 24413987 NR Description: contains ESTs
  misc_feature (1)..(517): Homolog of NCBI NO: 30692670 NR Description: expressed protein [Arabidopsis thaliana]
MKRASIVIQGARRVCETDENFVCATLDWWPHDKCNYDQCPWGYSSVINMDLTRPLLTKAIKAFKPLRIRIGGSLQDQVIYDVGNLKTPCRPFQKMNSGLFGFSKGCLHMKRWDELNSFLTATGAVVTFGLNALRGRHKLRGKAWGGAWDHINTQDFLNYTVSKGYVIDSWEFGNELSGSGVGASVSAELYGKDLIVLKDVINKVYKNSWLHKPILVAPGGFYEQQWYTKLLEISGPSVVDVVTHHIYNLGSGNDPALVKKIMDPSYLSQVSKTFKDVNQTIQEHGPWASPWVGESGGAYNSGGRHVSDTFIDSFWYLDQLGMSARHNTKVYCRQTLVGGFYGLLEKGTFVPNPDYYSALLWHRLMGKGVLAVQTDGPPQLRVYAHCSKGRAGVTLLLINLSNQSDFTVSVSNGINVVLNAESRKKKSLLDTLKRPFSWIGSKASDGYLNREEYHLTPENGVLRSKTMVLNGKSLKPTATGDIPSLEPVLRSVNSPLNVLPLSMSFIVLPNFDASACS

SEQ ID NO: 105100 - DNA, 833 bp, Arabidopsis thaliana
  misc_feature (1)..(833): Ceres Seq. ID no. 13616447
  misc_feature: MA Experiment ID: 20000185 Result: Down-regulated in Transcription
  misc_feature: MA Experiment 20000185 PARAMETER Experiment Name: At_Roots__P Parameter: Age (day) Value: 7 vs. 21
  misc_feature: MA Experiment 20000185 PARAMETER Experiment Name: At_Roots__P Parameter: Organism Value: A. thaliana
  misc_feature: MA Experiment 20000185 PARAMETER Experiment Name: At_Roots__P Parameter: Tissue Value: Roots vs. Whole Plant
  misc_feature: MA Experiment ID: 20000265 Result: Up-regulated in Transcription
  misc_feature: MA Experiment 20000265 PARAMETER Experiment Name: At_Open_Flower_P Parameter: Age (day) Value: 21
  misc_feature: MA Experiment 20000265 PARAMETER Experiment Name: At_Open_Flower_P Parameter: Plant Line Value: WS
  misc_feature: MA Experiment 20000265 PARAMETER Experiment Name: At_Open_Flower_P Parameter: Tissue Value: Closed Flower vs. Whole Plant
  misc_feature: MA Experiment ID: 20000286 Result: Up-regulated in Transcription
  misc_feature: MA Experiment 20000286 PARAMETER Experiment Name: At_Open_Flower_P Parameter: Age (day) Value: 21
  misc_feature: MA Experiment 20000286 PARAMETER Experiment Name: At_Open_Flower_P Parameter: Plant Line Value: WS
  misc_feature: MA Experiment 20000286 PARAMETER Experiment Name: At_Open_Flower_P Parameter: Tissue Value: Half Open vs. Whole Plant
  misc_feature: MA Experiment ID: 20000439 Result: Down-regulated in Transcription
  misc_feature: MA Experiment 20000439 PARAMETER Experiment Name: At_Roots__P Parameter: Age (day) Value: 14 vs. 21
  misc_feature: MA Experiment 20000439 PARAMETER Experiment Name: At_Roots__P Parameter: Organism Value: A. thaliana
  misc_feature: MA Experiment 20000439 PARAMETER Experiment Name: At_Roots__P Parameter: Tissue Value: Roots vs. Whole Plant
  misc_feature: MA Experiment ID: 20000495 Result: Up-regulated in Transcription
  misc_feature: MA Experiment 20000495 PARAMETER Experiment Name: At_Guard_Cells_P Parameter: Harvest Date Value: 8/2/2002
  misc_feature: MA Experiment 20000495 PARAMETER Experiment Name: At_Guard_Cells_P Parameter: Organism Value: A. thaliana
  misc_feature: MA Experiment 20000495 PARAMETER Experiment Name: At_Guard_Cells_P Parameter: Tissue Value: Guard Cells vs. Leaves
  misc_feature: MA Experiment ID: 20000794 Result: Down-regulated in Transcription
  misc_feature: MA Experiment 20000794 PARAMETER Experiment Name: At_Petals_P Parameter: Age (day) Value: 23-25 days
  misc_feature: MA Experiment 20000794 PARAMETER Experiment Name: At_Petals_P Parameter: Plant Line Value: WS
  misc_feature: MA Experiment 20000794 PARAMETER Experiment Name: At_Petals_P Parameter: Tissue Value: Petals vs. Whole plant
  misc_feature: MA Experiment ID: 20001247 Result: Down-regulated in Transcription
  misc_feature: MA Experiment 20001247 PARAMETER Experiment Name: At_Far-red-induction_P Parameter: Age (day) Value: 7
  misc_feature: MA Experiment 20001247 PARAMETER Experiment Name: At_Far-red-induction_P Parameter: Light Value: Far-red vs. White
  misc_feature: MA Experiment 20001247 PARAMETER Experiment Name: At_Far-red-induction_P Parameter: Organism Value: A. thaliana
  misc_feature: MA Experiment 20001247 PARAMETER Experiment Name: At_Far-red-induction_P Parameter: Plant Line Value: Columbia
  misc_feature: MA Experiment 20001247 PARAMETER Experiment Name: At_Far-red-induction_P Parameter: Timepoint (hr) Value: 1
  misc_feature: MA Experiment 20001247 PARAMETER Experiment Name: At_Far-red-induction_P Parameter: Tissue Value: Whole Plant
  misc_feature: MA Experiment ID: 20001555 Result: Down-regulated in Transcription
  misc_feature: MA Experiment 20001555 PARAMETER Experiment Name: At_Drought_Soil_Dry_P Parameter: Age (day) Value: 24
  misc_feature: MA Experiment 20001555 PARAMETER Experiment Name: At_Drought_Soil_Dry_P Parameter: Organism Value: A. thaliana
  misc_feature: MA Experiment 20001555 PARAMETER Experiment Name: At_Drought_Soil_Dry_P Parameter: Plant Line Value: WS
  misc_feature: MA Experiment 20001555 PARAMETER Experiment Name: At_Drought_Soil_Dry_P Parameter: Post Timepoint (hr) Value: None
  misc_feature: MA Experiment 20001555 PARAMETER Experiment Name: At_Drought_Soil_Dry_P Parameter: Post-Treatment Value: None
  misc_feature: MA Experiment 20001555 PARAMETER Experiment Name: At_Drought_Soil_Dry_P Parameter: Timepoint (day) Value: 10
  misc_feature: MA Experiment 20001555 PARAMETER Experiment Name: At_Drought_Soil_Dry_P Parameter: Treatment Value: Drought vs. No Drought
  misc_feature: MA Experiment ID: 20001560 Result: Up-regulated in Transcription
  misc_feature: MA Experiment 20001560 PARAMETER Experiment Name: At_Drought_Soil_Dry_P Parameter: Age (day) Value: 28
  misc_feature: MA Experiment 20001560 PARAMETER Experiment Name: At_Drought_Soil_Dry_P Parameter: Organism Value: A. thaliana
  misc_feature: MA Experiment 20001560 PARAMETER Experiment Name: At_Drought_Soil_Dry_P Parameter: Plant Line Value: WS
  misc_feature: MA Experiment 20001560 PARAMETER Experiment Name: At_Drought_Soil_Dry_P Parameter: Post Timepoint (hr) Value: None
  misc_feature: MA Experiment 20001560 PARAMETER Experiment Name: At_Drought_Soil_Dry_P Parameter: Post-Treatment Value: None
  misc_feature: MA Experiment 20001560 PARAMETER Experiment Name: At_Drought_Soil_Dry_P Parameter: Timepoint (day) Value: 14
  misc_feature: MA Experiment 20001560 PARAMETER Experiment Name: At_Drought_Soil_Dry_P Parameter: Treatment Value: Drought vs. No Drought
ctaaaagttatcagaatagaaatctctctctctcaacaagtctaacagtgccatttgtatctctgaactccaaccatggctcctctggttctctaccttctcactctcctcatggctggccataccagtgcctcatggtgtgtgtgcaaaacagggctgagtgactcagtgctacaaaagacattagactatgcttgtggaaatggagctgactgtaacccaactcacccaaaaggctcttgcttcaatcctgacaatgttagggctcattgcaactatgcagtcaatagcttcttccaaaagaaaggtcaagcttctgagtcttgtaacttcactggtactgccactcttaccaccaccgatcccagctatacaggatgtgcattcccttctagtgctagtggttctagtggaagcggtagcaccaccgtgacgccaggcaaaaacagtccaaaaggaagcaacagcatcaccacatttcccggcggaaacagtccatactctggcacaccatccaccggcttattaggaggcaatatcactgatgctactggaaccgggttgaacccggattactcaaccgaaagcagtggatttgcgctctattactccaacaaccttctgttaaccggcttttgttctctcgtgatgatgctctgaactgaagaagaatcactgtcttcttttagtttatgcttagtcaaaaaatatgttatttatatgttcttgttgttttagagataatttaatctggatttcggttcttttttactttccggttttaagaaaacacttatcaatgtaaaaccaaatctactatcgatcggtttggt

SEQ ID NO: 105101 - protein, 194 aa, Arabidopsis thaliana; identical to SEQ ID NO: 22354
  peptide (1)..(194): Ceres Seq. ID no. 13616448
  misc_feature (1)..(194): Homolog of NCBI NO: 15241485 NR Description: glycosyl hydrolase family 17 [Arabidopsis
  misc_feature (1)..(194): Homolog of NCBI NO: 21592859 NR Description: unknown [Arabidopsis thaliana]
  misc_feature (1)..(193): Homolog of NCBI NO: 30697478 NR Description: glycosyl hydrolase family 17 [Arabidopsis >gi|9759459|dbj|BAB10375.1| to unknown protein [Arabidopsis thaliana]
  misc_feature (1)..(176): Homolog of NCBI NO: 18394637 NR Description: glycosyl hydrolase family 17 [Arabidopsis
  misc_feature (1)..(192): Homolog of NCBI NO: 22775658 NR Description: contains ESTs
  misc_feature (1)..(186): Homolog of NCBI NO: 30683485 NR Description: expressed protein [Arabidopsis thaliana] unknown protein [Arabidopsis thaliana]
  misc_feature (1)..(186): Homolog of NCBI NO: 18409239 NR Description: expressed protein [Arabidopsis thaliana] unknown protein [Arabidopsis thaliana] At1g69290/F23O10_12 [Arabidopsis thaliana]
  misc_feature (5)..(109): Homolog of NCBI NO: 21326118 NR Description: putative expressed protein [Sorghum bicolor]
  misc_feature (1)..(186): Homolog of NCBI NO: 21553768 NR Description: unknown [Arabidopsis thaliana]
  misc_feature (1)..(186): Homolog of NCBI NO: 25404810 NR Description: unknown protein, 45065-49536 [imported] -

SEQ ID NO: 105102 - protein, 182 aa, Arabidopsis thaliana; identical to SEQ ID NO: 22355
  peptide (1)..(182): Ceres Seq. ID no. 13616449
  misc_feature (1)..(182): Homolog of NCBI NO: 15241485 NR Description: glycosyl hydrolase family 17 [Arabidopsis
  misc_feature (1)..(182): Homolog of NCBI NO: 21592859 NR Description: unknown [Arabidopsis thaliana]
  misc_feature (1)..(181): Homolog of NCBI NO: 30697478 NR Description: glycosyl hydrolase family 17 [Arabidopsis >gi|9759459|dbj|BAB10375.1| to unknown protein [Arabidopsis thaliana]
  misc_feature (1)..(164): Homolog of NCBI NO: 18394637 NR Description: glycosyl hydrolase family 17 [Arabidopsis
  misc_feature (1)..(180): Homolog of NCBI NO: 22775658 NR Description: contains ESTs
  misc_feature (1)..(174): Homolog of NCBI NO: 30683485 NR Description: expressed protein [Arabidopsis thaliana] unknown protein [Arabidopsis thaliana]
  misc_feature (1)..(174): Homolog of NCBI NO: 18409239 NR Description: expressed protein [Arabidopsis thaliana] unknown protein [Arabidopsis thaliana] At1g69290/F23O10_12 [Arabidopsis thaliana]
  misc_feature (1)..(97): Homolog of NCBI NO: 21326118 NR Description: putative expressed protein [Sorghum bicolor]
  misc_feature (1)..(174): Homolog of NCBI NO: 21553768 NR Description: unknown [Arabidopsis thaliana]
  misc_feature (1)..(174): Homolog of NCBI NO: 25404810 NR Description: unknown protein, 45065-49536 [imported] -

SEQ ID NO: 105103 - DNA, 695 bp, Arabidopsis thaliana
  misc_feature (1)..(695): Ceres Seq. ID no. 13616450
  misc_feature: MA Experiment ID: 108434 Result: Up-regulated in Transcription
  misc_feature: MA Experiment 108434 PARAMETER Experiment Name: At_Root_Tips_cDNA_P Parameter: Tissue Value: Root Tips
  misc_feature: MA Experiment ID: 108488 Result: Down-regulated in Transcription
  misc_feature: MA Experiment ID: 108595 Result: Down-regulated in Transcription
  misc_feature: MA Experiment 108595 PARAMETER Experiment Name: At_Ler-pi_Ovule_cDNA_P Parameter: Plant Line Value: null
  misc_feature: MA Experiment ID: 20000113 Result: Up-regulated in Transcription
  misc_feature: MA Experiment 20000113 PARAMETER Experiment Name: At_42deg_Heat_cDNA_P Parameter: Temperature (deg C) Value: 42 vs. 22
  misc_feature: MA Experiment 20000113 PARAMETER Experiment Name: At_42deg_Heat_cDNA_P Parameter: Timepoint (hr) Value: 8
  misc_feature: MA Experiment 20000113 PARAMETER Experiment Name: At_42deg_Heat_cDNA_P Parameter: Tissue Value: Aerial
cggtttaataatccttcgatttcgattcgaactttggtttcatctccccaaatcgaagcgaaggtctctcaacaatggcgaaatcagtgtcgacggcggcttcctcgcttgtgcaaaaccttaggcggtacatcaagaagccatggcagatcaccggaccttgcgctcacccagaatacctcgaagctgttccaaaggcgacggagtatcgtctccgatgccccgctacgattgatgaagaagcaatcgtgccttcctcggatccagagaccgtatacaacatcgtataccacggcagagatcagcgcagaaaccgcccaccgatccggcgatacgtattgacgaaggacaacgtggttcagatgatgaacgagaagaagagttttgacgtctcggacttccctaaggtttacttgaccaccacagtcgaggaggatttggatacgcgtggtggaggctacgagaaataatcaggttttttgctcatctcgtctttctcttgtaacgtactgatgggggaaagactgcgcgtgacacatctctaccgacaaaaaatatctcccttgtttgattattcaataagatatctagtagctttatgaactacaaaacacttcattttccttcacaagaaacagattgttgttcagttgtattccctatctttatgatgaacccgtgatcgtgattgtttc

SEQ ID NO: 105104 - protein, 131 aa, Arabidopsis thaliana; identical to SEQ ID NO: 26292
  peptide (1)..(131): Ceres Seq. ID no. 13616451
  misc_feature (1)..(131): Homolog of NCBI NO: 15241510 NR Description: expressed protein [Arabidopsis thaliana]
  misc_feature (1)..(131): Homolog of NCBI NO: 21592443 NR Description: unknown [Arabidopsis thaliana]
  misc_feature (1)..(131): Homolog of NCBI NO: 34909786 NR Description: P0512C01.35 [Oryza sativa (japonica

SEQ ID NO: 105105 - protein, 113 aa, Arabidopsis thaliana
  peptide (1)..(113): Ceres Seq. ID no. 13616452
RFNNPSISIRTLVSSPQIEAKVSQQWRNQCRRRLPRLCKTLGGTSRSHGRSPDLALTQNTSKLFQRRRSIVSDAPLRLMKKQSCLPRIQRPYTTSYTTAEISAETAHRSGDTY

SEQ ID NO: 105106 - DNA, 1335 bp, Arabidopsis thaliana
  misc_feature (1)..(1335): Ceres Seq. ID no. 13616453
  misc_feature: MA Experiment ID: 20000180 Result: Up-regulated in Transcription
  misc_feature: MA Experiment 20000180 PARAMETER Experiment Name: At_Germinating_Seeds_P Parameter: Age (hr) Value: 24 vs. 0
  misc_feature: MA Experiment 20000180 PARAMETER Experiment Name: At_Germinating_Seeds_P Parameter: Tissue Value: Germinating Seeds
  misc_feature: MA Experiment ID: 20000224 Result: Up-regulated in Transcription
aaacgaatttttttaaagaaaataaaaatcaagtctttctcttcgtctatctctctctctgctcagactctctggtgttgaagactaatcactgaagcagatctattatacggaggacgaagaagatgtatgagcagcagcaacatttcatggatttgcaaagcgattctgggtttggggacgatagctcctggctcgccggcgatgacgatcttcgtctctctcctcaccaatctgccgccggtacgaactccggcaatgagaatctagatcgtcgtctcttaaaagatctcgtcgagatggttccccttatcgagcattacatggaacataaagaaaggagttcgtttaagcggcgtggttccatgatctacactaagatgccttcaaaagaatccttgtcccgaaggggaagaaatgcttctcaaacagtcccaggaagaaagaagagagaccaagagggaaatgacgatgttatgaacaattctagggaagatgatgaaaacgcaaaggctttggctggtgcagaaaaggaagaaatgagtagactaagagagcaagtgaatgacttgcagacaaaattatcggagaaagaagaggttttaaagtcaatggagatgtcaaagaatcaggtaaacgagatacaagaaaagcttgaagcaacaaatcgattggttgctgagaaggatatgttgatcaagtctatgcagttacaattatcggacacaaagatcaaacttgctgacaagcaagcagcccttgagaagactcaatgggaagcaaagacaacaggaacaagagcaatcaagcttcaagaacagctagatgctgttgaaggagacatctctacattcacacgggtgttcgaaactttggcaaaaactgattccaagaaacccgatagggattatgatgcagtcccatatgaatttgatcatcttccatatttagacgatgtagatgaaactgacctgaggaaaatggaagaagcaagattagcttatgtagcagcagtgaataccgcaaaggaacgagaagatgaagaatctctggtcatggctgctcaagctcgagcttacctgcaatcactagcctttacatattaatcatcttcaggtacttacttctttataggatatttctctccttgggttgttttaggagtatgtagatttgtaccatgaagaaattggagaagaaaagcttatgtgagaaacataaagttatggttttcccctaaaccaatgaacgcaactctgagtttttgtttcttcatttgagcatgtatgtatctatatgatcttctacattattgggaacataaaatcagattgt

SEQ ID NO: 105107 - protein, 326 aa, Arabidopsis thaliana; identical to SEQ ID NO: 27481
  peptide (1)..(326): Ceres Seq. ID no. 13616454
  misc_feature (1)..(318): Pfam Name: Myosin tail Pfam Description: Myosin tail
  misc_feature (1)..(326): Homolog of NCBI NO: 15241531 NR Description: myosin heavy chain-related protein [Arabidopsis
  misc_feature (118)..(326): Homolog of NCBI NO: 1732515 NR Description: myosin heavy chain-like protein [Arabidopsis
  misc_feature (9)..(322): Homolog of NCBI NO: 19716176 NR Description: TMV-MP30 binding protein 2C [Nicotiana tabacum]

SEQ ID NO: 105108 - protein, 318 aa, Arabidopsis thaliana; identical to SEQ ID NO: 27482
  peptide (1)..(318): Ceres Seq. ID no. 13616455
  misc_feature (1)..(310): Pfam Name: Myosin tail Pfam Description: Myosin tail
  misc_feature (1)..(318): Homolog of NCBI NO: 15241531 NR Description: myosin heavy chain-related protein [Arabidopsis
  misc_feature (110)..(318): Homolog of NCBI NO: 1732515 NR Description: myosin heavy chain-like protein [Arabidopsis
  misc_feature (1)..(314): Homolog of NCBI NO: 19716176 NR Description: TMV-MP30 binding protein 2C [Nicotiana tabacum]

SEQ ID NO: 105109 - protein, 268 aa, Arabidopsis thaliana; identical to SEQ ID NO: 27483
  peptide (1)..(268): Ceres Seq. ID no. 13616456
  misc_feature (1)..(260): Pfam Name: Myosin tail Pfam Description: Myosin tail
  misc_feature (1)..(268): Homolog of NCBI NO: 15241531 NR Description: myosin heavy chain-related protein [Arabidopsis
  misc_feature (60)..(268): Homolog of NCBI NO: 1732515 NR Description: myosin heavy chain-like protein [Arabidopsis
  misc_feature (1)..(264): Homolog of NCBI NO: 19716176 NR Description: TMV-MP30 binding protein 2C [Nicotiana tabacum]

SEQ ID NO: 105110 - DNA, 1631 bp, Arabidopsis thaliana
  misc_feature (1)..(1631): Ceres Seq. ID no. 13616457
  misc_feature: MA Experiment ID: 108435 Result: Up-regulated in Transcription
  misc_feature: MA Experiment 108435 PARAMETER Experiment Name: At_stm_Mutants_cDNA_P Parameter: Plant Line Value: wt Landsburg vs stm
  misc_feature: MA Experiment 108435 PARAMETER Experiment Name: At_stm_Mutants_cDNA_P Parameter: Tissue Value: Shoot Apical Meristem Region
  misc_feature: MA Experiment ID: 108462 Result: Down-regulated in Transcription
  misc_feature: MA Experiment 108462 PARAMETER Experiment Name: At_Germinating_Seeds_cDNA_P Parameter: Age (day) Value: 2 vs. 0
  misc_feature: MA Experiment 108462 PARAMETER Experiment Name: At_Germinating_Seeds_cDNA_P Parameter: Tissue Value: Germinating Seeds
  misc_feature: MA Experiment ID: 108463 Result: Down-regulated in Transcription
  misc_feature: MA Experiment 108463 PARAMETER Experiment Name: At_Germinating_Seeds_cDNA_P Parameter: Age (day) Value: 3 vs. 0
  misc_feature: MA Experiment 108463 PARAMETER Experiment Name: At_Germinating_Seeds_cDNA_P Parameter: Tissue Value: Germinating Seeds
  misc_feature: MA Experiment ID: 108464 Result: Down-regulated in Transcription
  misc_feature: MA Experiment 108464 PARAMETER Experiment Name: At_Germinating_Seeds_cDNA_P Parameter: Age (day) Value: 4 vs. 0
  misc_feature: MA Experiment 108464 PARAMETER Experiment Name: At_Germinating_Seeds_cDNA_P Parameter: Tissue Value: Germinating Seeds
  misc_feature: MA Experiment ID: 108501 Result: Up-regulated in Transcription
  misc_feature: MA Experiment 108501 PARAMETER Experiment Name: At_ap2_floral_buds_cDNA_P Parameter: Plant Line Value: ap2 (Ler.)
  misc_feature: MA Experiment 108501 PARAMETER Experiment Name: At_ap2_floral_buds_cDNA_P Parameter: Tissue Value: Closed Flower
  misc_feature: MA Experiment ID: 108577 Result: Down-regulated in Transcription
  misc_feature: MA Experiment 108577 PARAMETER Experiment Name: At_42deg_Heat_cDNA_P Parameter: Temperature (deg C) Value: 42 vs. 22
  misc_feature: MA Experiment 108577 PARAMETER Experiment Name: At_42deg_Heat_cDNA_P Parameter: Timepoint (hr) Value: 6
  misc_feature: MA Experiment 108577 PARAMETER Experiment Name: At_42deg_Heat_cDNA_P Parameter: Tissue Value: Aerial
  misc_feature: MA Experiment ID: 108595 Result: Up-regulated in Transcription
  misc_feature: MA Experiment 108595 PARAMETER Experiment Name: At_Ler-pi_Ovule_cDNA_P Parameter: Plant Line Value: null
  misc_feature: MA Experiment ID: 20000113 Result: Down-regulated in Transcription
  misc_feature: MA Experiment 20000113 PARAMETER Experiment Name: At_42deg_Heat_cDNA_P Parameter: Temperature (deg C) Value: 42 vs. 22
  misc_feature: MA Experiment 20000113 PARAMETER Experiment Name: At_42deg_Heat_cDNA_P Parameter: Timepoint (hr) Value: 8
  misc_feature: MA Experiment 20000113 PARAMETER Experiment Name: At_42deg_Heat_cDNA_P Parameter: Tissue Value: Aerial
  misc_feature: MA Experiment ID: 20000264 Result: Up-regulated in Transcription
  misc_feature: MA Experiment 20000264 PARAMETER Experiment Name: At_Open_Flower_P Parameter: Age (day) Value: 21
  misc_feature: MA Experiment 20000264 PARAMETER Experiment Name: At_Open_Flower_P Parameter: Plant Line Value: WS
  misc_feature: MA Experiment 20000264 PARAMETER Experiment Name: At_Open_Flower_P Parameter: Tissue Value: Open Flower vs. Whole Plant
  misc_feature: MA Experiment ID: 20000286 Result: Up-regulated in Transcription
  misc_feature: MA Experiment 20000286 PARAMETER Experiment Name: At_Open_Flower_P Parameter: Age (day) Value: 21
  misc_feature: MA Experiment 20000286 PARAMETER Experiment Name: At_Open_Flower_P Parameter: Plant Line Value: WS
  misc_feature: MA Experiment 20000286 PARAMETER Experiment Name: At_Open_Flower_P Parameter: Tissue Value: Half Open vs. Whole Plant
  misc_feature: MA Experiment ID: 20000443 Result: Down-regulated in Transcription
  misc_feature: MA Experiment 20000443 PARAMETER Experiment Name: At_1uM_BR-BRZ__P Parameter: Tissue Value: Shoot Apices
  misc_feature: MA Experiment 20000443 PARAMETER Experiment Name: At_1uM_BR-BRZ__P Parameter: Treatment Value: 1uM BRZ vs. No Treatment
  misc_feature: MA Experiment ID: 20001911 Result: Down-regulated in Transcription
  misc_feature: MA Experiment 20001911 PARAMETER Experiment Name: At_Drought_Reproduction_P Parameter: Age (day) Value: 40
  misc_feature: MA Experiment 20001911 PARAMETER Experiment Name: At_Drought_Reproduction_P Parameter: Organism Value: A. thaliana
  misc_feature: MA Experiment 20001911 PARAMETER Experiment Name: At_Drought_Reproduction_P Parameter: Plant Line Value: WS
  misc_feature: MA Experiment 20001911 PARAMETER Experiment Name: At_Drought_Reproduction_P Parameter: Timepoint (day) Value: 10
  misc_feature: MA Experiment 20001911 PARAMETER Experiment Name: At_Drought_Reproduction_P Parameter: Tissue Value: Flowers
  misc_feature: MA Experiment 20001911 PARAMETER Experiment Name: At_Drought_Reproduction_P Parameter: Treatment Value: Drought vs. No Drought
ctgctcttcatttcgataaataattgaaaagaacaaaagaaacaaaagagacgagaaagagttttggcgatgaagaagaacgcactttggctactgtgcattctggtgttaccggcgatagcctgtggtaggaaaccggagaagaaggtaacaatttcatcctctgggaggaaggaagatgaccttgtaaccggtttgcccggccaaccaccggttaacttcaaacactacgccggttacgtgaatctggggcctgaacagaagcaaaaggcacttttctattggttcttcgaagctcaacaaaactcttctcgtcgtcctctcgtcctttggctcaatggaggaccgggttgctcatcaatagcctatggagctgcacaagaactaggcccttttcttgttcacgacaacggtggcaaacttacctacaatcatttctcttggaacaaagaggccaatatgttgttcttggaagcgccggttggggttgggttctcgtataccaataactcaatggatcttcaaaagcttggagatgaagttactgcatcggactctcttgctttcctgatcaactggttcatgaaattccccgagttccgatccagcgagttctacatctctggcgagagttacgccggtcactatgttcctcagctcgcggaggtaatttacgacaggaacaagaaggttacgaaagactctagcattaatctcaagggattcatgatagggaacgcggtgatcaatgaggcaacagacatggcaggactagtggactacgcatggagccacgctataatatcggacgaggtccacaccagcatccatggctcgtgcagttttgaggaagataccaccaacaagaccgaacaatgctacaacaatttcaaagggttcatggatgcttacaatgatatcgatatatacagtatctacactcccgtttgcctctcctctttgttgtcatcttctccaagaaaacctaaaatcgtcgtgtctcctcgtctccttacttttgacgatttgtgggacaagtttccggccgggtacgatccatgcactgaaagttatgccgagaattactttaaccggaaagatgtgcaggttgcactccatgcgaacgtcaccaaccttccttatccgtactctccttgcagcggagtaataaagagatggagtgatgctccatccaccatgattcccatcatacaaaagcttttgacgggtggcctccgtatctggatctatagtggagatacggatgggagagttccggtaacatctacacgttatagcataaaaaagatgggacttaaggtcgagtcaccgtggaggtcatggttccacaagagtcaagtagctggatgggttgagacttatgccggtggactaaattttgtcacggtgagaggagccggtcaccaggttccggccttggctccggcgcaatctctcacattattctctcacttcatttcttctgtccccttgccttcaaaacggttctgatatcagtaccgtcaagtcatgatggcaagttgttgttgttgttttggaaccttcgtttagcactctcccaattgattttatgaatttcaattgatgaataaagattcttcaacttttag

SEQ ID NO: 105111 - protein, 480 aa, Arabidopsis thaliana; identical to SEQ ID NO: 24868
  peptide (1)..(480): Ceres Seq. ID no. 13616458
  misc_feature (1)..(480): Homolog of NCBI NO: 15241571 NR Description: serine carboxypeptidase II -related [Arabidopsis
  misc_feature (38)..(480): Homolog of NCBI NO: 10177810 NR Description: serine carboxypeptidase II-like protein
  misc_feature (31)..(417): Homolog of NCBI NO: 38344436 NR Description: OSJNBa0038O10.8 [Oryza sativa (japonica
  misc_feature (4)..(291): Homolog of NCBI NO: 15220282 NR Description: serine carboxypeptidase -related [Arabidopsis
  misc_feature (327)..(479): Homolog of NCBI NO: 15220282 NR Description: serine carboxypeptidase -related [Arabidopsis
  misc_feature (30)..(312): Homolog of NCBI NO: 11967861 NR Description: putative serine carboxypeptidase [Pisum sativum]
  misc_feature (329)..(479): Homolog of NCBI NO: 11967861 NR Description: putative serine carboxypeptidase [Pisum sativum]
  misc_feature (30)..(476): Homolog of NCBI NO: 13877871 NR Description: putative serine carboxypeptidase II [Arabidopsis
  misc_feature (30)..(476): Homolog of NCBI NO: 15234795 NR Description: serine carboxypeptidase -related [Arabidopsis
  misc_feature (9)..(480): Homolog of NCBI NO: 37536528 NR Description: putative serine carboxypeptidase [Oryza sativa

SEQ ID NO: 105112 - protein, 350 aa, Arabidopsis thaliana; identical to SEQ ID NO: 24869
  peptide (1)..(350): Ceres Seq. ID no. 13616459
  misc_feature (1)..(350): Homolog of NCBI NO: 15241571 NR Description: serine carboxypeptidase II -related [Arabidopsis
  misc_feature (1)..(350): Homolog of NCBI NO: 10177810 NR Description: serine carboxypeptidase II-like protein
  misc_feature (1)..(287): Homolog of NCBI NO: 38344436 NR Description: OSJNBa0038O10.8 [Oryza sativa (japonica
  misc_feature (1)..(161): Homolog of NCBI NO: 15220282 NR Description: serine carboxypeptidase -related [Arabidopsis
  misc_feature (197)..(349): Homolog of NCBI NO: 15220282 NR Description: serine carboxypeptidase -related [Arabidopsis
  misc_feature (1)..(182): Homolog of NCBI NO: 11967861 NR Description: putative serine carboxypeptidase [Pisum sativum]
  misc_feature (199)..(349): Homolog of NCBI NO: 11967861 NR Description: putative serine carboxypeptidase [Pisum sativum]
  misc_feature (1)..(346): Homolog of NCBI NO: 13877871 NR Description: putative serine carboxypeptidase II [Arabidopsis
  misc_feature (1)..(346): Homolog of NCBI NO: 15234795 NR Description: serine carboxypeptidase -related [Arabidopsis
  misc_feature (1)..(350): Homolog of NCBI NO: 37536528 NR Description: putative serine carboxypeptidase [Oryza sativa

SEQ ID NO: 105113 - protein, 332 aa, Arabidopsis thaliana; identical to SEQ ID NO: 24870
  peptide (1)..(332): Ceres Seq. ID no. 13616460
  misc_feature (1)..(332): Homolog of NCBI NO: 15241571 NR Description: serine carboxypeptidase II -related [Arabidopsis
  misc_feature (1)..(332): Homolog of NCBI NO: 10177810 NR Description: serine carboxypeptidase II-like protein
  misc_feature (1)..(269): Homolog of NCBI NO: 38344436 NR Description: OSJNBa0038O10.8 [Oryza sativa (japonica
  misc_feature (1)..(143): Homolog of NCBI NO: 15220282 NR Description: serine carboxypeptidase -related [Arabidopsis
  misc_feature (179)..(331): Homolog of NCBI NO: 15220282 NR Description: serine carboxypeptidase -related [Arabidopsis
  misc_feature (1)..(164): Homolog of NCBI NO: 11967861 NR Description: putative serine carboxypeptidase [Pisum sativum]
  misc_feature (181)..(331): Homolog of NCBI NO: 11967861 NR Description: putative serine carboxypeptidase [Pisum sativum]
  misc_feature (1)..(328): Homolog of NCBI NO: 13877871 NR Description: putative serine carboxypeptidase II [Arabidopsis
  misc_feature (1)..(328): Homolog of NCBI NO: 15234795 NR Description: serine carboxypeptidase -related [Arabidopsis
  misc_feature (1)..(332): Homolog of NCBI NO: 37536528 NR Description: putative serine carboxypeptidase [Oryza sativa

SEQ ID NO: 105114 - DNA, 1753 bp, Arabidopsis thaliana
  misc_feature (1)..(1753): Ceres Seq. ID no. 13616469
  misc_feature: MA Experiment ID: 108434 Result: Up-regulated in Transcription
  misc_feature: MA Experiment 108434 PARAMETER Experiment Name: At_Root_Tips_cDNA_P Parameter: Tissue Value: Root Tips
  misc_feature: MA Experiment ID: 108462 Result: Down-regulated in Transcription
  misc_feature: MA Experiment 108462 PARAMETER Experiment Name: At_Germinating_Seeds_cDNA_P Parameter: Age (day) Value: 2 vs. 0
  misc_feature: MA Experiment 108462 PARAMETER Experiment Name: At_Germinating_Seeds_cDNA_P Parameter: Tissue Value: Germinating Seeds
  misc_feature: MA Experiment ID: 108463 Result: Down-regulated in Transcription
  misc_feature: MA Experiment 108463 PARAMETER Experiment Name: At_Germinating_Seeds_cDNA_P Parameter: Age (day) Value: 3 vs. 0
  misc_feature: MA Experiment 108463 PARAMETER Experiment Name: At_Germinating_Seeds_cDNA_P Parameter: Tissue Value: Germinating Seeds
  misc_feature: MA Experiment ID: 108464 Result: Down-regulated in Transcription
  misc_feature: MA Experiment 108464 PARAMETER Experiment Name: At_Germinating_Seeds_cDNA_P Parameter: Age (day) Value: 4 vs. 0
  misc_feature: MA Experiment 108464 PARAMETER Experiment Name: At_Germinating_Seeds_cDNA_P Parameter: Tissue Value: Germinating Seeds
  misc_feature: MA Experiment ID: 20000087 Result: Down-regulated in Transcription
  misc_feature: MA Experiment 20000087 PARAMETER Experiment Name: At_100uM_ABA_Mutants_cDNA_P Parameter: Plant Line Value: WS
  misc_feature: MA Experiment 20000087 PARAMETER Experiment Name: At_100uM_ABA_Mutants_cDNA_P Parameter: Timepoint (hr) Value: 6
  misc_feature: MA Experiment 20000087 PARAMETER Experiment Name: At_100uM_ABA_Mutants_cDNA_P Parameter: Tissue Value: Aerial
  misc_feature: MA Experiment 20000087 PARAMETER Experiment Name: At_100uM_ABA_Mutants_cDNA_P Parameter: Treatment Value: 100uM ABA vs. No Treatment
  misc_feature: MA Experiment ID: 20000173 Result: Down-regulated in Transcription
  misc_feature: MA Experiment 20000173 PARAMETER Experiment Name: At_42deg_Heat_P Parameter: Age (day) Value: 14
  misc_feature: MA Experiment 20000173 PARAMETER Experiment Name: At_42deg_Heat_P Parameter: Organism Value: A. thaliana
  misc_feature: MA Experiment 20000173 PARAMETER Experiment Name: At_42deg_Heat_P Parameter: Plant Line Value: WS
  misc_feature: MA Experiment 20000173 PARAMETER Experiment Name: At_42deg_Heat_P Parameter: Temperature (deg C) Value: 42 vs. 22
  misc_feature: MA Experiment 20000173 PARAMETER Experiment Name: At_42deg_Heat_P Parameter: Timepoint (hr) Value: 6
  misc_feature: MA Experiment 20000173 PARAMETER Experiment Name: At_42deg_Heat_P Parameter: Tissue Value: Aerial
  misc_feature: MA Experiment ID: 20000185 Result: Up-regulated in Transcription
  misc_feature: MA Experiment 20000185 PARAMETER Experiment Name: At_Roots__P Parameter: Age (day) Value: 7 vs. 21
  misc_feature: MA Experiment 20000185 PARAMETER Experiment Name: At_Roots__P Parameter: Organism Value: A. thaliana
  misc_feature: MA Experiment 20000185 PARAMETER Experiment Name: At_Roots__P Parameter: Tissue Value: Roots vs. Whole Plant
aaacaagggttcttgctccgacacgacaacaaatccagattttgagcttagggaaacttgagaaggagaaaaaaatgtcgaacatagacatagaagggatcttgaaggagctacctaatgatgggaggatcccaaagacgaagatagtttgcacattaggaccagcttctcgcactgtttccatgatcgaaaagcttttgaaagccggtatgaatgtggctcgcttcaacttctcacatggaagccatgaataccatcaagagacactcgacaacctccgctctgctatgcataataccggcattctcgctgctgtcatgcttgatactaaggggcctgagattcgtactggtttcttgaaagatgggaaccctatacaactgaaggaaggtcaagagattactataaccactgattatgacattcaaggagacgaatcaacgatatccatgagctataaaaagctgcctttggatgtgaagcccggaaacaccatactctgtgcagatggaagcataagtctagctgtcttgtcatgtgatcctgagtctggaactgttaggtgccggtgtgaaaactcggcgatgcttggtgaaagaaagaatgtgaatcttcctggcgttgttgttgatcttcccactttgacagataaggatattgaagatattctcggttggggtgttccgaacagcattgatatgattgctctttcgtttgtccgtaaaggttcggatcttgttaatgtccgcaaggttcttggatctcatgctaaaagcataatgctcatgtcaaaggttgagaaccaggaaggtgtgattaactttgatgagatcttgcgtgaaacagatgcgttcatggttgcccgtggtgatctcgggatggagattccgatagagaagatcttcttggctcaaaagttgatgatctacaagtgtaaccttgcgggtaaaccggtggtcacagccactcagatgctggagtcaatgatcaaatcacctcggccaacccgagctgaagccacagatgttgcaaatgctgttcttgatggtactgactgtgtgatgcttagcggtgagagtgcagcaggagcttatccggaaatagctgtgaaagtcatggctaagatctgcattgaagccgaatcctcgcttgattacaacacaatctttaaagagatgatccgagcaactccacttccaatgagcccactcgagagtcttgcatcatccgctgtacggactgctaacaaagcgagggcaaaactcatcattgtgttgacacgtggaggttcaactgctaatctcgtggctaaatacagaccggctgttccgattctgtcagtggttgtcccggttatgaccactgattcctttgactggtcttgtagtgacgagtcacctgcaaggcatagtctgatatacagaggtctaatccctatgttggctgaaggatctgcaaaggcaacagatagtgaagccaccgaagttatcattgaagctgctctgaagtcggctactcagagaggactgtgcaaccgtggtgatgcaatcgtggcgctgcaccgtattggagctgcctcagttattaagatctgtgtggttaagtgagattacagacttctttcaatacctcaaatcttggattgttggtaatcgtaactgagattttgctttgtagcatgaaataaagaaaacaggtcacaatagttcctgaaactctgttacttttaagatatctctctctcttttttttt

SEQ ID NO: 105115 - protein, 534 aa, Arabidopsis thaliana
  peptide (1)..(534): Ceres Seq. ID no. 13616470
  misc_feature (403)..(534): Pfam Name: Pyruvate kinase, alpha/beta domain Pfam Description: Pyruvate kinase, alpha/beta domain
  misc_feature (25)..(534): Homolog of NCBI NO: 15242313 NR Description: pyruvate kinase, putative [Arabidopsis thaliana] pyruvate kinase [Arabidopsis thaliana]
  misc_feature (25)..(534): Homolog of NCBI NO: 15242863 NR Description: pyruvate kinase, putative [Arabidopsis thaliana]
TRVLAPTRQQIQILSLGKLEKEKKMSNIDIEGILKELPNDGRIPKTKIVCTLGPASRTVSMIEKLLKAGMNVARFNFSHGSHEYHQETLDNLRSAMHNTGILAAVMLDTKGPEIRTGFLKDGNPIQLKEGQEITITTDYDIQGDESTISMSYKKLPLDVKPGNTILCADGSISLAVLSCDPESGTVRCRCENSAMLGERKNVNLPGVVVDLPTLTDKDIEDILGWGVPNSIDMIALSFVRKGSDLVNVRKVLGSHAKSIMLMSKVENQEGVINFDEILRETDAFMVARGDLGMEIPIEKIFLAQKLMIYKCNLAGKPVVTATQMLESMIKSPRPTRAEATDVANAVLDGTDCVMLSGESAAGAYPEIAVKVMAKICIEAESSLDYNTIFKEMIRATPLPMSPLESLASSAVRTANKARAKLIIVLTRGGSTANLVAKYRPAVPILSVVVPVMTTDSFDWSCSDESPARHSLIYRGLIPMLAEGSAKATDSEATEVIIEAALKSATQRGLCNRGDAIVALHRIGAASVIKICVVK

SEQ ID NO: 105116 - protein, 510 aa, Arabidopsis thaliana; identical to SEQ ID NO: 40331
  peptide (1)..(510): Ceres Seq. ID no. 13616471
  misc_feature (379)..(510): Pfam Name: Pyruvate kinase, alpha/beta domain Pfam Description: Pyruvate kinase, alpha/beta domain
  misc_feature (1)..(510): Homolog of NCBI NO: 15242313 NR Description: pyruvate kinase, putative [Arabidopsis thaliana] pyruvate kinase [Arabidopsis thaliana]
  misc_feature (1)..(510): Homolog of NCBI NO: 15242863 NR Description: pyruvate kinase, putative [Arabidopsis thaliana]

SEQ ID NO: 105117 - protein, 474 aa, Arabidopsis thaliana; identical to SEQ ID NO: 40332
  peptide (1)..(474): Ceres Seq. ID no. 13616472
  misc_feature (343)..(474): Pfam Name: Pyruvate kinase, alpha/beta domain Pfam Description: Pyruvate kinase, alpha/beta domain
  misc_feature (1)..(474): Homolog of NCBI NO: 15242313 NR Description: pyruvate kinase, putative [Arabidopsis thaliana] pyruvate kinase [Arabidopsis thaliana]
  misc_feature (1)..(474): Homolog of NCBI NO: 15242863 NR Description: pyruvate kinase, putative [Arabidopsis thaliana]

SEQ ID NO: 105118 - DNA, 1432 bp, Arabidopsis thaliana
  misc_feature (1)..(1432): Ceres Seq. ID no. 13616473
  misc_feature: MA Experiment ID: 108461 Result: Up-regulated in Transcription
  misc_feature: MA Experiment 108461 PARAMETER Experiment Name: At_Germinating_Seeds_cDNA_P Parameter: Age (day) Value: 1 vs. 0
  misc_feature: MA Experiment 108461 PARAMETER Experiment Name: At_Germinating_Seeds_cDNA_P Parameter: Tissue Value: Germinating Seeds
  misc_feature: MA Experiment ID: 108561 Result: Up-regulated in Transcription
  misc_feature: MA Experiment 108561 PARAMETER Experiment Name: At_100uM_ABA_cDNA_P Parameter: Timepoint (hr) Value: 6
  misc_feature: MA Experiment 108561 PARAMETER Experiment Name: At_100uM_ABA_cDNA_P Parameter: Tissue Value: Aerial
  misc_feature: MA Experiment 108561 PARAMETER Experiment Name: At_100uM_ABA_cDNA_P Parameter: Treatment Value: 100uM ABA vs. No Treatment
  misc_feature: MA Experiment ID: 108577 Result: Down-regulated in Transcription
  misc_feature: MA Experiment 108577 PARAMETER Experiment Name: At_42deg_Heat_cDNA_P Parameter: Temperature (deg C) Value: 42 vs. 22
  misc_feature: MA Experiment 108577 PARAMETER Experiment Name: At_42deg_Heat_cDNA_P Parameter: Timepoint (hr) Value: 6
  misc_feature: MA Experiment 108577 PARAMETER Experiment Name: At_42deg_Heat_cDNA_P Parameter: Tissue Value: Aerial
  misc_feature: MA Experiment ID: 108585 Result: Down-regulated in Transcription
  misc_feature: MA Experiment 108585 PARAMETER Experiment Name: At_5mM_NaNP_cDNA_P Parameter: Timepoint (hr) Value: 6
  misc_feature: MA Experiment 108585 PARAMETER Experiment Name: At_5mM_NaNP_cDNA_P Parameter: Tissue Value: Aerial
  misc_feature: MA Experiment 108585 PARAMETER Experiment Name: At_5mM_NaNP_cDNA_P Parameter: Treatment Value: null
  misc_feature: MA Experiment ID: 108595 Result: Down-regulated in Transcription
  misc_feature: MA Experiment 108595 PARAMETER Experiment Name: At_Ler-pi_Ovule_cDNA_P Parameter: Plant Line Value: null
  misc_feature: MA Experiment ID: 20000069 Result: Up-regulated in Transcription
  misc_feature: MA Experiment 20000069 PARAMETER Experiment Name: At_100uM_ABA_Mutants_cDNA_P Parameter: Plant Line Value: CS23
  misc_feature: MA Experiment 20000069 PARAMETER Experiment Name: At_100uM_ABA_Mutants_cDNA_P Parameter: Timepoint (hr) Value: 6
  misc_feature: MA Experiment 20000069 PARAMETER Experiment Name: At_100uM_ABA_Mutants_cDNA_P Parameter: Tissue Value: Aerial
  misc_feature: MA Experiment 20000069 PARAMETER Experiment Name: At_100uM_ABA_Mutants_cDNA_P Parameter: Treatment Value: 100uM ABA vs. No Treatment
  misc_feature: MA Experiment ID: 20000070 Result: Up-regulated in Transcription
  misc_feature: MA Experiment 20000070 PARAMETER Experiment Name: At_100uM_ABA_Mutants_cDNA_P Parameter: Plant Line Value: CS24
  misc_feature: MA Experiment 20000070 PARAMETER Experiment Name: At_100uM_ABA_Mutants_cDNA_P Parameter: Timepoint (hr) Value: 6
  misc_feature: MA Experiment 20000070 PARAMETER Experiment Name: At_100uM_ABA_Mutants_cDNA_P Parameter: Tissue Value: Aerial
  misc_feature: MA Experiment 20000070 PARAMETER Experiment Name: At_100uM_ABA_Mutants_cDNA_P Parameter: Treatment Value: 100uM ABA vs. No Treatment
  misc_feature: MA Experiment ID: 20000071 Result: Up-regulated in Transcription
  misc_feature: MA Experiment 20000071 PARAMETER Experiment Name: At_100uM_ABA_Mutants_cDNA_P Parameter: Plant Line Value: CS8104
  misc_feature: MA Experiment 20000071 PARAMETER Experiment Name: At_100uM_ABA_Mutants_cDNA_P Parameter: Timepoint (hr) Value: 6
  misc_feature: MA Experiment 20000071 PARAMETER Experiment Name: At_100uM_ABA_Mutants_cDNA_P Parameter: Tissue Value: Aerial
  misc_feature: MA Experiment 20000071 PARAMETER Experiment Name: At_100uM_ABA_Mutants_cDNA_P Parameter: Treatment Value: 100uM ABA vs. No Treatment
  misc_feature: MA Experiment ID: 20000072 Result: Up-regulated in Transcription
  misc_feature: MA Experiment 20000072 PARAMETER Experiment Name: At_100uM_ABA_Mutants_cDNA_P Parameter: Plant Line Value: CS8105
  misc_feature: MA Experiment 20000072 PARAMETER Experiment Name: At_100uM_ABA_Mutants_cDNA_P Parameter: Timepoint (hr) Value: 6
  misc_feature: MA Experiment 20000072 PARAMETER Experiment Name: At_100uM_ABA_Mutants_cDNA_P Parameter: Tissue Value: Aerial
  misc_feature: MA Experiment 20000072 PARAMETER Experiment Name: At_100uM_ABA_Mutants_cDNA_P Parameter: Treatment Value: 100uM ABA vs. No Treatment
  misc_feature: MA Experiment ID: 20000088 Result: Up-regulated in Transcription
  misc_feature: MA Experiment 20000088 PARAMETER Experiment Name: At_100uM_ABA_Mutants_cDNA_P Parameter: Plant Line Value: Landsberg
  misc_feature: MA Experiment 20000088 PARAMETER Experiment Name: At_100uM_ABA_Mutants_cDNA_P Parameter: Timepoint (hr) Value: 6
  misc_feature: MA Experiment 20000088 PARAMETER Experiment Name: At_100uM_ABA_Mutants_cDNA_P Parameter: Tissue Value: Aerial
  misc_feature: MA Experiment 20000088 PARAMETER Experiment Name: At_100uM_ABA_Mutants_cDNA_P Parameter: Treatment Value: 100uM ABA vs. No Treatment
  misc_feature: MA Experiment ID: 20000111 Result: Down-regulated in Transcription
  misc_feature: MA Experiment 20000111 PARAMETER Experiment Name: At_42deg_Heat_cDNA_P Parameter: Temperature (deg C) Value: 42 vs. 22
  misc_feature: MA Experiment 20000111 PARAMETER Experiment Name: At_42deg_Heat_cDNA_P Parameter: Timepoint (hr) Value: 6
  misc_feature: MA Experiment 20000111 PARAMETER Experiment Name: At_42deg_Heat_cDNA_P Parameter: Tissue Value: Aerial
  misc_feature: MA Experiment ID: 20000113 Result: Down-regulated in Transcription
  misc_feature: MA Experiment 20000113 PARAMETER Experiment Name: At_42deg_Heat_cDNA_P Parameter: Temperature (deg C) Value: 42 vs. 22
  misc_feature: MA Experiment 20000113 PARAMETER Experiment Name: At_42deg_Heat_cDNA_P Parameter: Timepoint (hr) Value: 8
  misc_feature: MA Experiment 20000113 PARAMETER Experiment Name: At_42deg_Heat_cDNA_P Parameter: Tissue Value: Aerial
  misc_feature: MA Experiment ID: 20001558 Result: Down-regulated in Transcription
  misc_feature: MA Experiment 20001558 PARAMETER Experiment Name: At_Drought_Soil_Dry_P Parameter: Age (day) Value: 27
  misc_feature: MA Experiment 20001558 PARAMETER Experiment Name: At_Drought_Soil_Dry_P Parameter: Organism Value: A. thaliana
  misc_feature: MA Experiment 20001558 PARAMETER Experiment Name: At_Drought_Soil_Dry_P Parameter: Plant Line Value: WS
  misc_feature: MA Experiment 20001558 PARAMETER Experiment Name: At_Drought_Soil_Dry_P Parameter: Post Timepoint (hr) Value: 6
  misc_feature: MA Experiment 20001558 PARAMETER Experiment Name: At_Drought_Soil_Dry_P Parameter: Post-Treatment Value: Re-Water vs. No Drought
  misc_feature: MA Experiment 20001558 PARAMETER Experiment Name: At_Drought_Soil_Dry_P Parameter: Timepoint (day) Value: 13
  misc_feature: MA Experiment 20001558 PARAMETER Experiment Name: At_Drought_Soil_Dry_P Parameter: Treatment Value: Drought vs. No Drought
attatacacacatgcgtgtgtattggatctcacgatttcttatcaatggaactcgcttctctttctcagatccccatccaaatcgttttataggtagattagatagataaactacggatatactcgaactctatccatttacggtattgatttggaaatatggacaagtatgacgttgtcaaggatctgggagctggaaatttcggtgtggctcgccttctcaggcacaaggacaccaaagagcttgttgccatgaaatacatcgagagaggtcgcaagatagatgagaacgtggcgagagagattattaatcacagatcacttaaacatcctaatatcatccggttcaaggaggtgatcctgacacctactcatcttgctattgtgatggagtatgcttctggaggagagctctttgatcgaatctgtactgccggtagatttagtgaagctgaggctaggtacttctttcaacagctgatttgtggtgttgattactgccattccttgcaaatatgtcatagagacctgaagcttgagaacacactgctcgatgggagccctgctccgcttttgaaaatctgtgattttggttactctaagtcatctatactacattctaggcctaaatcaactgttggaactccagcttacatagcacctgaagttctttcacggagagaatatgatggcaagcacgcggatgtgtggtcatgtggagtaaccctttatgtgatgctggtgggagcttacccgtttgaggaccctaatgatccaaaaaacttcaggaaaacaatccagcgcataatggctgtacaatacaagatcccggactatgttcacatatctcaggaatgcaaacatcttctctctcgcatattcgtcactaactctgctaagagaatcacacttaaggagatcaagaatcatccgtggtacttgaagaatttgccaaaggagctgctagagtcggctcaagcggcgtattacaagagagacacaagcttctctcttcaaagcgtagaggacataatgaagatagttggagaagcaaggaatccagctccatcaactagtgctgtcaaaagctcgggctcaggagctgatgaagaagaggaagaggacgttgaagctgaagtggaagaggaagaagatgatgaagacgaatacgagaagcatgtcaaagaggcacagtcttgtcaagagtctgacaaagcttaaaaagaaaaatgctctctgtttctcttactttatttcttcttcaagaacactccttggtgagttggtgacttgcttctggtaaaaagaaaaacacatttgtcaaagccaaaggctgtaaactacgtgctggttgtttcacttttagattgatgtcgttgtactgagtaatgagcatgaaacagaaggtttatattattatatgatactatac

SEQ ID NO: 105119 - protein, 353 aa, Arabidopsis thaliana
  peptide (1)..(353): Ceres Seq. ID no. 13616474
  misc_feature (1)..(353): Homolog of NCBI NO: 15242317 NR Description: serine/threonine protein kinase (ASK2)
  misc_feature (1)..(353): Homolog of NCBI NO: 99748 NR Description: probable serine/threonine-specific protein kinase
  misc_feature (1)..(353): Homolog of NCBI NO: 21593536 NR Description: serine/threonine-protein kinase [Arabidopsis
  misc_feature (1)..(353): Homolog of NCBI NO: 15242858 NR Description: serine/threonine protein kinase, putative
  misc_feature (1)..(349): Homolog of NCBI NO: 19568098 NR Description: osmotic stress-activated protein kinase
MDKYDVVKDLGAGNFGVARLLRHKDTKELVAMKYIERGRKIDENVAREIINHRSLKHPNIIRFKEVILTPTHLAIVMEYASGGELFDRICTAGRFSEAEARYFFQQLICGVDYCHSLQICHRDLKLENTLLDGSPAPLLKICDFGYSKSSILHSRPKSTVGTPAYIAPEVLSRREYDGKHADVWSCGVTLYVMLVGAYPFEDPNDPKNFRKTIQRIMAVQYKIPDYVHISQECKHLLSRIFVTNSAKRITLKEIKNHPWYLKNLPKELLESAQAAYYKRDTSFSLQSVEDIMKIVGEARNPAPSTSAVKSSGSGADEEEEEDVEAEVEEEEDDEDEYEKHVKEAQSCQESDKA

SEQ ID NO: 105120 - protein, 322 aa, Arabidopsis thaliana
  peptide (1)..(322): Ceres Seq. ID no. 13616475
  misc_feature (1)..(322): Homolog of NCBI NO: 15242317 NR Description: serine/threonine protein kinase (ASK2)
  misc_feature (1)..(322): Homolog of NCBI NO: 99748 NR Description: probable serine/threonine-specific protein kinase
  misc_feature (1)..(322): Homolog of NCBI NO: 21593536 NR Description: serine/threonine-protein kinase [Arabidopsis
  misc_feature (1)..(322): Homolog of NCBI NO: 15242858 NR Description: serine/threonine protein kinase, putative
  misc_feature (1)..(318): Homolog of NCBI NO: 19568098 NR Description: osmotic stress-activated protein kinase
MKYIERGRKIDENVAREIINHRSLKHPNIIRFKEVILTPTHLAIVMEYASGGELFDRICTAGRFSEAEARYFFQQLICGVDYCHSLQICHRDLKLENTLLDGSPAPLLKICDFGYSKSSILHSRPKSTVGTPAYIAPEVLSRREYDGKHADVWSCGVTLYVMLVGAYPFEDPNDPKNFRKTIQRIMAVQYKIPDYVHISQECKHLLSRIFVTNSAKRITLKEIKNHPWYLKNLPKELLESAQAAYYKRDTSFSLQSVEDIMKIVGEARNPAPSTSAVKSSGSGADEEEEEDVEAEVEEEEDDEDEYEKHVKEAQSCQESDKA

SEQ ID NO: 105121 - protein, 277 aa, Arabidopsis thaliana
  peptide (1)..(277): Ceres Seq. ID no. 13616476
  misc_feature (1)..(277): Homolog of NCBI NO: 15242317 NR Description: serine/threonine protein kinase (ASK2)
  misc_feature (1)..(277): Homolog of NCBI NO: 99748 NR Description: probable serine/threonine-specific protein kinase
  misc_feature (1)..(277): Homolog of NCBI NO: 21593536 NR Description: serine/threonine-protein kinase [Arabidopsis
  misc_feature (1)..(277): Homolog of NCBI NO: 15242858 NR Description: serine/threonine protein kinase, putative
  misc_feature (1)..(273): Homolog of NCBI NO: 19568098 NR Description: osmotic stress-activated protein kinase
MEYASGGELFDRICTAGRFSEAEARYFFQQLICGVDYCHSLQICHRDLKLENTLLDGSPAPLLKICDFGYSKSSILHSRPKSTVGTPAYIAPEVLSRREYDGKHADVWSCGVTLYVMLVGAYPFEDPNDPKNFRKTIQRIMAVQYKIPDYVHISQECKHLLSRIFVTNSAKRITLKEIKNHPWYLKNLPKELLESAQAAYYKRDTSFSLQSVEDIMKIVGEARNPAPSTSAVKSSGSGADEEEEEDVEAEVEEEEDDEDEYEKHVKEAQSCQESDKA

SEQ ID NO: 105122 - DNA, 1677 bp, Arabidopsis thaliana
  misc_feature (1)..(1677): Ceres Seq. ID no. 13616477
  misc_feature: MA Experiment ID: 108474 Result: Down-regulated in Transcription
  misc_feature: MA Experiment 108474 PARAMETER Experiment Name: At_Drought_Flowers_cDNA_P Parameter: Timepoint (hr) Value: null
  misc_feature: MA Experiment 108474 PARAMETER Experiment Name: At_Drought_Flowers_cDNA_P Parameter: Treatment Value: Drought vs. No Drought
  misc_feature: MA Experiment ID: 108488 Result: Down-regulated in Transcription
  misc_feature: MA Experiment ID: 108573 Result: Up-regulated in Transcription
  misc_feature: MA Experiment 108573 PARAMETER Experiment Name: At_Drought_cDNA_P Parameter: Timepoint (hr) Value: 6
  misc_feature: MA Experiment 108573 PARAMETER Experiment Name: At_Drought_cDNA_P Parameter: Tissue Value: Aerial
  misc_feature: MA Experiment 108573 PARAMETER Experiment Name: At_Drought_cDNA_P Parameter: Treatment Value: Drought vs. No Drought
  misc_feature: MA Experiment ID: 20000184 Result: Down-regulated in Transcription
  misc_feature: MA Experiment 20000184 PARAMETER Experiment Name: At_Shoots__P Parameter: Age (day) Value: 7
  misc_feature: MA Experiment 20000184 PARAMETER Experiment Name: At_Shoots__P Parameter: Tissue Value: Shoots vs. Whole Plant
  misc_feature: MA Experiment ID: 20000794 Result: Up-regulated in Transcription
  misc_feature: MA Experiment 20000794 PARAMETER Experiment Name: At_Petals_P Parameter: Age (day) Value: 23-25 days
  misc_feature: MA Experiment 20000794 PARAMETER Experiment Name: At_Petals_P Parameter: Plant Line Value: WS
  misc_feature: MA Experiment 20000794 PARAMETER Experiment Name: At_Petals_P Parameter: Tissue Value: Petals vs. Whole plant
  misc_feature: MA Experiment ID: 20001905 Result: Up-regulated in Transcription
  misc_feature: MA Experiment 20001905 PARAMETER Experiment Name: At_Drought_Reproduction_P Parameter: Age (day) Value: 40
  misc_feature: MA Experiment 20001905 PARAMETER Experiment Name: At_Drought_Reproduction_P Parameter: Organism Value: A. thaliana
  misc_feature: MA Experiment 20001905 PARAMETER Experiment Name: At_Drought_Reproduction_P Parameter: Plant Line Value: WS
  misc_feature: MA Experiment 20001905 PARAMETER Experiment Name: At_Drought_Reproduction_P Parameter: Timepoint (day) Value: 10
  misc_feature: MA Experiment 20001905 PARAMETER Experiment Name: At_Drought_Reproduction_P Parameter: Tissue Value: Rosettes
  misc_feature: MA Experiment 20001905 PARAMETER Experiment Name: At_Drought_Reproduction_P Parameter: Treatment Value: Drought vs. No Drought
agtccaaacaaaaatctgaaacggaagctcagagagacaaggatgagatttttctcttcctttgataaatcccaatacctaattcccaaattcccttacttttaggcgccgaaagatagagagaaacatagatacgcattggttttttcttttttgaagattctcgcttcttactacatgtgtatcaatcgatctctacccagattctccggaggagctttgagtcttgtcgtatagatgcagtgaaggtcctttgttagatgggaaaacttgttcttgagttgtcaaaaggtattttctatgtttttggagtagaactgtttacaaggaagcagccaatatggagtttgattttggagaaatgtttttagtgttgttgtgaagaaatatcagttttgattgtttttggatttgatgggtaaagagaatcagttggagactaccgattgtggagtcagtgatcacggttctccacctatcaagaatgaagaacatgaggcaccacgttacagttcagacaaagacacgggtttaccaacttgccgtgtatgccagtgtgcagaatctgatagaagaggagatgctgctttagggtttttgggaattactcctccggtttcagaacctcgtagaagcaatgcgggtgaagaaaccgttgatcagagaagctcggttgtcaaatctagcggattcatcgaactgataagtcctgatggagaagtttttgtttgtgcaaacgacgatatagaaatgggagcgtggcagcatcgagataagttgctagaacttggatgttcttgcaagaatgatctcgctttggtacactatgcttgtgcattgaaatggtttgtcaaccacggatcaactgtttgtgagatatgcggaaaaaccacggagaatataagaacagttgatttcaacaaagtggttatcgccttaaaagattacgcagcgctaagagaaagaacagcggatggagatccaaatcctgtagtggttaacaacaacaccagttcgtcagggattgatcctgatgcagttgcagccattcgaaggcaacgacttagtgagatatcgttatggtttggtcctcattgttcaaccaacaacaacaatagtagtaattccgctgctgcagggacggcttcttctcaggttacatctgaacaacctgtgggtatagtaaactttgatatcttgcctatggaaagccgtgcgactaaatgggcggtggaaggtaccggaatactacttgcaaccggattactcacagttactttggcttggctcattgctcctcgtgtcggaaagagaactgcaaagagtggtctacacatacttctaggtggtctctgtgctttaacagtagtcatcttcttcagattcgttgtgctgacaagaatcaggtacggaccagcacgttactgggcaatattgttcgtcttctggtttcttgtgtttggcatttgggcttcacgttcacacgcttctcactcctccacatgataaattctccatcatccttcaagacacaaaatgtactctttttggtctctgtcaatatcatgtacgttattctctttcaagacacaaaatgtacaattaattactcttatcaaaaagaaaaaaaggggtgaaactgaatgttatcatctcacaacaaagtctcttggtcgt

SEQ ID NO: 105123 - protein, 363 aa, Arabidopsis thaliana; identical to SEQ ID NO: 25729
  peptide (1)..(363): Ceres Seq. ID no. 13616478
  misc_feature (105)..(156): Pfam Name: Zinc finger, C3HC4 type (RING finger) Pfam Description: Zinc finger, C3HC4 type (RING finger)
  misc_feature (1)..(363): Homolog of NCBI NO: 18415916 NR Description: zinc finger (C3HC4-type RING finger) protein [Arabidopsis thaliana] >gi|13548333|emb|CAC35880.1| putative [Arabidopsis thaliana] >gi|26451043|dbj|BAC42627.1| unknown
  misc_feature (1)..(363): Homolog of NCBI NO: 16209722 NR Description: AT5g63780/MBK5_26 [Arabidopsis thaliana]
  misc_feature (1)..(362): Homolog of NCBI NO: 30697894 NR Description: zinc finger (C3HC4-type RING finger) protein [Arabidopsis thaliana] >gi|27311831|gb|AAO00881.1| putative [Arabidopsis thaliana] >gi|30725586|gb|AAP37815.1| At5g63780
  misc_feature (1)..(306): Homolog of NCBI NO: 10177059 NR Description: gb|AAD32776.1~gene_id:MBK5.26~similar to unknown
  misc_feature (26)..(353): Homolog of NCBI NO: 38567835 NR Description: OSJNBb0020J19.13 [Oryza sativa (japonica
  misc_feature (121)..(188): Homolog of NCBI NO: 29725746 NR Description: hypothetical protein [Arabidopsis thaliana]

SEQ ID NO: 105124 - protein, 251 aa, Arabidopsis thaliana; identical to SEQ ID NO: 25730
  peptide (1)..(251): Ceres Seq. ID no. 13616479
  misc_feature (1)..(44): Pfam Name: Zinc finger, C3HC4 type (RING finger) Pfam Description: Zinc finger, C3HC4 type (RING finger)
  misc_feature (1)..(251): Homolog of NCBI NO: 18415916 NR Description: zinc finger (C3HC4-type RING finger) protein [Arabidopsis thaliana] >gi|13548333|emb|CAC35880.1| putative [Arabidopsis thaliana] >gi|26451043|dbj|BAC42627.1| unknown
  misc_feature (1)..(251): Homolog of NCBI NO: 16209722 NR Description: AT5g63780/MBK5_26 [Arabidopsis thaliana]
  misc_feature (1)..(250): Homolog of NCBI NO: 30697894 NR Description: zinc finger (C3HC4-type RING finger) protein [Arabidopsis thaliana] >gi|27311831|gb|AAO00881.1| putative [Arabidopsis thaliana] >gi|30725586|gb|AAP37815.1| At5g63780
  misc_feature (1)..(194): Homolog of NCBI NO: 10177059 NR Description: gb|AAD32776.1~gene_id:MBK5.26~similar to unknown
  misc_feature (1)..(241): Homolog of NCBI NO: 38567835 NR Description: OSJNBb0020J19.13 [Oryza sativa (japonica
  misc_feature (9)..(76): Homolog of NCBI NO: 29725746 NR Description: hypothetical protein [Arabidopsis thaliana]

SEQ ID NO: 105125 - DNA, 858 bp, Arabidopsis thaliana
  misc_feature (1)..(858): Ceres Seq. ID no. 13616508
  misc_feature: MA Experiment ID: 20000179 Result: Down-regulated in Transcription
  misc_feature: MA Experiment 20000179 PARAMETER Experiment Name: At_Germinating_Seeds_P Parameter: Age (hr) Value: 6 vs. 0
  misc_feature: MA Experiment 20000179 PARAMETER Experiment Name: At_Germinating_Seeds_P Parameter: Tissue Value: Germinating Seeds
  misc_feature: MA Experiment ID: 20000180 Result: Down-regulated in Transcription
  misc_feature: MA Experiment 20000180 PARAMETER Experiment Name: At_Germinating_Seeds_P Parameter: Age (hr) Value: 24 vs. 0
  misc_feature: MA Experiment 20000180 PARAMETER Experiment Name: At_Germinating_Seeds_P Parameter: Tissue Value: Germinating Seeds
aaattcgatcgatagtgacgagaaagatcctaagatggcgaccgcaagcgagagttcttcatctaagagatggcttccacttgaatctaacccagatgttatgaatcagtatctctggggacttggtcttgcccctgatgaagcagagtgcaatgatgtgtatgggttagacgatgaacttctagagatggttccaaagcctgttcttgctgttctcttcctttacccaatcaccaaaaagagtgaagaagagagaatcgagcaagacaaggaaattaaggaaaaggtgcatagcgataaagtttactttatgaaacaaactgttggtaatgcttgtggaaccattggtcttcttcatgctattgggaatattacctctgaaatcaaactctccgacggatcgttcttggatagattcttcaaatccactgccaacatgactcctatggagcgtgccaagtttctcgagaatgacagtcaaatagaagatgctcattctgtagctgttatagctggtgatacacctgcttcagaagacgcagacacgcatttcatttgtttagcttgtgtagaaggtgagctctatgaacttgatggaagaaaggcaggaccgatttcacacggtgcttcctctccagctaccctcctgaaggacgcaacaaaagtgataaagaagatgatcgagaagaatccgggctctctcaacttcaacctgatagccatctctaagagaacctgagggtcttttaaataaccgaaactcctaagtcttgtttttgagtttgtgactattttatatcttcggattctgtttttcaatgttctgaacaaattacagttgatgatcatggtttagag

SEQ ID NO: 105126 - protein, 245 aa, Arabidopsis thaliana
  peptide (1)..(245): Ceres Seq. ID no. 13616509
  misc_feature (12)..(245): Homolog of NCBI NO: 15236549 NR Description: carboxyl-terminal proteinase like protein
  misc_feature (12)..(186): Homolog of NCBI NO: 7488069 NR Description: probable carboxyl-terminal proteinase -
  misc_feature (22)..(243): Homolog of NCBI NO: 14140139 NR Description: putative protein [Oryza sativa]
  misc_feature (22)..(244): Homolog of NCBI NO: 38346164 NR Description: OSJNBa0079A21.11 [Oryza sativa (japonica
  misc_feature (19)..(244): Homolog of NCBI NO: 32488373 NR Description: OSJNBa0043A12.3 [Oryza sativa (japonica
  misc_feature (22)..(242): Homolog of NCBI NO: 7710106 NR Description: ubiquitin carboxyl-terminal esterase L3 (ubiquitin
  misc_feature (22)..(242): Homolog of NCBI NO: 17380334 NR Description: Ubiquitin carboxyl-terminal hydrolase isozyme L3
  misc_feature (22)..(242): Homolog of NCBI NO: 5174741 NR Description: ubiquitin carboxyl-terminal esterase L3 thiolesterase) [Homo sapiens] >gi|136682|sp|P15374|UBL3_HUMAN
  misc_feature (22)..(242): Homolog of NCBI NO: 27705170 NR Description: similar to ubiqutin carboxyl-terminal hydrolase
  misc_feature (23)..(242): Homolog of NCBI NO: 7522621 NR Description: ubiquitin carboxy-terminal hydrolase-6 (EC
NSIDSDEKDPKMATASESSSSKRWLPLESNPDVMNQYLWGLGLAPDEAECNDVYGLDDELLEMVPKPVLAVLFLYPITKKSEEERIEQDKEIKEKVHSDKVYFMKQTVGNACGTIGLLHAIGNITSEIKLSDGSFLDRFFKSTANMTPMERAKFLENDSQIEDAHSVAVIAGDTPASEDADTHFICLACVEGELYELDGRKAGPISHGASSPATLLKDATKVIKKMIEKNPGSLNFNLIAISKRT

SEQ ID NO: 105127 - protein, 234 aa, Arabidopsis thaliana; identical to SEQ ID NO: 43967
  peptide (1)..(234): Ceres Seq. ID no. 13616510
  misc_feature (1)..(234): Homolog of NCBI NO: 15236549 NR Description: carboxyl-terminal proteinase like protein
  misc_feature (1)..(175): Homolog of NCBI NO: 7488069 NR Description: probable carboxyl-terminal proteinase -
  misc_feature (11)..(232): Homolog of NCBI NO: 14140139 NR Description: putative protein [Oryza sativa]
  misc_feature (11)..(233): Homolog of NCBI NO: 38346164 NR Description: OSJNBa0079A21.11 [Oryza sativa (japonica
  misc_feature (8)..(233): Homolog of NCBI NO: 32488373 NR Description: OSJNBa0043A12.3 [Oryza sativa (japonica
  misc_feature (11)..(231): Homolog of NCBI NO: 7710106 NR Description: ubiquitin carboxyl-terminal esterase L3 (ubiquitin
  misc_feature (11)..(231): Homolog of NCBI NO: 17380334 NR Description: Ubiquitin carboxyl-terminal hydrolase isozyme L3
  misc_feature (11)..(231): Homolog of NCBI NO: 5174741 NR Description: ubiquitin carboxyl-terminal esterase L3 thiolesterase) [Homo sapiens] >gi|136682|sp|P15374|UBL3_HUMAN
  misc_feature (11)..(231): Homolog of NCBI NO: 27705170 NR Description: similar to ubiqutin carboxyl-terminal hydrolase
  misc_feature (12)..(231): Homolog of NCBI NO: 7522621 NR Description: ubiquitin carboxy-terminal hydrolase-6 (EC

SEQ ID NO: 105128 - protein, 212 aa, Arabidopsis thaliana; identical to SEQ ID NO: 43968
  peptide (1)..(212): Ceres Seq. ID no. 13616511
  misc_feature (1)..(212): Homolog of NCBI NO: 15236549 NR Description: carboxyl-terminal proteinase like protein
  misc_feature (1)..(153): Homolog of NCBI NO: 7488069 NR Description: probable carboxyl-terminal proteinase -
  misc_feature (1)..(210): Homolog of NCBI NO: 14140139 NR Description: putative protein [Oryza sativa]
  misc_feature (1)..(211): Homolog of NCBI NO: 38346164 NR Description: OSJNBa0079A21.11 [Oryza sativa (japonica
  misc_feature (1)..(211): Homolog of NCBI NO: 32488373 NR Description: OSJNBa0043A12.3 [Oryza sativa (japonica
  misc_feature (1)..(209): Homolog of NCBI NO: 7710106 NR Description: ubiquitin carboxyl-terminal esterase L3 (ubiquitin
  misc_feature (1)..(209): Homolog of NCBI NO: 17380334 NR Description: Ubiquitin carboxyl-terminal hydrolase isozyme L3
  misc_feature (1)..(209): Homolog of NCBI NO: 5174741 NR Description: ubiquitin carboxyl-terminal esterase L3 thiolesterase) [Homo sapiens] >gi|136682|sp|P15374|UBL3_HUMAN
  misc_feature (1)..(209): Homolog of NCBI NO: 27705170 NR Description: similar to ubiqutin carboxyl-terminal hydrolase
  misc_feature (1)..(209): Homolog of NCBI NO: 7522621 NR Description: ubiquitin carboxy-terminal hydrolase-6 (EC

SEQ ID NO: 105129 - DNA, 968 bp, Arabidopsis thaliana
  misc_feature (1)..(968): Ceres Seq. ID no. 13616516
  misc_feature: MA Experiment ID: 108435 Result: Down-regulated in Transcription
  misc_feature: MA Experiment 108435 PARAMETER Experiment Name: At_stm_Mutants_cDNA_P Parameter: Plant Line Value: wt Landsburg vs stm
  misc_feature: MA Experiment 108435 PARAMETER Experiment Name: At_stm_Mutants_cDNA_P Parameter: Tissue Value: Shoot Apical Meristem Region
  misc_feature: MA Experiment ID: 108461 Result: Up-regulated in Transcription
  misc_feature: MA Experiment 108461 PARAMETER Experiment Name: At_Germinating_Seeds_cDNA_P Parameter: Age (day) Value: 1 vs. 0
  misc_feature: MA Experiment 108461 PARAMETER Experiment Name: At_Germinating_Seeds_cDNA_P Parameter: Tissue Value: Germinating Seeds
  misc_feature: MA Experiment ID: 108462 Result: Up-regulated in Transcription
  misc_feature: MA Experiment 108462 PARAMETER Experiment Name: At_Germinating_Seeds_cDNA_P Parameter: Age (day) Value: 2 vs. 0
  misc_feature: MA Experiment 108462 PARAMETER Experiment Name: At_Germinating_Seeds_cDNA_P Parameter: Tissue Value: Germinating Seeds
  misc_feature: MA Experiment ID: 108488 Result: Up-regulated in Transcription
  misc_feature: MA Experiment ID: 108561 Result: Down-regulated in Transcription
  misc_feature: MA Experiment 108561 PARAMETER Experiment Name: At_100uM_ABA_cDNA_P Parameter: Timepoint (hr) Value: 6
  misc_feature: MA Experiment 108561 PARAMETER Experiment Name: At_100uM_ABA_cDNA_P Parameter: Tissue Value: Aerial
  misc_feature: MA Experiment 108561 PARAMETER Experiment Name: At_100uM_ABA_cDNA_P Parameter: Treatment Value: 100uM ABA vs. No Treatment
  misc_feature: MA Experiment ID: 108573 Result: Down-regulated in Transcription
  misc_feature: MA Experiment 108573 PARAMETER Experiment Name: At_Drought_cDNA_P Parameter: Timepoint (hr) Value: 6
  misc_feature: MA Experiment 108573 PARAMETER Experiment Name: At_Drought_cDNA_P Parameter: Tissue Value: Aerial
  misc_feature: MA Experiment 108573 PARAMETER Experiment Name: At_Drought_cDNA_P Parameter: Treatment Value: Drought vs. No Drought
  misc_feature: MA Experiment ID: 108585 Result: Down-regulated in Transcription
  misc_feature: MA Experiment 108585 PARAMETER Experiment Name: At_5mM_NaNP_cDNA_P Parameter: Timepoint (hr) Value: 6
  misc_feature: MA Experiment 108585 PARAMETER Experiment Name: At_5mM_NaNP_cDNA_P Parameter: Tissue Value: Aerial
  misc_feature: MA Experiment 108585 PARAMETER Experiment Name: At_5mM_NaNP_cDNA_P Parameter: Treatment Value: null
  misc_feature: MA Experiment ID: 108595 Result: Down-regulated in Transcription
  misc_feature: MA Experiment 108595 PARAMETER Experiment Name: At_Ler-pi_Ovule_cDNA_P Parameter: Plant Line Value: null
  misc_feature: MA Experiment ID: 108607 Result: Down-regulated in Transcription
  misc_feature: MA Experiment 108607 PARAMETER Experiment Name: At_100uM_ABA_cDNA_P Parameter: Timepoint (hr) Value: 4
  misc_feature: MA Experiment 108607 PARAMETER Experiment Name: At_100uM_ABA_cDNA_P Parameter: Tissue Value: Aerial
  misc_feature: MA Experiment 108607 PARAMETER Experiment Name: At_100uM_ABA_cDNA_P Parameter: Treatment Value: 100uM ABA vs. No Treatment
  misc_feature: MA Experiment ID: 108668 Result: Down-regulated in Transcription
  misc_feature: MA Experiment 108668 PARAMETER Experiment Name: At_2mM_SA_cDNA_P Parameter: Plant Line Value: WS
  misc_feature: MA Experiment 108668 PARAMETER Experiment Name: At_2mM_SA_cDNA_P Parameter: Timepoint (hr) Value: 6
  misc_feature: MA Experiment 108668 PARAMETER Experiment Name: At_2mM_SA_cDNA_P Parameter: Treatment Value: 2mM SA vs. No Treatment
  misc_feature: MA Experiment ID: 20000070 Result: Down-regulated in Transcription
  misc_feature: MA Experiment 20000070 PARAMETER Experiment Name: At_100uM_ABA_Mutants_cDNA_P Parameter: Plant Line Value: CS24
  misc_feature: MA Experiment 20000070 PARAMETER Experiment Name: At_100uM_ABA_Mutants_cDNA_P Parameter: Timepoint (hr) Value: 6
  misc_feature: MA Experiment 20000070 PARAMETER Experiment Name: At_100uM_ABA_Mutants_cDNA_P Parameter: Tissue Value: Aerial
  misc_feature: MA Experiment 20000070 PARAMETER Experiment Name: At_100uM_ABA_Mutants_cDNA_P Parameter: Treatment Value: 100uM ABA vs. No Treatment
  misc_feature: MA Experiment ID: 20000071 Result: Down-regulated in Transcription
  misc_feature: MA Experiment 20000071 PARAMETER Experiment Name: At_100uM_ABA_Mutants_cDNA_P Parameter: Plant Line Value: CS8104
  misc_feature: MA Experiment 20000071 PARAMETER Experiment Name: At_100uM_ABA_Mutants_cDNA_P Parameter: Timepoint (hr) Value: 6
  misc_feature: MA Experiment 20000071 PARAMETER Experiment Name: At_100uM_ABA_Mutants_cDNA_P Parameter: Tissue Value: Aerial
  misc_feature: MA Experiment 20000071 PARAMETER Experiment Name: At_100uM_ABA_Mutants_cDNA_P Parameter: Treatment Value: 100uM ABA vs. No Treatment
  misc_feature: MA Experiment ID: 20000086 Result: Down-regulated in Transcription
  misc_feature: MA Experiment 20000086 PARAMETER Experiment Name: At_100uM_ABA_Mutants_cDNA_P Parameter: Plant Line Value: CS22
  misc_feature: MA Experiment 20000086 PARAMETER Experiment Name: At_100uM_ABA_Mutants_cDNA_P Parameter: Timepoint (hr) Value: 6
  misc_feature: MA Experiment 20000086 PARAMETER Experiment Name: At_100uM_ABA_Mutants_cDNA_P Parameter: Tissue Value: Aerial
  misc_feature: MA Experiment 20000086 PARAMETER Experiment Name: At_100uM_ABA_Mutants_cDNA_P Parameter: Treatment Value: 100uM ABA vs. No Treatment
  misc_feature: MA Experiment ID: 20000112 Result: Down-regulated in Transcription
  misc_feature: MA Experiment 20000112 PARAMETER Experiment Name: At_42deg_Heat_cDNA_P Parameter: Temperature (deg C) Value: 42 vs. 22
  misc_feature: MA Experiment 20000112 PARAMETER Experiment Name: At_42deg_Heat_cDNA_P Parameter: Timepoint (hr) Value: 2
  misc_feature: MA Experiment 20000112 PARAMETER Experiment Name: At_42deg_Heat_cDNA_P Parameter: Tissue Value: Aerial
  misc_feature: MA Experiment ID: 20000113 Result: Down-regulated in Transcription
  misc_feature: MA Experiment 20000113 PARAMETER Experiment Name: At_42deg_Heat_cDNA_P Parameter: Temperature (deg C) Value: 42 vs. 22
  misc_feature: MA Experiment 20000113 PARAMETER Experiment Name: At_42deg_Heat_cDNA_P Parameter: Timepoint (hr) Value: 8
  misc_feature: MA Experiment 20000113 PARAMETER Experiment Name: At_42deg_Heat_cDNA_P Parameter: Tissue Value: Aerial
  misc_feature: MA Experiment ID: 20000117 Result: Down-regulated in Transcription
  misc_feature: MA Experiment 20000117 PARAMETER Experiment Name: At_100uM_ABA_Mutants_cDNA_P Parameter: Plant Line Value: Columbia
  misc_feature: MA Experiment 20000117 PARAMETER Experiment Name: At_100uM_ABA_Mutants_cDNA_P Parameter: Timepoint (hr) Value: 6
  misc_feature: MA Experiment 20000117 PARAMETER Experiment Name: At_100uM_ABA_Mutants_cDNA_P Parameter: Tissue Value: Aerial
  misc_feature: MA Experiment 20000117 PARAMETER Experiment Name: At_100uM_ABA_Mutants_cDNA_P Parameter: Treatment Value: 100uM ABA vs. No Treatment
  misc_feature: MA Experiment ID: 20000173 Result: Down-regulated in Transcription
  misc_feature: MA Experiment 20000173 PARAMETER Experiment Name: At_42deg_Heat_P Parameter: Age (day) Value: 14
  misc_feature: MA Experiment 20000173 PARAMETER Experiment Name: At_42deg_Heat_P Parameter: Organism Value: A. thaliana
  misc_feature: MA Experiment 20000173 PARAMETER Experiment Name: At_42deg_Heat_P Parameter: Plant Line Value: WS
  misc_feature: MA Experiment 20000173 PARAMETER Experiment Name: At_42deg_Heat_P Parameter: Temperature (deg C) Value: 42 vs. 22
  misc_feature: MA Experiment 20000173 PARAMETER Experiment Name: At_42deg_Heat_P Parameter: Timepoint (hr) Value: 6
  misc_feature: MA Experiment 20000173 PARAMETER Experiment Name: At_42deg_Heat_P Parameter: Tissue Value: Aerial
  misc_feature: MA Experiment ID: 20000180 Result: Up-regulated in Transcription
  misc_feature: MA Experiment 20000180 PARAMETER Experiment Name: At_Germinating_Seeds_P Parameter: Age (hr) Value: 24 vs. 0
  misc_feature: MA Experiment 20000180 PARAMETER Experiment Name: At_Germinating_Seeds_P Parameter: Tissue Value: Germinating Seeds
  misc_feature: MA Experiment ID: 20000182 Result: Down-regulated in Transcription
  misc_feature: MA Experiment 20000182 PARAMETER Experiment Name: At_2mM_SA_P Parameter: Age (day) Value: 14
  misc_feature: MA Experiment 20000182 PARAMETER Experiment Name: At_2mM_SA_P Parameter: Organism Value: A. thaliana
  misc_feature: MA Experiment 20000182 PARAMETER Experiment Name: At_2mM_SA_P Parameter: Plant Line Value: WS
  misc_feature: MA Experiment 20000182 PARAMETER Experiment Name: At_2mM_SA_P Parameter: Timepoint (hr) Value: 6
  misc_feature: MA Experiment 20000182 PARAMETER Experiment Name: At_2mM_SA_P Parameter: Tissue Value: Aerial
  misc_feature: MA Experiment 20000182 PARAMETER Experiment Name: At_2mM_SA_P Parameter: Treatment Value: 2mM SA vs. No Treatment
  misc_feature: MA Experiment ID: 20000185 Result: Down-regulated in Transcription
  misc_feature: MA Experiment 20000185 PARAMETER Experiment Name: At_Roots__P Parameter: Age (day) Value: 7 vs. 21
  misc_feature: MA Experiment 20000185 PARAMETER Experiment Name: At_Roots__P Parameter: Organism Value: A. thaliana
  misc_feature: MA Experiment 20000185 PARAMETER Experiment Name: At_Roots__P Parameter: Tissue Value: Roots vs. Whole Plant
  misc_feature: MA Experiment ID: 20000224 Result: Up-regulated in Transcription
  misc_feature: MA Experiment ID: 20000234 Result: Up-regulated in Transcription
  misc_feature: MA Experiment 20000234 PARAMETER Experiment Name: At_Siliques_P Parameter: Age (day) Value: 21
  misc_feature: MA Experiment 20000234 PARAMETER Experiment Name: At_Siliques_P Parameter: Organism Value: A. thaliana
  misc_feature: MA Experiment 20000234 PARAMETER Experiment Name: At_Siliques_P Parameter: Plant Line Value: WS
  misc_feature: MA Experiment 20000234 PARAMETER Experiment Name: At_Siliques_P Parameter: Tissue Value: Less Than 5mm Siliques vs. Whole Plant
  misc_feature: MA Experiment ID: 20000437 Result: Down-regulated in Transcription
  misc_feature: MA Experiment 20000437 PARAMETER Experiment Name: At_Drought_P Parameter: Age (day) Value: 8
  misc_feature: MA Experiment 20000437 PARAMETER Experiment Name: At_Drought_P Parameter: Organism Value: A. thaliana
  misc_feature: MA Experiment 20000437 PARAMETER Experiment Name: At_Drought_P Parameter: Plant Line Value: WS
  misc_feature: MA Experiment 20000437 PARAMETER Experiment Name: At_Drought_P Parameter: Timepoint (hr) Value: 24
  misc_feature: MA Experiment 20000437 PARAMETER Experiment Name: At_Drought_P Parameter: Tissue Value: Whole Plant
  misc_feature: MA Experiment 20000437 PARAMETER Experiment Name: At_Drought_P Parameter: Treatment Value: Drought vs. No Drought
  misc_feature: MA Experiment ID: 20000438 Result: Up-regulated in Transcription
  misc_feature: MA Experiment 20000438 PARAMETER Experiment Name: At_Shoots__P Parameter: Age (day) Value: 14
  misc_feature: MA Experiment 20000438 PARAMETER Experiment Name: At_Shoots__P Parameter: Tissue Value: Shoots vs. Whole Plant
  misc_feature: MA Experiment ID: 20000439 Result: Down-regulated in Transcription
  misc_feature: MA Experiment 20000439 PARAMETER Experiment Name: At_Roots__P Parameter: Age (day) Value: 14 vs. 21
  misc_feature: MA Experiment 20000439 PARAMETER Experiment Name: At_Roots__P Parameter: Organism Value: A. thaliana
  misc_feature: MA Experiment 20000439 PARAMETER Experiment Name: At_Roots__P Parameter: Tissue Value: Roots vs. Whole Plant
  misc_feature: MA Experiment ID: 20000794 Result: Down-regulated in Transcription
  misc_feature: MA Experiment 20000794 PARAMETER Experiment Name: At_Petals_P Parameter: Age (day) Value: 23-25 days
  misc_feature: MA Experiment 20000794 PARAMETER Experiment Name: At_Petals_P Parameter: Plant Line Value: WS
  misc_feature: MA Experiment 20000794 PARAMETER Experiment Name: At_Petals_P Parameter: Tissue Value: Petals vs. Whole plant
  misc_feature: MA Experiment ID: 20001248 Result: Down-regulated in Transcription
  misc_feature: MA Experiment 20001248 PARAMETER Experiment Name: At_Far-red-induction_P Parameter: Age (day) Value: 7
  misc_feature: MA Experiment 20001248 PARAMETER Experiment Name: At_Far-red-induction_P Parameter: Light Value: Far-red vs. White
  misc_feature: MA Experiment 20001248 PARAMETER Experiment Name: At_Far-red-induction_P Parameter: Organism Value: A. thaliana
  misc_feature: MA Experiment 20001248 PARAMETER Experiment Name: At_Far-red-induction_P Parameter: Plant Line Value: Columbia
  misc_feature: MA Experiment 20001248 PARAMETER Experiment Name: At_Far-red-induction_P Parameter: Timepoint (hr) Value: 4
  misc_feature: MA Experiment 20001248 PARAMETER Experiment Name: At_Far-red-induction_P Parameter: Tissue Value: Whole Plant
  misc_feature: MA Experiment ID: 20001450 Result: Down-regulated in Transcription
  misc_feature: MA Experiment 20001450 PARAMETER Experiment Name: At_Far-red-induction_P Parameter: Age (day) Value: 7
  misc_feature: MA Experiment 20001450 PARAMETER Experiment Name: At_Far-red-induction_P Parameter: Light Value: Far-red vs. White
  misc_feature: MA Experiment 20001450 PARAMETER Experiment Name: At_Far-red-induction_P Parameter: Organism Value: A. thaliana
  misc_feature: MA Experiment 20001450 PARAMETER Experiment Name: At_Far-red-induction_P Parameter: Plant Line Value: Columbia
  misc_feature: MA Experiment 20001450 PARAMETER Experiment Name: At_Far-red-induction_P Parameter: Timepoint (hr) Value: 8
  misc_feature: MA Experiment 20001450 PARAMETER Experiment Name: At_Far-red-induction_P Parameter: Tissue Value: Whole Plant
  misc_feature: MA Experiment ID: 20001905 Result: Down-regulated in Transcription
  misc_feature: MA Experiment 20001905 PARAMETER Experiment Name: At_Drought_Reproduction_P Parameter: Age (day) Value: 40
  misc_feature: MA Experiment 20001905 PARAMETER Experiment Name: At_Drought_Reproduction_P Parameter: Organism Value: A. thaliana
  misc_feature: MA Experiment 20001905 PARAMETER Experiment Name: At_Drought_Reproduction_P Parameter: Plant Line Value: WS
  misc_feature: MA Experiment 20001905 PARAMETER Experiment Name: At_Drought_Reproduction_P Parameter: Timepoint (day) Value: 10
  misc_feature: MA Experiment 20001905 PARAMETER Experiment Name: At_Drought_Reproduction_P Parameter: Tissue Value: Rosettes
  misc_feature: MA Experiment 20001905 PARAMETER Experiment Name: At_Drought_Reproduction_P Parameter: Treatment Value: Drought vs. No Drought
  misc_feature: MA Experiment ID: 20001906 Result: Down-regulated in Transcription
  misc_feature: MA Experiment 20001906 PARAMETER Experiment Name: At_Drought_Reproduction_P Parameter: Age (day) Value: 35
  misc_feature: MA Experiment 20001906 PARAMETER Experiment Name: At_Drought_Reproduction_P Parameter: Organism Value: A. thaliana
  misc_feature: MA Experiment 20001906 PARAMETER Experiment Name: At_Drought_Reproduction_P Parameter: Plant Line Value: WS
  misc_feature: MA Experiment 20001906 PARAMETER Experiment Name: At_Drought_Reproduction_P Parameter: Timepoint (day) Value: 5
  misc_feature: MA Experiment 20001906 PARAMETER Experiment Name: At_Drought_Reproduction_P Parameter: Tissue Value: Siliques
  misc_feature: MA Experiment 20001906 PARAMETER Experiment Name: At_Drought_Reproduction_P Parameter: Treatment Value: Drought vs. No Drought
  misc_feature: MA Experiment ID: 20001908 Result: Down-regulated in Transcription
  misc_feature: MA Experiment 20001908 PARAMETER Experiment Name: At_Drought_Reproduction_P Parameter: Age (day) Value: 40
  misc_feature: MA Experiment 20001908 PARAMETER Experiment Name: At_Drought_Reproduction_P Parameter: Organism Value: A. thaliana
  misc_feature: MA Experiment 20001908 PARAMETER Experiment Name: At_Drought_Reproduction_P Parameter: Plant Line Value: WS
  misc_feature: MA Experiment 20001908 PARAMETER Experiment Name: At_Drought_Reproduction_P Parameter: Timepoint (day) Value: 10
  misc_feature: MA Experiment 20001908 PARAMETER Experiment Name: At_Drought_Reproduction_P Parameter: Tissue Value: Siliques
  misc_feature: MA Experiment 20001908 PARAMETER Experiment Name: At_Drought_Reproduction_P Parameter: Treatment Value: Drought vs. No Drought
agaaccactagttgtgatttgtgaaactctgaagtaaagaagaaaccacaacaatggcgttgttctccccgccaatctcttcttcatctcttcaaaatcccaatttcattcccaaattttcattctccctcctctccagtaaccgcttctctctcctctccgtcactcgagcttcctccgacagtggatcaacctctcccaccgccgccgtctccgtggaggctcctgagcccgtggaagtgatagttaaagagcctccgcaatcaacaccggcggttaaaaaggaagaaaccgccaccgctaaaaatgtcgccgtcgaaggtgaagagatgaaaacaacggagagtgttgtcaaattccaggatgcgagatggattaatggaacttgggatctgaaacagttcgagaaagatggaaaaaccgattgggattctgtaatcgttgctgaggcaaagagaagaaaatggctagaagagaatccagaaacaacgagtaacgacgaaccagtgcttttcgatacatcgattattccatggtgggcttggattaagagataccacttacctgaagctgaactcttaaatggtcgtgcggcgatgataggattctttatggcttactttgtcgatagtcttaccggagtaggacttgttgatcaaatggggaatttcttctgcaagacactattgtttgtggctgtggctggagttttgtttattcgtaagaatgaggatgtggataaactcaagaacttgtttgatgagactacattgtatgataagcaatggcaagcagcttggaaaaatgatgatgatgagtcattgggttctaagaagaagtgataacaaagattcttgctttctttttttgttgttgttgtaattaggagatgaacttaccaaatgtaatatcaagagatttgaacaatgtttcctcagattaccgttaatcatgtctagtctctactt

SEQ ID NO: 105130 - protein, 262 aa, Arabidopsis thaliana
  peptide (1)..(262): Ceres Seq. ID no. 13616517
  misc_feature (1)..(262): Homolog of NCBI NO: 7485188 NR Description: hypothetical protein - Arabidopsis thaliana hypothetical protein [Arabidopsis thaliana]
  misc_feature (1)..(262): Homolog of NCBI NO: 18414927 NR Description: Lil3 protein [Arabidopsis thaliana]
  misc_feature (1)..(262): Homolog of NCBI NO: 21555799 NR Description: Lil3 protein [Arabidopsis thaliana]
  misc_feature (1)..(261): Homolog of NCBI NO: 30695110 NR Description: Lil3 protein [Arabidopsis thaliana]
  misc_feature (1)..(261): Homolog of NCBI NO: 8978078 NR Description: Lil3 protein [Arabidopsis thaliana]
MALFSPPISSSSLQNPNFIPKFSFSLLSSNRFSLLSVTRASSDSGSTSPTAAVSVEAPEPVEVIVKEPPQSTPAVKKEETATAKNVAVEGEEMKTTESVVKFQDARWINGTWDLKQFEKDGKTDWDSVIVAEAKRRKWLEENPETTSNDEPVLFDTSIIPWWAWIKRYHLPEAELLNGRAAMIGFFMAYFVDSLTGVGLVDQMGNFFCKTLLFVAVAGVLFIRKNEDVDKLKNLFDETTLYDKQWQAAWKNDDDESLGSKKK

SEQ ID NO: 105131 - protein, 170 aa, Arabidopsis thaliana
  peptide (1)..(170): Ceres Seq. ID no. 13616518
  misc_feature (1)..(170): Homolog of NCBI NO: 7485188 NR Description: hypothetical protein - Arabidopsis thaliana hypothetical protein [Arabidopsis thaliana]
  misc_feature (1)..(170): Homolog of NCBI NO: 18414927 NR Description: Lil3 protein [Arabidopsis thaliana]
  misc_feature (1)..(170): Homolog of NCBI NO: 21555799 NR Description: Lil3 protein [Arabidopsis thaliana]
  misc_feature (1)..(169): Homolog of NCBI NO: 30695110 NR Description: Lil3 protein [Arabidopsis thaliana]
  misc_feature (1)..(169): Homolog of NCBI NO: 8978078 NR Description: Lil3 protein [Arabidopsis thaliana]
MKTTESVVKFQDARWINGTWDLKQFEKDGKTDWDSVIVAEAKRRKWLEENPETTSNDEPVLFDTSIIPWWAWIKRYHLPEAELLNGRAAMIGFFMAYFVDSLTGVGLVDQMGNFFCKTLLFVAVAGVLFIRKNEDVDKLKNLFDETTLYDKQWQAAWKNDDDESLGSKKK

SEQ ID NO: 105132 - DNA, 2958 bp, Arabidopsis thaliana
  misc_feature (1)..(2958): Ceres Seq. ID no. 13616523
  misc_feature: MA Experiment ID: 108434 Result: Up-regulated in Transcription
  misc_feature: MA Experiment 108434 PARAMETER Experiment Name: At_Root_Tips_cDNA_P Parameter: Tissue Value: Root Tips
  misc_feature: MA Experiment ID: 108461 Result: Up-regulated in Transcription
  misc_feature: MA Experiment 108461 PARAMETER Experiment Name: At_Germinating_Seeds_cDNA_P Parameter: Age (day) Value: 1 vs. 0
  misc_feature: MA Experiment 108461 PARAMETER Experiment Name: At_Germinating_Seeds_cDNA_P Parameter: Tissue Value: Germinating Seeds
  misc_feature: MA Experiment ID: 108462 Result: Up-regulated in Transcription
  misc_feature: MA Experiment 108462 PARAMETER Experiment Name: At_Germinating_Seeds_cDNA_P Parameter: Age (day) Value: 2 vs. 0
  misc_feature: MA Experiment 108462 PARAMETER Experiment Name: At_Germinating_Seeds_cDNA_P Parameter: Tissue Value: Germinating Seeds
  misc_feature: MA Experiment ID: 108463 Result: Up-regulated in Transcription
  misc_feature: MA Experiment 108463 PARAMETER Experiment Name: At_Germinating_Seeds_cDNA_P Parameter: Age (day) Value: 3 vs. 0
  misc_feature: MA Experiment 108463 PARAMETER Experiment Name: At_Germinating_Seeds_cDNA_P Parameter: Tissue Value: Germinating Seeds
  misc_feature: MA Experiment ID: 108489 Result: Down-regulated in Transcription
  misc_feature: MA Experiment ID: 108573 Result: Down-regulated in Transcription
  misc_feature: MA Experiment 108573 PARAMETER Experiment Name: At_Drought_cDNA_P Parameter: Timepoint (hr) Value: 6
  misc_feature: MA Experiment 108573 PARAMETER Experiment Name: At_Drought_cDNA_P Parameter: Tissue Value: Aerial
  misc_feature: MA Experiment 108573 PARAMETER Experiment Name: At_Drought_cDNA_P Parameter: Treatment Value: Drought vs. No Drought
  misc_feature: MA Experiment ID: 108607 Result: Up-regulated in Transcription
  misc_feature: MA Experiment 108607 PARAMETER Experiment Name: At_100uM_ABA_cDNA_P Parameter: Timepoint (hr) Value: 4
  misc_feature: MA Experiment 108607 PARAMETER Experiment Name: At_100uM_ABA_cDNA_P Parameter: Tissue Value: Aerial
  misc_feature: MA Experiment 108607 PARAMETER Experiment Name: At_100uM_ABA_cDNA_P Parameter: Treatment Value: 100uM ABA vs. No Treatment
  misc_feature: MA Experiment ID: 108668 Result: Down-regulated in Transcription
  misc_feature: MA Experiment 108668 PARAMETER Experiment Name: At_2mM_SA_cDNA_P Parameter: Plant Line Value: WS
  misc_feature: MA Experiment 108668 PARAMETER Experiment Name: At_2mM_SA_cDNA_P Parameter: Timepoint (hr) Value: 6
  misc_feature: MA Experiment 108668 PARAMETER Experiment Name: At_2mM_SA_cDNA_P Parameter: Treatment Value: 2mM SA vs. No Treatment
  misc_feature: MA Experiment ID: 20000090 Result: Down-regulated in Transcription
  misc_feature: MA Experiment ID: 20000307 Result: Up-regulated in Transcription
  misc_feature: MA Experiment 20000307 PARAMETER Experiment Name: At_Germinating_Seeds_Sub_P Parameter: Age (hr) Value: 24 vs. 0
  misc_feature: MA Experiment 20000307 PARAMETER Experiment Name: At_Germinating_Seeds_Sub_P Parameter: Organism Value: A. thaliana
  misc_feature: MA Experiment 20000307 PARAMETER Experiment Name: At_Germinating_Seeds_Sub_P Parameter: Plant Line Value: WS
  misc_feature: MA Experiment 20000307 PARAMETER Experiment Name: At_Germinating_Seeds_Sub_P Parameter: Tissue Value: Germinating Seeds
  misc_feature: MA Experiment ID: 20000328 Result: Down-regulated in Transcription
  misc_feature: MA Experiment 20000328 PARAMETER Experiment Name: At_42deg_Heat_Sub_P Parameter: Age (day) Value: 14
  misc_feature: MA Experiment 20000328 PARAMETER Experiment Name: At_42deg_Heat_Sub_P Parameter: Organism Value: A. thaliana
  misc_feature: MA Experiment 20000328 PARAMETER Experiment Name: At_42deg_Heat_Sub_P Parameter: Plant Line Value: WS
  misc_feature: MA Experiment 20000328 PARAMETER Experiment Name: At_42deg_Heat_Sub_P Parameter: Temperature (deg C) Value: 42 vs. 22
  misc_feature: MA Experiment 20000328 PARAMETER Experiment Name: At_42deg_Heat_Sub_P Parameter: Timepoint (hr) Value: 6
  misc_feature: MA Experiment 20000328 PARAMETER Experiment Name: At_42deg_Heat_Sub_P Parameter: Tissue Value: Aerial
  misc_feature: MA Experiment ID: 20000347 Result: Down-regulated in Transcription
  misc_feature: MA Experiment 20000347 PARAMETER Experiment Name: At_2mM_SA_Sub_P Parameter: Age (day) Value: 14
  misc_feature: MA Experiment 20000347 PARAMETER Experiment Name: At_2mM_SA_Sub_P Parameter: Organism Value: A. thaliana
  misc_feature: MA Experiment 20000347 PARAMETER Experiment Name: At_2mM_SA_Sub_P Parameter: Plant Line Value: WS
  misc_feature: MA Experiment 20000347 PARAMETER Experiment Name: At_2mM_SA_Sub_P Parameter: Timepoint (hr) Value: 6
  misc_feature: MA Experiment 20000347 PARAMETER Experiment Name: At_2mM_SA_Sub_P Parameter: Tissue Value: Aerial
  misc_feature: MA Experiment 20000347 PARAMETER Experiment Name: At_2mM_SA_Sub_P Parameter: Treatment Value: 2mM SA vs. No Treatment
  misc_feature: MA Experiment ID: 20000348 Result: Up-regulated in Transcription
  misc_feature: MA Experiment 20000348 PARAMETER Experiment Name: At_100uM_ABA_Sub_P Parameter: Age (day) Value: 14
  misc_feature: MA Experiment 20000348 PARAMETER Experiment Name: At_100uM_ABA_Sub_P Parameter: Organism Value: A. thaliana
  misc_feature: MA Experiment 20000348 PARAMETER Experiment Name: At_100uM_ABA_Sub_P Parameter: Plant Line Value: WS
  misc_feature: MA Experiment 20000348 PARAMETER Experiment Name: At_100uM_ABA_Sub_P Parameter: Timepoint (hr) Value: 1
  misc_feature: MA Experiment 20000348 PARAMETER Experiment Name: At_100uM_ABA_Sub_P Parameter: Tissue Value: Aerial
  misc_feature: MA Experiment 20000348 PARAMETER Experiment Name: At_100uM_ABA_Sub_P Parameter: Treatment Value: 100uM ABA vs. No Treatment
  misc_feature: MA Experiment ID: 20000355 Result: Up-regulated in Transcription
  misc_feature: MA Experiment 20000355 PARAMETER Experiment Name: At_Siliques_Sub_P Parameter: Age (day) Value: 21
  misc_feature: MA Experiment 20000355 PARAMETER Experiment Name: At_Siliques_Sub_P Parameter: Organism Value: A. thaliana
  misc_feature: MA Experiment 20000355 PARAMETER Experiment Name: At_Siliques_Sub_P Parameter: Plant Line Value: WS
  misc_feature: MA Experiment 20000355 PARAMETER Experiment Name: At_Siliques_Sub_P Parameter: Tissue Value: Less Than 5mm Siliques vs. Whole Plant
  misc_feature: MA Experiment ID: 20001807 Result: Down-regulated in Transcription
  misc_feature: MA Experiment 20001807 PARAMETER Experiment Name: At_50mM_NH4NO3_L-to-H_Sub_P Parameter: Timepoint (hr) Value: 6
  misc_feature: MA Experiment 20001807 PARAMETER Experiment Name: At_50mM_NH4NO3_L-to-H_Sub_P Parameter: Tissue Value: Leaf
  misc_feature: MA Experiment 20001807 PARAMETER Experiment Name: At_50mM_NH4NO3_L-to-H_Sub_P Parameter: Treatment Value: 50mM NH4NO3 vs 100mM Mannitol
agagaagagaatcttccaaaaatgttaaatcttgtgaaacaaataaagcatagcaaagcaaagtccaaagtccaatgagctaaaacaaaatcaaaaaggtttctttatgtttttttttttgaagtaagaaaaaaaaagagtttataaagaaacagtggagaaataaatagcagaacaaagagaaagatcggagaaaagaatctttttaggctctctctcgcagacttcgcactcacacactcacttccattgctccaaaaaaacattgtatctacttcacttgctgtagagatatggtatcaagatcttattcaaacctcttggatcttgcttctggtaacttccattcgttttctcgagaaaagaagaggtttccaagagtagcaactgtcactggtgtcttatctgagctagatgatgataacaacagcaacagtgtctgctctgatgctccttcttccgtcacacaagatcgaatcatcatcgttggaaaccagcttcctattaaatcacatcggaactctgctggtaaattgagttttagttgggacaatgactcgcttctcttgcagcttaaagatggtatgcgtgaagatatggaagttgtctacattggttgccttaaggaacagattgatacagttgagcaagatgatgtttctcaaaggttgcttgagaatttcaaatgtgttcctgcttatatcccacctgagctattcactaagtactatcatggattctgtaagcaacatctatggcctttgtttcactacatgcttcccttaactcctgatcttggtggtagatttgatcgttctttatggcaagcttatctttcggttaacaagatctttgctgataaagtgatggaagtgattagtcctgatgatgattttgtttgggttcatgactatcacttaatggttttgcctacatttctaaggaagaggtttaatagagtaaagcttggttttttccttcatagcccgttcccttcctctgagatttaccgtactcttccagtgagaaatgagctcttacgtgcactcctcaacgctgatttgattggctttcatacctttgactatgcaagacacttcctttcttgttgtagcaggatgcttggtttatcctatcagtccaaacgtggaaccatagggcttgagtattatggtcgaacggttagtatcaagattcttcctgtggggattcatatcagccagcttcagtcaattttaaacctcccagagactcagaccaaagttgctgagctaagagatcagttcttggatcagaaagttcttctcggtgttgatgacatggacatcttcaaaggaatcagcctcaaactcttggcaatggaacaacttctcacacagcatcccgagaagagaggtcgagttgtacttgtccagattgcaaaccctgcaagaggtcgtgggaaagacgttcaggaggttcagtctgaaactgaagccacggttaaaaggatcaatgaaatgtttggaaggccgggctaccaacccgtggttctgattgatacaccgcttcaattctttgagaggattgcttactatgtcattgcagagtgttgtcttgttacagcggtaagagatggtatgaatcttataccttatgagtacattatctgcaggcaaggtaatccgaaactcaacgagactataggccttgacccttctgctgcaaagaagagtatgcttgttgtctctgagtttattggttgttctccttctttaagcggcgccattagagtaaatccgtggaacattgatgctgtgactgaagcaatggactatgcattgatagtttcagaagcagagaagcaaatgcgtcacgagaagcatcacaaatatgttagcacacatgatgttgcttattgggcgcgtagctttatacaagatcttgaaagggcttgcggggatcatgtgaggaagaggtgttgggggattggattcgggttaggctttagagttgtggcgcttgatccgagttttaaaaagctttcgattgagcacattgtctcagcttataagagaaccaagaaccgagccattttgttggattatgatggcacaatggtgcagccaggttccattaggacaacaccaacccgcgaaacaatcgaaatcttgaacaacctgtctagtgatcccaagaatatcgtgtacctcgtcagtgggaaagacagaaggacactaactgaatggttttcttcatgtgacgatctcggtttgggtgcagagcacgggtattttataaggccaaatgatggaacagactgggaaacgtcgagtttggtatcaggttttgagtggaaacaaatagcagagccagtgatgagactttacactgagactacagatggatcaacaatagagactaaagagactgctctcgtttggaattaccaattcgcagatcctgattttggatcttgtcaagccaaagagcttatggaacacctcgaaagcgtgcttaccaatgatccagtctctgtcaagactggacaacaactcgttgaagttaaaccacagggtgtgaacaaaggtcttgtggcagagaggcttctaacaacgatgcaagaaaaagggaaacttttggatttcattctctgcgtcggtgatgatcggtctgatgaggatatgtttgaggtgataatgagtgctaaagatggtccagctttgtctcctgtggctgagatattcgcttgcaccgttggacaaaagccaagcaaagcaaaatactatttagacgatactgcggagataatcagaatgctggacggtctagccgctaccaacacaactatctctgatcaaactgattcaaccgccactgttccaactaaagatctgttttaaggatttgtgaacgaaagttttagtgggtttgttgttgtgatttgtgaatgctttttcaaatataatggattaaggt

SEQ ID NO: 105133 - protein, 862 aa, Arabidopsis thaliana; identical to SEQ ID NO: 38304
  peptide (1)..(862): Ceres Seq. ID no. 13616524
  misc_feature (60)..(546): Pfam Name: Glycosyltransferase family 20 Pfam Description: Glycosyltransferase family 20
  misc_feature (1)..(860): Homolog of NCBI NO: 34902280 NR Description: Putative trehalose-6-phosphate synthase [Oryza
  misc_feature (1)..(840): Homolog of NCBI NO: 15221478 NR Description: trehalose phosphatase family [Arabidopsis
  misc_feature (1)..(851): Homolog of NCBI NO: 19568935 NR Description: putative trehalose synthase [Solanum tuberosum]
  misc_feature (1)..(862): Homolog of NCBI NO: 15220891 NR Description: trehalose phosphatase family [Arabidopsis >gi|9369388|gb|AAF87136.1|AC002423_1 T23E23.3 [Arabidopsis
  misc_feature (1)..(844): Homolog of NCBI NO: 15219002 NR Description: trehalose phosphatase family [Arabidopsis
  misc_feature (25)..(852): Homolog of NCBI NO: 34910846 NR Description: putative trehalose-6-phosphate synthase [Oryza
  misc_feature (1)..(853): Homolog of NCBI NO: 30698024 NR Description: alpha,alpha-trehalose-phosphate synthase,
  misc_feature (14)..(861): Homolog of NCBI NO: 34909526 NR Description: putative trehalose-6-phosphate synthase homolog
  misc_feature (149)..(492): Homolog of NCBI NO: 34391866 NR Description: trehalose-6-phosphate phosphatase [Emericella
  misc_feature (474)..(799): Homolog of NCBI NO: 34391866 NR Description: trehalose-6-phosphate phosphatase [Emericella

SEQ ID NO: 105134 - protein, 765 aa, Arabidopsis thaliana; identical to SEQ ID NO: 38305
  peptide (1)..(765): Ceres Seq. ID no. 13616525
  misc_feature (1)..(449): Pfam Name: Glycosyltransferase family 20 Pfam Description: Glycosyltransferase family 20
  misc_feature (1)..(763): Homolog of NCBI NO: 34902280 NR Description: Putative trehalose-6-phosphate synthase [Oryza
  misc_feature (1)..(743): Homolog of NCBI NO: 15221478 NR Description: trehalose phosphatase family [Arabidopsis
  misc_feature (1)..(754): Homolog of NCBI NO: 19568935 NR Description: putative trehalose synthase [Solanum tuberosum]
  misc_feature (1)..(765): Homolog of NCBI NO: 15220891 NR Description: trehalose phosphatase family [Arabidopsis >gi|9369388|gb|AAF87136.1|AC002423_1 T23E23.3 [Arabidopsis
  misc_feature (1)..(747): Homolog of NCBI NO: 15219002 NR Description: trehalose phosphatase family [Arabidopsis
  misc_feature (1)..(755): Homolog of NCBI NO: 34910846 NR Description: putative trehalose-6-phosphate synthase [Oryza
  misc_feature (1)..(756): Homolog of NCBI NO: 30698024 NR Description: alpha,alpha-trehalose-phosphate synthase,
  misc_feature (1)..(764): Homolog of NCBI NO: 34909526 NR Description: putative trehalose-6-phosphate synthase homolog
  misc_feature (52)..(395): Homolog of NCBI NO: 34391866 NR Description: trehalose-6-phosphate phosphatase [Emericella
  misc_feature (377)..(702): Homolog of NCBI NO: 34391866 NR Description: trehalose-6-phosphate phosphatase [Emericella

SEQ ID NO: 105135 - protein, 761 aa, Arabidopsis thaliana; identical to SEQ ID NO: 38306
  peptide (1)..(761): Ceres Seq. ID no. 13616526
  misc_feature (1)..(445): Pfam Name: Glycosyltransferase family 20 Pfam Description: Glycosyltransferase family 20
  misc_feature (1)..(759): Homolog of NCBI NO: 34902280 NR Description: Putative trehalose-6-phosphate synthase [Oryza
  misc_feature (1)..(739): Homolog of NCBI NO: 15221478 NR Description: trehalose phosphatase family [Arabidopsis
  misc_feature (1)..(750): Homolog of NCBI NO: 19568935 NR Description: putative trehalose synthase [Solanum tuberosum]
  misc_feature (1)..(761): Homolog of NCBI NO: 15220891 NR Description: trehalose phosphatase family [Arabidopsis >gi|9369388|gb|AAF87136.1|AC002423_1 T23E23.3 [Arabidopsis
  misc_feature (1)..(743): Homolog of NCBI NO: 15219002 NR Description: trehalose phosphatase family [Arabidopsis
  misc_feature (1)..(751): Homolog of NCBI NO: 34910846 NR Description: putative trehalose-6-phosphate synthase [Oryza
  misc_feature (1)..(752): Homolog of NCBI NO: 30698024 NR Description: alpha,alpha-trehalose-phosphate synthase,
  misc_feature (1)..(760): Homolog of NCBI NO: 34909526 NR Description: putative trehalose-6-phosphate synthase homolog
  misc_feature (48)..(391): Homolog of NCBI NO: 34391866 NR Description: trehalose-6-phosphate phosphatase [Emericella
  misc_feature (373)..(698): Homolog of NCBI NO: 34391866 NR Description: trehalose-6-phosphate phosphatase [Emericella

SEQ ID NO: 105136 - DNA, 1058 bp, Arabidopsis thaliana
  misc_feature (1)..(1058): Ceres Seq. ID no. 13616527
  misc_feature: MA Experiment ID: 108434 Result: Up-regulated in Transcription
  misc_feature: MA Experiment 108434 PARAMETER Experiment Name: At_Root_Tips_cDNA_P Parameter: Tissue Value: Root Tips
  misc_feature: MA Experiment ID: 108488 Result: Down-regulated in Transcription
  misc_feature: MA Experiment ID: 108489 Result: Up-regulated in Transcription
  misc_feature: MA Experiment ID: 108573 Result: Up-regulated in Transcription
  misc_feature: MA Experiment 108573 PARAMETER Experiment Name: At_Drought_cDNA_P Parameter: Timepoint (hr) Value: 6
  misc_feature: MA Experiment 108573 PARAMETER Experiment Name: At_Drought_cDNA_P Parameter: Tissue Value: Aerial
  misc_feature: MA Experiment 108573 PARAMETER Experiment Name: At_Drought_cDNA_P Parameter: Treatment Value: Drought vs. No Drought
  misc_feature: MA Experiment ID: 108579 Result: Down-regulated in Transcription
  misc_feature: MA Experiment 108579 PARAMETER Experiment Name: At_4deg_Cold_cDNA_P Parameter: Temperature (deg C) Value: 4 vs. 22
  misc_feature: MA Experiment 108579 PARAMETER Experiment Name: At_4deg_Cold_cDNA_P Parameter: Timepoint (hr) Value: 6
  misc_feature: MA Experiment 108579 PARAMETER Experiment Name: At_4deg_Cold_cDNA_P Parameter: Tissue Value: Aerial
  misc_feature: MA Experiment ID: 20000089 Result: Down-regulated in Transcription
aaattcaatctttctccgtcattcagatttcgaggagacagagacagagaaaaggattcgtgtaaggaaaagcttttaaacttctctttctatttatccctcctttcttctatctctctctctctcgatatcgatacaagagagatggagaaagaagaaggagaaacaacaacaacgatcggcgttgttccggcggcgccggcgaaattaccgactccgatatattctctgagcttttgggaggtcacggcagcttccggcgtcgttttagggtttattttgggtcttgtttgcgtttatctcacaatgcctcaatctgattacagctttctcaagctacctcgtaatctcgaagatcttcagattcttagagataatcttgagatatacacaagtgattacacagttcaagttcttgttggatattgtctggtgtacgtttttatgcagacgttcatgattcctggaactgtgttcatgtctttgcttgctggtgctctctttggagttgtcaaaggaatggctcttgttgtctccactgcaacagctggtgcttcctcttgttatttcctctctaagctcattggtagacctttactcttctcgctttggcctgacaagctcgtattcttccaagatcaggttgcgagaagaaaagatcggttgctgaattatatgctgttcttgaggctaacaccaacattgcctaacactttcattaatgttgcttctccaattgttgatgttccttatcatatcttcttcctagctacattcatcggtctgattcctgctgcatttgtcactgtccgggctgggcttgctcttggagagctaaaatcattgggagatctctatgacttcagctccatggcgactctgtgtctcattggtgtgctctctgtgactccaaccctaattggcaagaaacaagcatagaagatgaagatcaatacgatgatgatgatgaaaacagagcatttcaacagcctctttgtgtatatatcatgtagaatgttaagaacttaagatcaatcaatcataaaactctgttctct

SEQ ID NO: 105137 - protein, 312 aa, Arabidopsis thaliana
  peptide (1)..(312): Ceres Seq. ID no. 13616528
  misc_feature (49)..(312): Homolog of NCBI NO: 18414967 NR Description: expressed protein [Arabidopsis thaliana]
  misc_feature (49)..(312): Homolog of NCBI NO: 21593768 NR Description: unknown [Arabidopsis thaliana]
  misc_feature (75)..(311): Homolog of NCBI NO: 18409951 NR Description: expressed protein [Arabidopsis thaliana]
  misc_feature (75)..(311): Homolog of NCBI NO: 30681121 NR Description: expressed protein [Arabidopsis thaliana] unknown protein [Arabidopsis thaliana]
  misc_feature (71)..(312): Homolog of NCBI NO: 28850296 NR Description: similar to Mus musculus (Mouse). Colon RCB-0549
  misc_feature (92)..(310): Homolog of NCBI NO: 436224 NR Description: KIAA0033 [Homo sapiens]
  misc_feature (92)..(310): Homolog of NCBI NO: 20558053 NR Description: similar to KIAA0033 [Homo sapiens]
  misc_feature (92)..(310): Homolog of NCBI NO: 34858940 NR Description: similar to D7Ertd743e protein [Rattus norvegicus]
  misc_feature (92)..(310): Homolog of NCBI NO: 22268065 NR Description: D7Ertd743e protein [Mus musculus] unnamed protein product [Mus musculus] unnamed protein product [Mus musculus]
  misc_feature (99)..(310): Homolog of NCBI NO: 26330556 NR Description: unnamed protein product [Mus musculus]
KFNLSPSFRFRGDRDREKDSCKEKLLNFSFYLSLLSSISLSLDIDTREMEKEEGETTTTIGVVPAAPAKLPTPIYSLSFWEVTAASGVVLGFILGLVCVYLTMPQSDYSFLKLPRNLEDLQILRDNLEIYTSDYTVQVLVGYCLVYVFMQTFMIPGTVFMSLLAGALFGVVKGMALVVSTATAGASSCYFLSKLIGRPLLFSLWPDKLVFFQDQVARRKDRLLNYMLFLRLTPTLPNTFINVASPIVDVPYHIFFLATFIGLIPAAFVTVRAGLALGELKSLGDLYDFSSMATLCLIGVLSVTPTLIGKKQA

SEQ ID NO: 105138 - protein, 264 aa, Arabidopsis thaliana
  peptide (1)..(264): Ceres Seq. ID no. 13616529
  misc_feature (1)..(264): Homolog of NCBI NO: 18414967 NR Description: expressed protein [Arabidopsis thaliana]
  misc_feature (1)..(264): Homolog of NCBI NO: 21593768 NR Description: unknown [Arabidopsis thaliana]
  misc_feature (27)..(263): Homolog of NCBI NO: 18409951 NR Description: expressed protein [Arabidopsis thaliana]
  misc_feature (27)..(263): Homolog of NCBI NO: 30681121 NR Description: expressed protein [Arabidopsis thaliana] unknown protein [Arabidopsis thaliana]
  misc_feature (23)..(264): Homolog of NCBI NO: 28850296 NR Description: similar to Mus musculus (Mouse). Colon RCB-0549
  misc_feature (44)..(262): Homolog of NCBI NO: 436224 NR Description: KIAA0033 [Homo sapiens]
  misc_feature (44)..(262): Homolog of NCBI NO: 20558053 NR Description: similar to KIAA0033 [Homo sapiens]
  misc_feature (44)..(262): Homolog of NCBI NO: 34858940 NR Description: similar to D7Ertd743e protein [Rattus norvegicus]
  misc_feature (44)..(262): Homolog of NCBI NO: 22268065 NR Description: D7Ertd743e protein [Mus musculus] unnamed protein product [Mus musculus] unnamed protein product [Mus musculus]
  misc_feature (51)..(262): Homolog of NCBI NO: 26330556 NR Description: unnamed protein product [Mus musculus]
MEKEEGETTTTIGVVPAAPAKLPTPIYSLSFWEVTAASGVVLGFILGLVCVYLTMPQSDYSFLKLPRNLEDLQILRDNLEIYTSDYTVQVLVGYCLVYVFMQTFMIPGTVFMSLLAGALFGVVKGMALVVSTATAGASSCYFLSKLIGRPLLFSLWPDKLVFFQDQVARRKDRLLNYMLFLRLTPTLPNTFINVASPIVDVPYHIFFLATFIGLIPAAFVTVRAGLALGELKSLGDLYDFSSMATLCLIGVLSVTPTLIGKKQA

SEQ ID NO: 105139 - protein, 210 aa, Arabidopsis thaliana
  peptide (1)..(210): Ceres Seq. ID no. 13616530
  misc_feature (1)..(210): Homolog of NCBI NO: 18414967 NR Description: expressed protein [Arabidopsis thaliana]
  misc_feature (1)..(210): Homolog of NCBI NO: 21593768 NR Description: unknown [Arabidopsis thaliana]
  misc_feature (1)..(209): Homolog of NCBI NO: 18409951 NR Description: expressed protein [Arabidopsis thaliana]
  misc_feature (1)..(209): Homolog of NCBI NO: 30681121 NR Description: expressed protein [Arabidopsis thaliana] unknown protein [Arabidopsis thaliana]
  misc_feature (1)..(210): Homolog of NCBI NO: 28850296 NR Description: similar to Mus musculus (Mouse). Colon RCB-0549
  misc_feature (1)..(208): Homolog of NCBI NO: 436224 NR Description: KIAA0033 [Homo sapiens]
  misc_feature (1)..(208): Homolog of NCBI NO: 20558053 NR Description: similar to KIAA0033 [Homo sapiens]
  misc_feature (1)..(208): Homolog of NCBI NO: 34858940 NR Description: similar to D7Ertd743e protein [Rattus norvegicus]
  misc_feature (1)..(208): Homolog of NCBI NO: 22268065 NR Description: D7Ertd743e protein [Mus musculus] unnamed protein product [Mus musculus] unnamed protein product [Mus musculus]
  misc_feature (1)..(208): Homolog of NCBI NO: 26330556 NR Description: unnamed protein product [Mus musculus]
MPQSDYSFLKLPRNLEDLQILRDNLEIYTSDYTVQVLVGYCLVYVFMQTFMIPGTVFMSLLAGALFGVVKGMALVVSTATAGASSCYFLSKLIGRPLLFSLWPDKLVFFQDQVARRKDRLLNYMLFLRLTPTLPNTFINVASPIVDVPYHIFFLATFIGLIPAAFVTVRAGLALGELKSLGDLYDFSSMATLCLIGVLSVTPTLIGKKQA

SEQ ID NO: 105140 - DNA, 842 bp, Arabidopsis thaliana
  misc_feature (1)..(842): Ceres Seq. ID no. 13616539
  misc_feature: MA Experiment ID: 20000166 Result: Down-regulated in Transcription
  misc_feature: MA Experiment 20000166 PARAMETER Experiment Name: At_100uM_ABA_P Parameter: Age (day) Value: 14
  misc_feature: MA Experiment 20000166 PARAMETER Experiment Name: At_100uM_ABA_P Parameter: Organism Value: A. thaliana
  misc_feature: MA Experiment 20000166 PARAMETER Experiment Name: At_100uM_ABA_P Parameter: Plant Line Value: WS
  misc_feature: MA Experiment 20000166 PARAMETER Experiment Name: At_100uM_ABA_P Parameter: Timepoint (hr) Value: 1
  misc_feature: MA Experiment 20000166 PARAMETER Experiment Name: At_100uM_ABA_P Parameter: Tissue Value: Aerial
  misc_feature: MA Experiment 20000166 PARAMETER Experiment Name: At_100uM_ABA_P Parameter: Treatment Value: 100uM ABA vs. No Treatment
  misc_feature: MA Experiment ID: 20000184 Result: Down-regulated in Transcription
  misc_feature: MA Experiment 20000184 PARAMETER Experiment Name: At_Shoots__P Parameter: Age (day) Value: 7
  misc_feature: MA Experiment 20000184 PARAMETER Experiment Name: At_Shoots__P Parameter: Tissue Value: Shoots vs. Whole Plant
  misc_feature: MA Experiment ID: 20000234 Result: Down-regulated in Transcription
  misc_feature: MA Experiment 20000234 PARAMETER Experiment Name: At_Siliques_P Parameter: Age (day) Value: 21
  misc_feature: MA Experiment 20000234 PARAMETER Experiment Name: At_Siliques_P Parameter: Organism Value: A. thaliana
  misc_feature: MA Experiment 20000234 PARAMETER Experiment Name: At_Siliques_P Parameter: Plant Line Value: WS
  misc_feature: MA Experiment 20000234 PARAMETER Experiment Name: At_Siliques_P Parameter: Tissue Value: Less Than 5mm Siliques vs. Whole Plant
  misc_feature: MA Experiment ID: 20000265 Result: Down-regulated in Transcription
  misc_feature: MA Experiment 20000265 PARAMETER Experiment Name: At_Open_Flower_P Parameter: Age (day) Value: 21
  misc_feature: MA Experiment 20000265 PARAMETER Experiment Name: At_Open_Flower_P Parameter: Plant Line Value: WS
  misc_feature: MA Experiment 20000265 PARAMETER Experiment Name: At_Open_Flower_P Parameter: Tissue Value: Closed Flower vs. Whole Plant
  misc_feature: MA Experiment ID: 20000268 Result: Down-regulated in Transcription
  misc_feature: MA Experiment 20000268 PARAMETER Experiment Name: At_100mM_NaCl__P Parameter: Age (day) Value: 14
  misc_feature: MA Experiment 20000268 PARAMETER Experiment Name: At_100mM_NaCl__P Parameter: Organism Value: A. thaliana
  misc_feature: MA Experiment 20000268 PARAMETER Experiment Name: At_100mM_NaCl__P Parameter: Plant Line Value: WS
  misc_feature: MA Experiment 20000268 PARAMETER Experiment Name: At_100mM_NaCl__P Parameter: Timepoint (hr) Value: 6
  misc_feature: MA Experiment 20000268 PARAMETER Experiment Name: At_100mM_NaCl__P Parameter: Tissue Value: Whole Plant
  misc_feature: MA Experiment 20000268 PARAMETER Experiment Name: At_100mM_NaCl__P Parameter: Treatment Value: 100mM NaCl vs. No Treatment
  misc_feature: MA Experiment ID: 20000441 Result: Up-regulated in Transcription
  misc_feature: MA Experiment 20000441 PARAMETER Experiment Name: At_1uM_BR-BRZ__P Parameter: Tissue Value: Shoot Apices
  misc_feature: MA Experiment 20000441 PARAMETER Experiment Name: At_1uM_BR-BRZ__P Parameter: Treatment Value: 1uM BR vs. No Treatment
  misc_feature: MA Experiment ID: 20000443 Result: Up-regulated in Transcription
  misc_feature: MA Experiment 20000443 PARAMETER Experiment Name: At_1uM_BR-BRZ__P Parameter: Tissue Value: Shoot Apices
  misc_feature: MA Experiment 20000443 PARAMETER Experiment Name: At_1uM_BR-BRZ__P Parameter: Treatment Value: 1uM BRZ vs. No Treatment
  misc_feature: MA Experiment ID: 20000445 Result: Down-regulated in Transcription
  misc_feature: MA Experiment 20000445 PARAMETER Experiment Name: At_100uM_NAA__P Parameter: Age (day) Value: 14
  misc_feature: MA Experiment 20000445 PARAMETER Experiment Name: At_100uM_NAA__P Parameter: Organism Value: A. thaliana
  misc_feature: MA Experiment 20000445 PARAMETER Experiment Name: At_100uM_NAA__P Parameter: Plant Line Value: WS
  misc_feature: MA Experiment 20000445 PARAMETER Experiment Name: At_100uM_NAA__P Parameter: Timepoint (hr) Value: 6
  misc_feature: MA Experiment 20000445 PARAMETER Experiment Name: At_100uM_NAA__P Parameter: Tissue Value: Aerial
  misc_feature: MA Experiment 20000445 PARAMETER Experiment Name: At_100uM_NAA__P Parameter: Treatment Value: 100uM NAA vs. No Treatment
  misc_feature: MA Experiment ID: 20000455 Result: Down-regulated in Transcription
  misc_feature: MA Experiment 20000455 PARAMETER Experiment Name: At_100uM_ABA_P Parameter: Age (day) Value: 16
  misc_feature: MA Experiment 20000455 PARAMETER Experiment Name: At_100uM_ABA_P Parameter: Organism Value: A. thaliana
  misc_feature: MA Experiment 20000455 PARAMETER Experiment Name: At_100uM_ABA_P Parameter: Plant Line Value: WS
  misc_feature: MA Experiment 20000455 PARAMETER Experiment Name: At_100uM_ABA_P Parameter: Timepoint (hr) Value: 48
  misc_feature: MA Experiment 20000455 PARAMETER Experiment Name: At_100uM_ABA_P Parameter: Tissue Value: Aerial
  misc_feature: MA Experiment 20000455 PARAMETER Experiment Name: At_100uM_ABA_P Parameter: Treatment Value: 100uM ABA vs. No Treatment
  misc_feature: MA Experiment ID: 20000496 Result: Up-regulated in Transcription
  misc_feature: MA Experiment 20000496 PARAMETER Experiment Name: At_Guard_Cells_P Parameter: Harvest Date Value: 7/19/2002
  misc_feature: MA Experiment 20000496 PARAMETER Experiment Name: At_Guard_Cells_P Parameter: Organism Value: Canola
  misc_feature: MA Experiment 20000496 PARAMETER Experiment Name: At_Guard_Cells_P Parameter: Tissue Value: Guard Cells vs. Leaves
  misc_feature: MA Experiment ID: 20000794 Result: Up-regulated in Transcription
  misc_feature: MA Experiment 20000794 PARAMETER Experiment Name: At_Petals_P Parameter: Age (day) Value: 23-25 days
  misc_feature: MA Experiment 20000794 PARAMETER Experiment Name: At_Petals_P Parameter: Plant Line Value: WS
  misc_feature: MA Experiment 20000794 PARAMETER Experiment Name: At_Petals_P Parameter: Tissue Value: Petals vs. Whole plant
  misc_feature: MA Experiment ID: 20001247 Result: Up-regulated in Transcription
  misc_feature: MA Experiment 20001247 PARAMETER Experiment Name: At_Far-red-induction_P Parameter: Age (day) Value: 7
  misc_feature: MA Experiment 20001247 PARAMETER Experiment Name: At_Far-red-induction_P Parameter: Light Value: Far-red vs. White
  misc_feature: MA Experiment 20001247 PARAMETER Experiment Name: At_Far-red-induction_P Parameter: Organism Value: A. thaliana
  misc_feature: MA Experiment 20001247 PARAMETER Experiment Name: At_Far-red-induction_P Parameter: Plant Line Value: Columbia
  misc_feature: MA Experiment 20001247 PARAMETER Experiment Name: At_Far-red-induction_P Parameter: Timepoint (hr) Value: 1
  misc_feature: MA Experiment 20001247 PARAMETER Experiment Name: At_Far-red-induction_P Parameter: Tissue Value: Whole Plant
  misc_feature: MA Experiment ID: 20001451 Result: Up-regulated in Transcription
  misc_feature: MA Experiment 20001451 PARAMETER Experiment Name: At_Far-red-induction_P Parameter: Age (day) Value: 7
  misc_feature: MA Experiment 20001451 PARAMETER Experiment Name: At_Far-red-induction_P Parameter: Light Value: Far-red vs. White
  misc_feature: MA Experiment 20001451 PARAMETER Experiment Name: At_Far-red-induction_P Parameter: Organism Value: A. thaliana
  misc_feature: MA Experiment 20001451 PARAMETER Experiment Name: At_Far-red-induction_P Parameter: Plant Line Value: Columbia
  misc_feature: MA Experiment 20001451 PARAMETER Experiment Name: At_Far-red-induction_P Parameter: Timepoint (hr) Value: 24
  misc_feature: MA Experiment 20001451 PARAMETER Experiment Name: At_Far-red-induction_P Parameter: Tissue Value: Whole Plant
  misc_feature: MA Experiment ID: 20001555 Result: Down-regulated in Transcription
  misc_feature: MA Experiment 20001555 PARAMETER Experiment Name: At_Drought_Soil_Dry_P Parameter: Age (day) Value: 24
  misc_feature: MA Experiment 20001555 PARAMETER Experiment Name: At_Drought_Soil_Dry_P Parameter: Organism Value: A. thaliana
  misc_feature: MA Experiment 20001555 PARAMETER Experiment Name: At_Drought_Soil_Dry_P Parameter: Plant Line Value: WS
  misc_feature: MA Experiment 20001555 PARAMETER Experiment Name: At_Drought_Soil_Dry_P Parameter: Post Timepoint (hr) Value: None
  misc_feature: MA Experiment 20001555 PARAMETER Experiment Name: At_Drought_Soil_Dry_P Parameter: Post-Treatment Value: None
  misc_feature: MA Experiment 20001555 PARAMETER Experiment Name: At_Drought_Soil_Dry_P Parameter: Timepoint (day) Value: 10
  misc_feature: MA Experiment 20001555 PARAMETER Experiment Name: At_Drought_Soil_Dry_P Parameter: Treatment Value: Drought vs. No Drought
  misc_feature: MA Experiment ID: 20001556 Result: Down-regulated in Transcription
  misc_feature: MA Experiment 20001556 PARAMETER Experiment Name: At_Drought_Soil_Dry_P Parameter: Age (day) Value: 26
  misc_feature: MA Experiment 20001556 PARAMETER Experiment Name: At_Drought_Soil_Dry_P Parameter: Organism Value: A. thaliana
  misc_feature: MA Experiment 20001556 PARAMETER Experiment Name: At_Drought_Soil_Dry_P Parameter: Plant Line Value: WS
  misc_feature: MA Experiment 20001556 PARAMETER Experiment Name: At_Drought_Soil_Dry_P Parameter: Post Timepoint (hr) Value: None
  misc_feature: MA Experiment 20001556 PARAMETER Experiment Name: At_Drought_Soil_Dry_P Parameter: Post-Treatment Value: None
  misc_feature: MA Experiment 20001556 PARAMETER Experiment Name: At_Drought_Soil_Dry_P Parameter: Timepoint (day) Value: 12
  misc_feature: MA Experiment 20001556 PARAMETER Experiment Name: At_Drought_Soil_Dry_P Parameter: Treatment Value: Drought vs. No Drought
  misc_feature: MA Experiment ID: 20001907 Result: Down-regulated in Transcription
  misc_feature: MA Experiment 20001907 PARAMETER Experiment Name: At_Drought_Reproduction_P Parameter: Age (day) Value: 37
  misc_feature: MA Experiment 20001907 PARAMETER Experiment Name: At_Drought_Reproduction_P Parameter: Organism Value: A. thaliana
  misc_feature: MA Experiment 20001907 PARAMETER Experiment Name: At_Drought_Reproduction_P Parameter: Plant Line Value: WS
  misc_feature: MA Experiment 20001907 PARAMETER Experiment Name: At_Drought_Reproduction_P Parameter: Timepoint (day) Value: 7
  misc_feature: MA Experiment 20001907 PARAMETER Experiment Name: At_Drought_Reproduction_P Parameter: Tissue Value: Siliques
  misc_feature: MA Experiment 20001907 PARAMETER Experiment Name: At_Drought_Reproduction_P Parameter: Treatment Value: Drought vs. No Drought
aaagagagagagagtctaaaagctcgtcgtcgtcttcaatggtgaatctcaaaccaattggataaataaaacaaaacaaaaaaaacttcacaaaaaaaaaaaaaagatccaaattacaaccatgccttcggagttaacaccagaagaacgatcggaactaaaaaactcaatcgccgagttccacacataccaactcgatccaggaagctgttcatcactccacgcgcaacgaatccacgcgcctccggaactcgtctggtcaatcgtacgacgattcgacaaaccacaaacatacaaacacttcatcaaatcctgctccgtcgaacaaaacttcgagatgcgcgtcggatgcacgcgcgacgtgatcgtcatcagtggattaccggcgaacacatcaacggaaagactcgatatactcgacgacgaacggagagttaccggattcagtatcatcggaggcgaacataggctgacgaattacaaatccgttacgacggtgcatcggttcgagaaagagaatcggatctggacggtggttttggaatcttacgtcgttgatatgccggaaggtaactcggaggatgatactcgtatgtttgctgatacggttgtgaagcttaatttgcagaaactcgcgacggttgctgaagctatggctcgtaactccggtgacggaagtggttctcaggtgacgtgaaaatgaagaaaaaaatatgatttaatttcttttattaaaaacaaaatccagaaatgttatttatgttgcttcgtataagattctcttcttcttttgtctgtttttgcttttttaacctcatatagtcatatttttaccattttct

SEQ ID NO: 105141 - protein, 191 aa, Arabidopsis thaliana; identical to SEQ ID NO: 26957
  peptide (1)..(191): Ceres Seq. ID no. 13616540
  misc_feature (29)..(171): Pfam Name: Pathogenesis-related protein Bet v I family Pfam Description: Pathogenesis-related protein Bet v I family
  misc_feature (1)..(191): Homolog of NCBI NO: 15236689 NR Description: expressed protein [Arabidopsis thaliana]
  misc_feature (1)..(190): Homolog of NCBI NO: 22327625 NR Description: expressed protein [Arabidopsis thaliana] unknown protein [Arabidopsis thaliana]
  misc_feature (1)..(190): Homolog of NCBI NO: 9758515 NR Description: gene_id:MZA15.21~pir||T05073~similar to unknown
  misc_feature (5)..(179): Homolog of NCBI NO: 37537066 NR Description: unknown protein [Oryza sativa (japonica
  misc_feature (5)..(175): Homolog of NCBI NO: 15225245 NR Description: Bet v I allergen family [Arabidopsis thaliana]
  misc_feature (1)..(177): Homolog of NCBI NO: 15219339 NR Description: hypothetical protein [Arabidopsis thaliana]
  misc_feature (1)..(182): Homolog of NCBI NO: 18404709 NR Description: expressed protein [Arabidopsis thaliana]
  misc_feature (17)..(172): Homolog of NCBI NO: 15239114 NR Description: expressed protein [Arabidopsis thaliana] gene_id:K18I23.25~pir||T02514~similar to unknown protein thaliana] >gi|15529254|gb|AAK97721.1| AT5g05440/K18I23_25
  misc_feature (17)..(188): Homolog of NCBI NO: 34907924 NR Description: B1088C09.9 [Oryza sativa (japonica
  misc_feature (1)..(182): Homolog of NCBI NO: 18405351 NR Description: Bet v I allergen family [Arabidopsis thaliana] expressed protein [Arabidopsis thaliana] unknown [Arabidopsis thaliana] >gi|28393741|gb|AAO42281.1|

SEQ ID NO: 105142 - protein, 119 aa, Arabidopsis thaliana; identical to SEQ ID NO: 26958
  peptide (1)..(119): Ceres Seq. ID no. 13616541
  misc_feature (1)..(99): Pfam Name: Pathogenesis-related protein Bet v I family Pfam Description: Pathogenesis-related protein Bet v I family
  misc_feature (1)..(119): Homolog of NCBI NO: 15236689 NR Description: expressed protein [Arabidopsis thaliana]
  misc_feature (1)..(118): Homolog of NCBI NO: 22327625 NR Description: expressed protein [Arabidopsis thaliana] unknown protein [Arabidopsis thaliana]
  misc_feature (1)..(118): Homolog of NCBI NO: 9758515 NR Description: gene_id:MZA15.21~pir||T05073~similar to unknown
  misc_feature (1)..(107): Homolog of NCBI NO: 37537066 NR Description: unknown protein [Oryza sativa (japonica
  misc_feature (1)..(103): Homolog of NCBI NO: 15225245 NR Description: Bet v I allergen family [Arabidopsis thaliana]
  misc_feature (1)..(105): Homolog of NCBI NO: 15219339 NR Description: hypothetical protein [Arabidopsis thaliana]
  misc_feature (1)..(110): Homolog of NCBI NO: 18404709 NR Description: expressed protein [Arabidopsis thaliana]
  misc_feature (1)..(100): Homolog of NCBI NO: 15239114 NR Description: expressed protein [Arabidopsis thaliana] gene_id:K18I23.25~pir||T02514~similar to unknown protein thaliana] >gi|15529254|gb|AAK97721.1| AT5g05440/K18I23_25
  misc_feature (1)..(116): Homolog of NCBI NO: 34907924 NR Description: B1088C09.9 [Oryza sativa (japonica
  misc_feature (1)..(110): Homolog of NCBI NO: 18405351 NR Description: Bet v I allergen family [Arabidopsis thaliana] expressed protein [Arabidopsis thaliana] unknown [Arabidopsis thaliana] >gi|28393741|gb|AAO42281.1|

SEQ ID NO: 105143 - DNA, 1057 bp, Arabidopsis thaliana
  misc_feature (1)..(1057): Ceres Seq. ID no. 13616542
  misc_feature: MA Experiment ID: 20000179 Result: Up-regulated in Transcription
  misc_feature: MA Experiment 20000179 PARAMETER Experiment Name: At_Germinating_Seeds_P Parameter: Age (hr) Value: 6 vs. 0
  misc_feature: MA Experiment 20000179 PARAMETER Experiment Name: At_Germinating_Seeds_P Parameter: Tissue Value: Germinating Seeds
  misc_feature: MA Experiment ID: 20000180 Result: Up-regulated in Transcription
  misc_feature: MA Experiment 20000180 PARAMETER Experiment Name: At_Germinating_Seeds_P Parameter: Age (hr) Value: 24 vs. 0
  misc_feature: MA Experiment 20000180 PARAMETER Experiment Name: At_Germinating_Seeds_P Parameter: Tissue Value: Germinating Seeds
  misc_feature: MA Experiment ID: 20000184 Result: Down-regulated in Transcription
  misc_feature: MA Experiment 20000184 PARAMETER Experiment Name: At_Shoots__P Parameter: Age (day) Value: 7
  misc_feature: MA Experiment 20000184 PARAMETER Experiment Name: At_Shoots__P Parameter: Tissue Value: Shoots vs. Whole Plant
  misc_feature: MA Experiment ID: 20001911 Result: Up-regulated in Transcription
  misc_feature: MA Experiment 20001911 PARAMETER Experiment Name: At_Drought_Reproduction_P Parameter: Age (day) Value: 40
  misc_feature: MA Experiment 20001911 PARAMETER Experiment Name: At_Drought_Reproduction_P Parameter: Organism Value: A. thaliana
  misc_feature: MA Experiment 20001911 PARAMETER Experiment Name: At_Drought_Reproduction_P Parameter: Plant Line Value: WS
  misc_feature: MA Experiment 20001911 PARAMETER Experiment Name: At_Drought_Reproduction_P Parameter: Timepoint (day) Value: 10
  misc_feature: MA Experiment 20001911 PARAMETER Experiment Name: At_Drought_Reproduction_P Parameter: Tissue Value: Flowers
  misc_feature: MA Experiment 20001911 PARAMETER Experiment Name: At_Drought_Reproduction_P Parameter: Treatment Value: Drought vs. No Drought
atcatcactctctgagatcgaagagaaagcaaaatcaaagttgtgatgaaatctctattgatgagaaccggttcgatgccggttcttcaaaaccggttaatttcaggtggttcatcgcggaagatgacgcctatctccaggaccaactccgtcgaatcattatccagctacggcgagagattcgccggcgggaagatttcgatcgaggttaaggctaatgtagggatgcggagggtgttatcggaaagtgatgtgattagatctgagagaatgttgaaaagagttggatctaagccttcgccggcgagaatcccggaggatgatgaagcgggggaggaagaaattaggtttgcagatggttgggggtctatgatctccggtggtttacctgtggaggagaaatgtttcacgggtggcggtgttggtggtggatctggttatagcggcggttatggaaacggaggaggaggcggttatgaagataagagcaagatcggtgattattatcgagagatgttgagatctaatcctaataattcgcttcttctgatgaattacggcaagtttttgtatgaggtggagaaagatgcagagggagctgaagagtactatggaagagcaatactggagaatccaggagatggagaagctttatccatgtatggaagattgatatgggaaacgaagagagatgagaagagagctcaaggttactttgatcaagctgttaatgcttctcctaatgattgtatggttttgggatcatatgcacgtttcatgtgggaggcagaggatgatgatgatgatgatgaagaagaagaagaagaagaatggatggctgcatcaccactcatggtttctgcagtttagagactaacacgacgaagatgaagaagaagtaatggagactaagattatgtatcaagtatcaaccttttttttgtctatttcactgtctttttactaacttttgttgtaataacctgaagagtaatgaaaacatgtatgtgaaagaaaacgaatgtaaccttattataagagaataaaagtgcttttg

SEQ ID NO: 105144 - protein, 274 aa, Arabidopsis thaliana
  peptide (1)..(274): Ceres Seq. ID no. 13616543
  misc_feature (1)..(274): Homolog of NCBI NO: 18414994 NR Description: expressed protein [Arabidopsis thaliana]
  misc_feature (11)..(274): Homolog of NCBI NO: 21592868 NR Description: unknown [Arabidopsis thaliana]
  misc_feature (27)..(274): Homolog of NCBI NO: 7487766 NR Description: hypothetical protein T6K21.120 - Arabidopsis >gi|2894603|emb|CAA17137.1| putative protein [Arabidopsis >gi|7268546|emb|CAB78796.1| putative protein [Arabidopsis
  misc_feature (4)..(262): Homolog of NCBI NO: 15241290 NR Description: expressed protein [Arabidopsis thaliana]
  misc_feature (123)..(259): Homolog of NCBI NO: 37537130 NR Description: unknown protein [Oryza sativa (japonica
  misc_feature (124)..(267): Homolog of NCBI NO: 14532728 NR Description: unknown protein [Arabidopsis thaliana]
  misc_feature (124)..(267): Homolog of NCBI NO: 15236755 NR Description: expressed protein [Arabidopsis thaliana]
  misc_feature (98)..(262): Homolog of NCBI NO: 18412668 NR Description: expressed protein [Arabidopsis thaliana]
  misc_feature (4)..(268): Homolog of NCBI NO: 32488305 NR Description: OSJNBb0065L13.14 [Oryza sativa (japonica
  misc_feature (143)..(261): Homolog of NCBI NO: 18390404 NR Description: expressed protein [Arabidopsis thaliana] unknown protein [Arabidopsis thaliana]
MKSLLMRTGSMPVLQNRLISGGSSRKMTPISRTNSVESLSSYGERFAGGKISIEVKANVGMRRVLSESDVIRSERMLKRVGSKPSPARIPEDDEAGEEEIRFADGWGSMISGGLPVEEKCFTGGGVGGGSGYSGGYGNGGGGGYEDKSKIGDYYREMLRSNPNNSLLLMNYGKFLYEVEKDAEGAEEYYGRAILENPGDGEALSMYGRLIWETKRDEKRAQGYFDQAVNASPNDCMVLGSYARFMWEAEDDDDDDEEEEEEEWMAASPLMVSAV

SEQ ID NO: 105145 - protein, 269 aa, Arabidopsis thaliana
  peptide (1)..(269): Ceres Seq. ID no. 13616544
  misc_feature (1)..(269): Homolog of NCBI NO: 18414994 NR Description: expressed protein [Arabidopsis thaliana]
  misc_feature (6)..(269): Homolog of NCBI NO: 21592868 NR Description: unknown [Arabidopsis thaliana]
  misc_feature (22)..(269): Homolog of NCBI NO: 7487766 NR Description: hypothetical protein T6K21.120 - Arabidopsis >gi|2894603|emb|CAA17137.1| putative protein [Arabidopsis >gi|7268546|emb|CAB78796.1| putative protein [Arabidopsis
  misc_feature (1)..(257): Homolog of NCBI NO: 15241290 NR Description: expressed protein [Arabidopsis thaliana]
  misc_feature (118)..(254): Homolog of NCBI NO: 37537130 NR Description: unknown protein [Oryza sativa (japonica
  misc_feature (119)..(262): Homolog of NCBI NO: 14532728 NR Description: unknown protein [Arabidopsis thaliana]
  misc_feature (119)..(262): Homolog of NCBI NO: 15236755 NR Description: expressed protein [Arabidopsis thaliana]
  misc_feature (93)..(257): Homolog of NCBI NO: 18412668 NR Description: expressed protein [Arabidopsis thaliana]
  misc_feature (1)..(263): Homolog of NCBI NO: 32488305 NR Description: OSJNBb0065L13.14 [Oryza sativa (japonica
  misc_feature (138)..(256): Homolog of NCBI NO: 18390404 NR Description: expressed protein [Arabidopsis thaliana] unknown protein [Arabidopsis thaliana]
MRTGSMPVLQNRLISGGSSRKMTPISRTNSVESLSSYGERFAGGKISIEVKANVGMRRVLSESDVIRSERMLKRVGSKPSPARIPEDDEAGEEEIRFADGWGSMISGGLPVEEKCFTGGGVGGGSGYSGGYGNGGGGGYEDKSKIGDYYREMLRSNPNNSLLLMNYGKFLYEVEKDAEGAEEYYGRAILENPGDGEALSMYGRLIWETKRDEKRAQGYFDQAVNASPNDCMVLGSYARFMWEAEDDDDDDEEEEEEEWMAASPLMVSAV

SEQ ID NO: 105146 - protein, 264 aa, Arabidopsis thaliana
  peptide (1)..(264): Ceres Seq. ID no. 13616545
  misc_feature (1)..(264): Homolog of NCBI NO: 18414994 NR Description: expressed protein [Arabidopsis thaliana]
  misc_feature (1)..(264): Homolog of NCBI NO: 21592868 NR Description: unknown [Arabidopsis thaliana]
  misc_feature (17)..(264): Homolog of NCBI NO: 7487766 NR Description: hypothetical protein T6K21.120 - Arabidopsis >gi|2894603|emb|CAA17137.1| putative protein [Arabidopsis >gi|7268546|emb|CAB78796.1| putative protein [Arabidopsis
  misc_feature (1)..(252): Homolog of NCBI NO: 15241290 NR Description: expressed protein [Arabidopsis thaliana]
  misc_feature (113)..(249): Homolog of NCBI NO: 37537130 NR Description: unknown protein [Oryza sativa (japonica
  misc_feature (114)..(257): Homolog of NCBI NO: 14532728 NR Description: unknown protein [Arabidopsis thaliana]
  misc_feature (114)..(257): Homolog of NCBI NO: 15236755 NR Description: expressed protein [Arabidopsis thaliana]
  misc_feature (88)..(252): Homolog of NCBI NO: 18412668 NR Description: expressed protein [Arabidopsis thaliana]
  misc_feature (1)..(258): Homolog of NCBI NO: 32488305 NR Description: OSJNBb0065L13.14 [Oryza sativa (japonica
  misc_feature (133)..(251): Homolog of NCBI NO: 18390404 NR Description: expressed protein [Arabidopsis thaliana] unknown protein [Arabidopsis thaliana]
MPVLQNRLISGGSSRKMTPISRTNSVESLSSYGERFAGGKISIEVKANVGMRRVLSESDVIRSERMLKRVGSKPSPARIPEDDEAGEEEIRFADGWGSMISGGLPVEEKCFTGGGVGGGSGYSGGYGNGGGGGYEDKSKIGDYYREMLRSNPNNSLLLMNYGKFLYEVEKDAEGAEEYYGRAILENPGDGEALSMYGRLIWETKRDEKRAQGYFDQAVNASPNDCMVLGSYARFMWEAEDDDDDDEEEEEEEWMAASPLMVSAV

SEQ ID NO: 105147 - DNA, 1294 bp, Arabidopsis thaliana
  misc_feature (1)..(1294): Ceres Seq. ID no. 13616548
  misc_feature: MA Experiment ID: 108474 Result: Down-regulated in Transcription
  misc_feature: MA Experiment 108474 PARAMETER Experiment Name: At_Drought_Flowers_cDNA_P Parameter: Timepoint (hr) Value: null
  misc_feature: MA Experiment 108474 PARAMETER Experiment Name: At_Drought_Flowers_cDNA_P Parameter: Treatment Value: Drought vs. No Drought
  misc_feature: MA Experiment ID: 108501 Result: Down-regulated in Transcription
  misc_feature: MA Experiment 108501 PARAMETER Experiment Name: At_ap2_floral_buds_cDNA_P Parameter: Plant Line Value: ap2 (Ler.)
  misc_feature: MA Experiment 108501 PARAMETER Experiment Name: At_ap2_floral_buds_cDNA_P Parameter: Tissue Value: Closed Flower
  misc_feature: MA Experiment ID: 108576 Result: Up-regulated in Transcription
  misc_feature: MA Experiment 108576 PARAMETER Experiment Name: At_42deg_Heat_cDNA_P Parameter: Temperature (deg C) Value: 42 vs. 22
  misc_feature: MA Experiment 108576 PARAMETER Experiment Name: At_42deg_Heat_cDNA_P Parameter: Timepoint (hr) Value: 1
  misc_feature: MA Experiment 108576 PARAMETER Experiment Name: At_42deg_Heat_cDNA_P Parameter: Tissue Value: Aerial
  misc_feature: MA Experiment ID: 108595 Result: Up-regulated in Transcription
  misc_feature: MA Experiment 108595 PARAMETER Experiment Name: At_Ler-pi_Ovule_cDNA_P Parameter: Plant Line Value: null
  misc_feature: MA Experiment ID: 20000087 Result: Up-regulated in Transcription
  misc_feature: MA Experiment 20000087 PARAMETER Experiment Name: At_100uM_ABA_Mutants_cDNA_P Parameter: Plant Line Value: WS
  misc_feature: MA Experiment 20000087 PARAMETER Experiment Name: At_100uM_ABA_Mutants_cDNA_P Parameter: Timepoint (hr) Value: 6
  misc_feature: MA Experiment 20000087 PARAMETER Experiment Name: At_100uM_ABA_Mutants_cDNA_P Parameter: Tissue Value: Aerial
  misc_feature: MA Experiment 20000087 PARAMETER Experiment Name: At_100uM_ABA_Mutants_cDNA_P Parameter: Treatment Value: 100uM ABA vs. No Treatment
  misc_feature: MA Experiment ID: 20000265 Result: Up-regulated in Transcription
  misc_feature: MA Experiment 20000265 PARAMETER Experiment Name: At_Open_Flower_P Parameter: Age (day) Value: 21
  misc_feature: MA Experiment 20000265 PARAMETER Experiment Name: At_Open_Flower_P Parameter: Plant Line Value: WS
  misc_feature: MA Experiment 20000265 PARAMETER Experiment Name: At_Open_Flower_P Parameter: Tissue Value: Closed Flower vs. Whole Plant
  misc_feature: MA Experiment ID: 20000286 Result: Up-regulated in Transcription
  misc_feature: MA Experiment 20000286 PARAMETER Experiment Name: At_Open_Flower_P Parameter: Age (day) Value: 21
  misc_feature: MA Experiment 20000286 PARAMETER Experiment Name: At_Open_Flower_P Parameter: Plant Line Value: WS
  misc_feature: MA Experiment 20000286 PARAMETER Experiment Name: At_Open_Flower_P Parameter: Tissue Value: Half Open vs. Whole Plant
  misc_feature: MA Experiment ID: 20001910 Result: Down-regulated in Transcription
  misc_feature: MA Experiment 20001910 PARAMETER Experiment Name: At_Drought_Reproduction_P Parameter: Age (day) Value: 37
  misc_feature: MA Experiment 20001910 PARAMETER Experiment Name: At_Drought_Reproduction_P Parameter: Organism Value: A. thaliana
  misc_feature: MA Experiment 20001910 PARAMETER Experiment Name: At_Drought_Reproduction_P Parameter: Plant Line Value: WS
  misc_feature: MA Experiment 20001910 PARAMETER Experiment Name: At_Drought_Reproduction_P Parameter: Timepoint (day) Value: 7
  misc_feature: MA Experiment 20001910 PARAMETER Experiment Name: At_Drought_Reproduction_P Parameter: Tissue Value: Flowers
  misc_feature: MA Experiment 20001910 PARAMETER Experiment Name: At_Drought_Reproduction_P Parameter: Treatment Value: Drought vs. No Drought
atatttctccttcaggtttctatgatggaactagaatcagaaactcaagaactccatcttcacgtaaatggcgaacctgaagggaaattttcaacagaagagagaagtcacaagtactcttggaggttaagagtgtctctctatgtcactctcctcttagctggagagacaatagccactctcttaggtagactttactacgaaaaaggcggtaaaagcacatggctcgaaaccttggttcagcttgtagggtttcctttaacccttccttgctattattacttaaagcctgagccgtccaagactaaaaccattaccaaaaaaactacttcttccttcttgacactatctttagtgtatattggacttggcttgcttgttgctggacattgtattttgtactcatttgggctactttaccttcctgtctcaactttctctttgatctctgcgtcgcaattggcttttaacgccgtcttctcttacttcctaaactcacaaaaaatcacaccatttatactcaattcacttgttctcttaaccatatcttctacacttcttgttatccaacatgaaccagaatctccctcttctacttcaaagtccgcagccaagtccaagtatgtgattggatacatctgcgcggtcggtagctcagctggttattctctggtgctttctttaacagattacgcgttcgaaaagattctaaagaaatacacattcaaggctattttagacatggccacatatccgtctatggtagctacttgtgtagttgtggtaggactttttggaagtggtgggtggaaaaagctgagtacagaaatggaagagtttcaactagggaaaagctcatacattttgataaacatcggttcaacgatatcatggcaagcttgtttgattggaagtgttggtttgattatcgaagtttcatcgcttttttccaatgtcataagcactctttgtttaccagttgtgcctgttcttgctgttgtcttcttccgtgatgagatgagtggaatcaagttggttgcaatgtttttggccatctggggatttgtttcttatggttatcagcattatgtcaatgatagaaagccagaagaagaccaagagcttcctcagtctaaagaagaagaagaacaaaaacaagtagataccattcatgtccaagcttaggcaaagatccaagaaaaccaaaagcttttgtaatttgaaccagtttaatctaaaataaaaatgagttatatatattgtaggcactacaaataaaattggtaagtgtctc

SEQ ID NO: 105148 - protein, 394 aa, Arabidopsis thaliana
  peptide (1)..(394): Ceres Seq. ID no. 13616549
  misc_feature (194)..(376): Pfam Name: Domain of unknown function, DUF250 Pfam Description: Domain of unknown function, DUF250
  misc_feature (25)..(394): Homolog of NCBI NO: 15236794 NR Description: purine permease family [Arabidopsis thaliana]
  misc_feature (31)..(383): Homolog of NCBI NO: 30684325 NR Description: purine permease family [Arabidopsis thaliana]
  misc_feature (55)..(382): Homolog of NCBI NO: 15236799 NR Description: purine permease family [Arabidopsis thaliana]
  misc_feature (17)..(384): Homolog of NCBI NO: 15236796 NR Description: purine permease family [Arabidopsis thaliana]
  misc_feature (17)..(384): Homolog of NCBI NO: 18491221 NR Description: unknown protein [Arabidopsis thaliana]
  misc_feature (65)..(383): Homolog of NCBI NO: 7487849 NR Description: hypothetical protein T9A21.60 - Arabidopsis >gi|2832695|emb|CAA16793.1| putative protein [Arabidopsis >gi|7268614|emb|CAB78823.1| putative protein [Arabidopsis
  misc_feature (39)..(382): Homolog of NCBI NO: 15219436 NR Description: purine permease family [Arabidopsis thaliana]
  misc_feature (65)..(376): Homolog of NCBI NO: 15236796 NR Description: purine permease family [Arabidopsis thaliana]
  misc_feature (39)..(371): Homolog of NCBI NO: 38605752 NR Description: OSJNBb0016D16.5 [Oryza sativa (japonica
  misc_feature (39)..(371): Homolog of NCBI NO: 38344290 NR Description: OSJNBa0013K16.22 [Oryza sativa (japonica
IFLLQVSMMELESETQELHLHVNGEPEGKFSTEERSHKYSWRLRVSLYVTLLLAGETIATLLGRLYYEKGGKSTWLETLVQLVGFPLTLPCYYYLKPEPSKTKTITKKTTSSFLTLSLVYIGLGLLVAGHCILYSFGLLYLPVSTFSLISASQLAFNAVFSYFLNSQKITPFILNSLVLLTISSTLLVIQHEPESPSSTSKSAAKSKYVIGYICAVGSSAGYSLVLSLTDYAFEKILKKYTFKAILDMATYPSMVATCVVVVGLFGSGGWKKLSTEMEEFQLGKSSYILINIGSTISWQACLIGSVGLIIEVSSLFSNVISTLCLPVVPVLAVVFFRDEMSGIKLVAMFLAIWGFVSYGYQHYVNDRKPEEDQELPQSKEEEEQKQVDTIHVQA

SEQ ID NO: 105149 - protein, 387 aa, Arabidopsis thaliana
  peptide (1)..(387): Ceres Seq. ID no. 13616550
  misc_feature (187)..(369): Pfam Name: Domain of unknown function, DUF250 Pfam Description: Domain of unknown function, DUF250
  misc_feature (18)..(387): Homolog of NCBI NO: 15236794 NR Description: purine permease family [Arabidopsis thaliana]
  misc_feature (24)..(376): Homolog of NCBI NO: 30684325 NR Description: purine permease family [Arabidopsis thaliana]
  misc_feature (48)..(375): Homolog of NCBI NO: 15236799 NR Description: purine permease family [Arabidopsis thaliana]
  misc_feature (10)..(377): Homolog of NCBI NO: 15236796 NR Description: purine permease family [Arabidopsis thaliana]
  misc_feature (10)..(377): Homolog of NCBI NO: 18491221 NR Description: unknown protein [Arabidopsis thaliana]
  misc_feature (58)..(376): Homolog of NCBI NO: 7487849 NR Description: hypothetical protein T9A21.60 - Arabidopsis >gi|2832695|emb|CAA16793.1| putative protein [Arabidopsis >gi|7268614|emb|CAB78823.1| putative protein [Arabidopsis
  misc_feature (32)..(375): Homolog of NCBI NO: 15219436 NR Description: purine permease family [Arabidopsis thaliana]
  misc_feature (58)..(369): Homolog of NCBI NO: 15236796 NR Description: purine permease family [Arabidopsis thaliana]
  misc_feature (32)..(364): Homolog of NCBI NO: 38605752 NR Description: OSJNBb0016D16.5 [Oryza sativa (japonica
  misc_feature (32)..(364): Homolog of NCBI NO: 38344290 NR Description: OSJNBa0013K16.22 [Oryza sativa (japonica
MMELESETQELHLHVNGEPEGKFSTEERSHKYSWRLRVSLYVTLLLAGETIATLLGRLYYEKGGKSTWLETLVQLVGFPLTLPCYYYLKPEPSKTKTITKKTTSSFLTLSLVYIGLGLLVAGHCILYSFGLLYLPVSTFSLISASQLAFNAVFSYFLNSQKITPFILNSLVLLTISSTLLVIQHEPESPSSTSKSAAKSKYVIGYICAVGSSAGYSLVLSLTDYAFEKILKKYTFKAILDMATYPSMVATCVVVVGLFGSGGWKKLSTEMEEFQLGKSSYILINIGSTISWQACLIGSVGLIIEVSSLFSNVISTLCLPVVPVLAVVFFRDEMSGIKLVAMFLAIWGFVSYGYQHYVNDRKPEEDQELPQSKEEEEQKQVDTIHVQA

SEQ ID NO: 105150 - protein, 386 aa, Arabidopsis thaliana
  peptide (1)..(386): Ceres Seq. ID no. 13616551
  misc_feature (186)..(368): Pfam Name: Domain of unknown function, DUF250 Pfam Description: Domain of unknown function, DUF250
  misc_feature (17)..(386): Homolog of NCBI NO: 15236794 NR Description: purine permease family [Arabidopsis thaliana]
  misc_feature (23)..(375): Homolog of NCBI NO: 30684325 NR Description: purine permease family [Arabidopsis thaliana]
  misc_feature (47)..(374): Homolog of NCBI NO: 15236799 NR Description: purine permease family [Arabidopsis thaliana]
  misc_feature (9)..(376): Homolog of NCBI NO: 15236796 NR Description: purine permease family [Arabidopsis thaliana]
  misc_feature (9)..(376): Homolog of NCBI NO: 18491221 NR Description: unknown protein [Arabidopsis thaliana]
  misc_feature (57)..(375): Homolog of NCBI NO: 7487849 NR Description: hypothetical protein T9A21.60 - Arabidopsis >gi|2832695|emb|CAA16793.1| putative protein [Arabidopsis >gi|7268614|emb|CAB78823.1| putative protein [Arabidopsis
  misc_feature (31)..(374): Homolog of NCBI NO: 15219436 NR Description: purine permease family [Arabidopsis thaliana]
  misc_feature (57)..(368): Homolog of NCBI NO: 15236796 NR Description: purine permease family [Arabidopsis thaliana]
  misc_feature (31)..(363): Homolog of NCBI NO: 38605752 NR Description: OSJNBb0016D16.5 [Oryza sativa (japonica
  misc_feature (31)..(363): Homolog of NCBI NO: 38344290 NR Description: OSJNBa0013K16.22 [Oryza sativa (japonica
MELESETQELHLHVNGEPEGKFSTEERSHKYSWRLRVSLYVTLLLAGETIATLLGRLYYEKGGKSTWLETLVQLVGFPLTLPCYYYLKPEPSKTKTITKKTTSSFLTLSLVYIGLGLLVAGHCILYSFGLLYLPVSTFSLISASQLAFNAVFSYFLNSQKITPFILNSLVLLTISSTLLVIQHEPESPSSTSKSAAKSKYVIGYICAVGSSAGYSLVLSLTDYAFEKILKKYTFKAILDMATYPSMVATCVVVVGLFGSGGWKKLSTEMEEFQLGKSSYILINIGSTISWQACLIGSVGLIIEVSSLFSNVISTLCLPVVPVLAVVFFRDEMSGIKLVAMFLAIWGFVSYGYQHYVNDRKPEEDQELPQSKEEEEQKQVDTIHVQA

SEQ ID NO: 105151 - DNA, 1185 bp, Arabidopsis thaliana
  misc_feature (1)..(1185): Ceres Seq. ID no. 13616568
  misc_feature: MA Experiment ID: 108434 Result: Down-regulated in Transcription
  misc_feature: MA Experiment 108434 PARAMETER Experiment Name: At_Root_Tips_cDNA_P Parameter: Tissue Value: Root Tips
  misc_feature: MA Experiment ID: 108435 Result: Up-regulated in Transcription
  misc_feature: MA Experiment 108435 PARAMETER Experiment Name: At_stm_Mutants_cDNA_P Parameter: Plant Line Value: wt Landsburg vs stm
  misc_feature: MA Experiment 108435 PARAMETER Experiment Name: At_stm_Mutants_cDNA_P Parameter: Tissue Value: Shoot Apical Meristem Region
  misc_feature: MA Experiment ID: 108463 Result: Up-regulated in Transcription
  misc_feature: MA Experiment 108463 PARAMETER Experiment Name: At_Germinating_Seeds_cDNA_P Parameter: Age (day) Value: 3 vs. 0
  misc_feature: MA Experiment 108463 PARAMETER Experiment Name: At_Germinating_Seeds_cDNA_P Parameter: Tissue Value: Germinating Seeds
  misc_feature: MA Experiment ID: 108469 Result: Down-regulated in Transcription
  misc_feature: MA Experiment ID: 108573 Result: Down-regulated in Transcription
  misc_feature: MA Experiment 108573 PARAMETER Experiment Name: At_Drought_cDNA_P Parameter: Timepoint (hr) Value: 6
  misc_feature: MA Experiment 108573 PARAMETER Experiment Name: At_Drought_cDNA_P Parameter: Tissue Value: Aerial
  misc_feature: MA Experiment 108573 PARAMETER Experiment Name: At_Drought_cDNA_P Parameter: Treatment Value: Drought vs. No Drought
  misc_feature: MA Experiment ID: 108574 Result: Up-regulated in Transcription
  misc_feature: MA Experiment 108574 PARAMETER Experiment Name: At_Wounding__cDNA_P Parameter: Timepoint (hr) Value: 1
  misc_feature: MA Experiment 108574 PARAMETER Experiment Name: At_Wounding__cDNA_P Parameter: Tissue Value: Aerial
  misc_feature: MA Experiment 108574 PARAMETER Experiment Name: At_Wounding__cDNA_P Parameter: Treatment Value: Wounding vs. No Wounding
  misc_feature: MA Experiment ID: 108576 Result: Down-regulated in Transcription
  misc_feature: MA Experiment 108576 PARAMETER Experiment Name: At_42deg_Heat_cDNA_P Parameter: Temperature (deg C) Value: 42 vs. 22
  misc_feature: MA Experiment 108576 PARAMETER Experiment Name: At_42deg_Heat_cDNA_P Parameter: Timepoint (hr) Value: 1
  misc_feature: MA Experiment 108576 PARAMETER Experiment Name: At_42deg_Heat_cDNA_P Parameter: Tissue Value: Aerial
  misc_feature: MA Experiment ID: 108579 Result: Up-regulated in Transcription
  misc_feature: MA Experiment 108579 PARAMETER Experiment Name: At_4deg_Cold_cDNA_P Parameter: Temperature (deg C) Value: 4 vs. 22
  misc_feature: MA Experiment 108579 PARAMETER Experiment Name: At_4deg_Cold_cDNA_P Parameter: Timepoint (hr) Value: 6
  misc_feature: MA Experiment 108579 PARAMETER Experiment Name: At_4deg_Cold_cDNA_P Parameter: Tissue Value: Aerial
  misc_feature: MA Experiment ID: 108585 Result: Down-regulated in Transcription
  misc_feature: MA Experiment 108585 PARAMETER Experiment Name: At_5mM_NaNP_cDNA_P Parameter: Timepoint (hr) Value: 6
  misc_feature: MA Experiment 108585 PARAMETER Experiment Name: At_5mM_NaNP_cDNA_P Parameter: Tissue Value: Aerial
  misc_feature: MA Experiment 108585 PARAMETER Experiment Name: At_5mM_NaNP_cDNA_P Parameter: Treatment Value: null
  misc_feature: MA Experiment ID: 108595 Result: Down-regulated in Transcription
  misc_feature: MA Experiment 108595 PARAMETER Experiment Name: At_Ler-pi_Ovule_cDNA_P Parameter: Plant Line Value: null
  misc_feature: MA Experiment ID: 108668 Result: Down-regulated in Transcription
  misc_feature: MA Experiment 108668 PARAMETER Experiment Name: At_2mM_SA_cDNA_P Parameter: Plant Line Value: WS
  misc_feature: MA Experiment 108668 PARAMETER Experiment Name: At_2mM_SA_cDNA_P Parameter: Timepoint (hr) Value: 6
  misc_feature: MA Experiment 108668 PARAMETER Experiment Name: At_2mM_SA_cDNA_P Parameter: Treatment Value: 2mM SA vs. No Treatment
  misc_feature: MA Experiment ID: 20000090 Result: Down-regulated in Transcription
  misc_feature: MA Experiment ID: 20000111 Result: Down-regulated in Transcription
  misc_feature: MA Experiment 20000111 PARAMETER Experiment Name: At_42deg_Heat_cDNA_P Parameter: Temperature (deg C) Value: 42 vs. 22
  misc_feature: MA Experiment 20000111 PARAMETER Experiment Name: At_42deg_Heat_cDNA_P Parameter: Timepoint (hr) Value: 6
  misc_feature: MA Experiment 20000111 PARAMETER Experiment Name: At_42deg_Heat_cDNA_P Parameter: Tissue Value: Aerial
  misc_feature: MA Experiment ID: 20000112 Result: Down-regulated in Transcription
  misc_feature: MA Experiment 20000112 PARAMETER Experiment Name: At_42deg_Heat_cDNA_P Parameter: Temperature (deg C) Value: 42 vs. 22
  misc_feature: MA Experiment 20000112 PARAMETER Experiment Name: At_42deg_Heat_cDNA_P Parameter: Timepoint (hr) Value: 2
  misc_feature: MA Experiment 20000112 PARAMETER Experiment Name: At_42deg_Heat_cDNA_P Parameter: Tissue Value: Aerial
  misc_feature: MA Experiment ID: 20000113 Result: Down-regulated in Transcription
  misc_feature: MA Experiment 20000113 PARAMETER Experiment Name: At_42deg_Heat_cDNA_P Parameter: Temperature (deg C) Value: 42 vs. 22
  misc_feature: MA Experiment 20000113 PARAMETER Experiment Name: At_42deg_Heat_cDNA_P Parameter: Timepoint (hr) Value: 8
  misc_feature: MA Experiment 20000113 PARAMETER Experiment Name: At_42deg_Heat_cDNA_P Parameter: Tissue Value: Aerial
  misc_feature: MA Experiment ID: 20000173 Result: Down-regulated in Transcription
  misc_feature: MA Experiment 20000173 PARAMETER Experiment Name: At_42deg_Heat_P Parameter: Age (day) Value: 14
  misc_feature: MA Experiment 20000173 PARAMETER Experiment Name: At_42deg_Heat_P Parameter: Organism Value: A. thaliana
  misc_feature: MA Experiment 20000173 PARAMETER Experiment Name: At_42deg_Heat_P Parameter: Plant Line Value: WS
  misc_feature: MA Experiment 20000173 PARAMETER Experiment Name: At_42deg_Heat_P Parameter: Temperature (deg C) Value: 42 vs. 22
  misc_feature: MA Experiment 20000173 PARAMETER Experiment Name: At_42deg_Heat_P Parameter: Timepoint (hr) Value: 6
  misc_feature: MA Experiment 20000173 PARAMETER Experiment Name: At_42deg_Heat_P Parameter: Tissue Value: Aerial
  misc_feature: MA Experiment ID: 20000180 Result: Up-regulated in Transcription
  misc_feature: MA Experiment 20000180 PARAMETER Experiment Name: At_Germinating_Seeds_P Parameter: Age (hr) Value: 24 vs. 0
  misc_feature: MA Experiment 20000180 PARAMETER Experiment Name: At_Germinating_Seeds_P Parameter: Tissue Value: Germinating Seeds
  misc_feature: MA Experiment ID: 20000182 Result: Down-regulated in Transcription
  misc_feature: MA Experiment 20000182 PARAMETER Experiment Name: At_2mM_SA_P Parameter: Age (day) Value: 14
  misc_feature: MA Experiment 20000182 PARAMETER Experiment Name: At_2mM_SA_P Parameter: Organism Value: A. thaliana
  misc_feature: MA Experiment 20000182 PARAMETER Experiment Name: At_2mM_SA_P Parameter: Plant Line Value: WS
  misc_feature: MA Experiment 20000182 PARAMETER Experiment Name: At_2mM_SA_P Parameter: Timepoint (hr) Value: 6
  misc_feature: MA Experiment 20000182 PARAMETER Experiment Name: At_2mM_SA_P Parameter: Tissue Value: Aerial
  misc_feature: MA Experiment 20000182 PARAMETER Experiment Name: At_2mM_SA_P Parameter: Treatment Value: 2mM SA vs. No Treatment
  misc_feature: MA Experiment ID: 20000184 Result: Down-regulated in Transcription
  misc_feature: MA Experiment 20000184 PARAMETER Experiment Name: At_Shoots__P Parameter: Age (day) Value: 7
  misc_feature: MA Experiment 20000184 PARAMETER Experiment Name: At_Shoots__P Parameter: Tissue Value: Shoots vs. Whole Plant
  misc_feature: MA Experiment ID: 20000227 Result: Down-regulated in Transcription
  misc_feature: MA Experiment 20000227 PARAMETER Experiment Name: At_Root-Tips-vs-Tops_P Parameter: Tissue Value: Root Tips vs. Root Tops
  misc_feature: MA Experiment ID: 20000234 Result: Down-regulated in Transcription
  misc_feature: MA Experiment 20000234 PARAMETER Experiment Name: At_Siliques_P Parameter: Age (day) Value: 21
  misc_feature: MA Experiment 20000234 PARAMETER Experiment Name: At_Siliques_P Parameter: Organism Value: A. thaliana
  misc_feature: MA Experiment 20000234 PARAMETER Experiment Name: At_Siliques_P Parameter: Plant Line Value: WS
  misc_feature: MA Experiment 20000234 PARAMETER Experiment Name: At_Siliques_P Parameter: Tissue Value: Less Than 5mm Siliques vs. Whole Plant
  misc_feature: MA Experiment ID: 20000235 Result: Down-regulated in Transcription
  misc_feature: MA Experiment 20000235 PARAMETER Experiment Name: At_Siliques_P Parameter: Age (day) Value: 21
  misc_feature: MA Experiment 20000235 PARAMETER Experiment Name: At_Siliques_P Parameter: Organism Value: A. thaliana
  misc_feature: MA Experiment 20000235 PARAMETER Experiment Name: At_Siliques_P Parameter: Plant Line Value: WS
  misc_feature: MA Experiment 20000235 PARAMETER Experiment Name: At_Siliques_P Parameter: Tissue Value: 5-10mm Siliques vs. Whole Plant
  misc_feature: MA Experiment ID: 20000265 Result: Down-regulated in Transcription
  misc_feature: MA Experiment 20000265 PARAMETER Experiment Name: At_Open_Flower_P Parameter: Age (day) Value: 21
  misc_feature: MA Experiment 20000265 PARAMETER Experiment Name: At_Open_Flower_P Parameter: Plant Line Value: WS
  misc_feature: MA Experiment 20000265 PARAMETER Experiment Name: At_Open_Flower_P Parameter: Tissue Value: Closed Flower vs. Whole Plant
  misc_feature: MA Experiment ID: 20000286 Result: Down-regulated in Transcription
  misc_feature: MA Experiment 20000286 PARAMETER Experiment Name: At_Open_Flower_P Parameter: Age (day) Value: 21
  misc_feature: MA Experiment 20000286 PARAMETER Experiment Name: At_Open_Flower_P Parameter: Plant Line Value: WS
  misc_feature: MA Experiment 20000286 PARAMETER Experiment Name: At_Open_Flower_P Parameter: Tissue Value: Half Open vs. Whole Plant
  misc_feature: MA Experiment ID: 20000437 Result: Down-regulated in Transcription
  misc_feature: MA Experiment 20000437 PARAMETER Experiment Name: At_Drought_P Parameter: Age (day) Value: 8
  misc_feature: MA Experiment 20000437 PARAMETER Experiment Name: At_Drought_P Parameter: Organism Value: A. thaliana
  misc_feature: MA Experiment 20000437 PARAMETER Experiment Name: At_Drought_P Parameter: Plant Line Value: WS
  misc_feature: MA Experiment 20000437 PARAMETER Experiment Name: At_Drought_P Parameter: Timepoint (hr) Value: 24
  misc_feature: MA Experiment 20000437 PARAMETER Experiment Name: At_Drought_P Parameter: Tissue Value: Whole Plant
  misc_feature: MA Experiment 20000437 PARAMETER Experiment Name: At_Drought_P Parameter: Treatment Value: Drought vs. No Drought
  misc_feature: MA Experiment ID: 20001247 Result: Down-regulated in Transcription
  misc_feature: MA Experiment 20001247 PARAMETER Experiment Name: At_Far-red-induction_P Parameter: Age (day) Value: 7
  misc_feature: MA Experiment 20001247 PARAMETER Experiment Name: At_Far-red-induction_P Parameter: Light Value: Far-red vs. White
  misc_feature: MA Experiment 20001247 PARAMETER Experiment Name: At_Far-red-induction_P Parameter: Organism Value: A. thaliana
  misc_feature: MA Experiment 20001247 PARAMETER Experiment Name: At_Far-red-induction_P Parameter: Plant Line Value: Columbia
  misc_feature: MA Experiment 20001247 PARAMETER Experiment Name: At_Far-red-induction_P Parameter: Timepoint (hr) Value: 1
  misc_feature: MA Experiment 20001247 PARAMETER Experiment Name: At_Far-red-induction_P Parameter: Tissue Value: Whole Plant
  misc_feature: MA Experiment ID: 20001248 Result: Down-regulated in Transcription
  misc_feature: MA Experiment 20001248 PARAMETER Experiment Name: At_Far-red-induction_P Parameter: Age (day) Value: 7
  misc_feature: MA Experiment 20001248 PARAMETER Experiment Name: At_Far-red-induction_P Parameter: Light Value: Far-red vs. White
  misc_feature: MA Experiment 20001248 PARAMETER Experiment Name: At_Far-red-induction_P Parameter: Organism Value: A. thaliana
  misc_feature: MA Experiment 20001248 PARAMETER Experiment Name: At_Far-red-induction_P Parameter: Plant Line Value: Columbia
  misc_feature: MA Experiment 20001248 PARAMETER Experiment Name: At_Far-red-induction_P Parameter: Timepoint (hr) Value: 4
  misc_feature: MA Experiment 20001248 PARAMETER Experiment Name: At_Far-red-induction_P Parameter: Tissue Value: Whole Plant
  misc_feature: MA Experiment ID: 20001450 Result: Down-regulated in Transcription
  misc_feature: MA Experiment 20001450 PARAMETER Experiment Name: At_Far-red-induction_P Parameter: Age (day) Value: 7
  misc_feature: MA Experiment 20001450 PARAMETER Experiment Name: At_Far-red-induction_P Parameter: Light Value: Far-red vs. White
  misc_feature: MA Experiment 20001450 PARAMETER Experiment Name: At_Far-red-induction_P Parameter: Organism Value: A. thaliana
  misc_feature: MA Experiment 20001450 PARAMETER Experiment Name: At_Far-red-induction_P Parameter: Plant Line Value: Columbia
  misc_feature: MA Experiment 20001450 PARAMETER Experiment Name: At_Far-red-induction_P Parameter: Timepoint (hr) Value: 8
  misc_feature: MA Experiment 20001450 PARAMETER Experiment Name: At_Far-red-induction_P Parameter: Tissue Value: Whole Plant
  misc_feature: MA Experiment ID: 20001451 Result: Down-regulated in Transcription
  misc_feature: MA Experiment 20001451 PARAMETER Experiment Name: At_Far-red-induction_P Parameter: Age (day) Value: 7
  misc_feature: MA Experiment 20001451 PARAMETER Experiment Name: At_Far-red-induction_P Parameter: Light Value: Far-red vs. White
  misc_feature: MA Experiment 20001451 PARAMETER Experiment Name: At_Far-red-induction_P Parameter: Organism Value: A. thaliana
  misc_feature: MA Experiment 20001451 PARAMETER Experiment Name: At_Far-red-induction_P Parameter: Plant Line Value: Columbia
  misc_feature: MA Experiment 20001451 PARAMETER Experiment Name: At_Far-red-induction_P Parameter: Timepoint (hr) Value: 24
  misc_feature: MA Experiment 20001451 PARAMETER Experiment Name: At_Far-red-induction_P Parameter: Tissue Value: Whole Plant
  misc_feature: MA Experiment ID: 20001558 Result: Down-regulated in Transcription
  misc_feature: MA Experiment 20001558 PARAMETER Experiment Name: At_Drought_Soil_Dry_P Parameter: Age (day) Value: 27
  misc_feature: MA Experiment 20001558 PARAMETER Experiment Name: At_Drought_Soil_Dry_P Parameter: Organism Value: A. thaliana
  misc_feature: MA Experiment 20001558 PARAMETER Experiment Name: At_Drought_Soil_Dry_P Parameter: Plant Line Value: WS
  misc_feature: MA Experiment 20001558 PARAMETER Experiment Name: At_Drought_Soil_Dry_P Parameter: Post Timepoint (hr) Value: 6
  misc_feature: MA Experiment 20001558 PARAMETER Experiment Name: At_Drought_Soil_Dry_P Parameter: Post-Treatment Value: Re-Water vs. No Drought
  misc_feature: MA Experiment 20001558 PARAMETER Experiment Name: At_Drought_Soil_Dry_P Parameter: Timepoint (day) Value: 13
  misc_feature: MA Experiment 20001558 PARAMETER Experiment Name: At_Drought_Soil_Dry_P Parameter: Treatment Value: Drought vs. No Drought
aattaaaaacattcagacacaaatttagtttcttcttcttttggttctgtctgaatccaattttcttatattttatttcctccaccaccgtgagatatgatcgccgccggagctaaatcgctattagggctttcgatggcttctccaaaagggattttcgatagcaattcaatgagtaattcaagatctgttgttgttgttcgtgcttgtgtttctatggatggatctcaaactctgagtcataacaaaaatggatctattcctgaggttaaatccattaacggtcacacgggacaaaagcaaggacctttgtctacggtcggaaactcgacaaatataaagtggcatgaatgttctgttgagaaagttgatagacagagattgcttgatcagaaaggatgtgtgatttgggtcaccggtcttagtggttcagggaagagtactttggcttgtgctttgaatcagatgttgtatcaaaaggggaagctttgttatattcttgatggtgataatgttaggcatggcttaaaccgtgatcttagctttaaagctgaggatcgtgcagagaatattcgtagagttggagaggttgctaagctttttgcggatgctggaataatctgcattgcgagtttgatatctccttatagaacagatagggacgcttgtcgaagtttgctccccgagggagattttgttgaggtgttcatggatgtaccgcttagtgtttgcgaggcgagggatccaaagggtctttacaagcttgctcgtgcaggaaagatcaaaggttttaccgggatcgatgacccttacgagccaccattgaactgcgagatttctctaggacgtgaaggaggaacttctcctatcgaaatggcggaaaaggtcgtcggatacttagataacaagggttatcttcaagcataacatacttctagatacacaaatttgttatctcacggtcttagttctattttacgagccaaagtataaaagtaagcaaatccatggctgttttatggaatcacaagttcgacaaaataaatataaatctcataatttttcttgtccctttttttttgtatcataaatcttgatgttatggttctgtatataatatgtgtgaaataaggttaagcctactaaccattttatatgatctataatacaatatactttgtatgc

SEQ ID NO: 105152 - protein, 276 aa, Arabidopsis thaliana; identical to SEQ ID NO: 29479
  peptide (1)..(276): Ceres Seq. ID no. 13616569
  misc_feature (100)..(256): Pfam Name: Adenylylsulphate kinase Pfam Description: Adenylylsulphate kinase
  misc_feature (1)..(276): Homolog of NCBI NO: 15225999 NR Description: adenosine phosphosulfate kinase -related thaliana] >gi|7387811|sp|Q43295|KAP1_ARATH Adenylylsulfate kinase
  misc_feature (1)..(276): Homolog of NCBI NO: 21553403 NR Description: putative adenosine phosphosulfate kinase
  misc_feature (50)..(276): Homolog of NCBI NO: 7387809 NR Description: Adenylylsulfate kinase, chloroplast precursor
  misc_feature (68)..(275): Homolog of NCBI NO: 15236087 NR Description: adenosine-5-phosphosulfate-kinase [Arabidopsis >gi|7387808|sp|O49196|KAP2_ARATH Adenylylsulfate kinase 2,
  misc_feature (72)..(275): Homolog of NCBI NO: 15228666 NR Description: adenylylsulfate kinase -related [Arabidopsis >gi|6006852|gb|AAF00628.1|AC009540_5 putative adenylylsulfate
  misc_feature (10)..(276): Homolog of NCBI NO: 9757873 NR Description: adenylylsulfate kinase-like protein [Arabidopsis
  misc_feature (73)..(274): Homolog of NCBI NO: 34393551 NR Description: putative adenosine-5'-phosphosulfate kinase
  misc_feature (2)..(256): Homolog of NCBI NO: 18425199 NR Description: adenylylsulfate kinase-related protein thaliana] >gi|28393175|gb|AAO42019.1| putative adenylylsulfate [Arabidopsis thaliana] >gi|28827764|gb|AAO50726.1| putative
  misc_feature (54)..(274): Homolog of NCBI NO: 6563285 NR Description: adenosine-5'-phosphosulfate kinase [Zea mays]
  misc_feature (10)..(256): Homolog of NCBI NO: 21537248 NR Description: adenylylsulfate kinase-like protein [Arabidopsis

SEQ ID NO: 105153 - protein, 263 aa, Arabidopsis thaliana; identical to SEQ ID NO: 29480
  peptide (1)..(263): Ceres Seq. ID no. 13616570
  misc_feature (87)..(243): Pfam Name: Adenylylsulphate kinase Pfam Description: Adenylylsulphate kinase
  misc_feature (1)..(263): Homolog of NCBI NO: 15225999 NR Description: adenosine phosphosulfate kinase -related thaliana] >gi|7387811|sp|Q43295|KAP1_ARATH Adenylylsulfate kinase
  misc_feature (1)..(263): Homolog of NCBI NO: 21553403 NR Description: putative adenosine phosphosulfate kinase
  misc_feature (37)..(263): Homolog of NCBI NO: 7387809 NR Description: Adenylylsulfate kinase, chloroplast precursor
  misc_feature (55)..(262): Homolog of NCBI NO: 15236087 NR Description: adenosine-5-phosphosulfate-kinase [Arabidopsis >gi|7387808|sp|O49196|KAP2_ARATH Adenylylsulfate kinase 2,
  misc_feature (59)..(262): Homolog of NCBI NO: 15228666 NR Description: adenylylsulfate kinase -related [Arabidopsis >gi|6006852|gb|AAF00628.1|AC009540_5 putative adenylylsulfate
  misc_feature (1)..(263): Homolog of NCBI NO: 9757873 NR Description: adenylylsulfate kinase-like protein [Arabidopsis
  misc_feature (60)..(261): Homolog of NCBI NO: 34393551 NR Description: putative adenosine-5'-phosphosulfate kinase
  misc_feature (1)..(243): Homolog of NCBI NO: 18425199 NR Description: adenylylsulfate kinase-related protein thaliana] >gi|28393175|gb|AAO42019.1| putative adenylylsulfate [Arabidopsis thaliana] >gi|28827764|gb|AAO50726.1| putative
  misc_feature (41)..(261): Homolog of NCBI NO: 6563285 NR Description: adenosine-5'-phosphosulfate kinase [Zea mays]
  misc_feature (1)..(243): Homolog of NCBI NO: 21537248 NR Description: adenylylsulfate kinase-like protein [Arabidopsis

SEQ ID NO: 105154 - protein, 251 aa, Arabidopsis thaliana; identical to SEQ ID NO: 29481
  peptide (1)..(251): Ceres Seq. ID no. 13616571
  misc_feature (75)..(231): Pfam Name: Adenylylsulphate kinase Pfam Description: Adenylylsulphate kinase
  misc_feature (1)..(251): Homolog of NCBI NO: 15225999 NR Description: adenosine phosphosulfate kinase -related thaliana] >gi|7387811|sp|Q43295|KAP1_ARATH Adenylylsulfate kinase
  misc_feature (1)..(251): Homolog of NCBI NO: 21553403 NR Description: putative adenosine phosphosulfate kinase
  misc_feature (25)..(251): Homolog of NCBI NO: 7387809 NR Description: Adenylylsulfate kinase, chloroplast precursor
  misc_feature (43)..(250): Homolog of NCBI NO: 15236087 NR Description: adenosine-5-phosphosulfate-kinase [Arabidopsis >gi|7387808|sp|O49196|KAP2_ARATH Adenylylsulfate kinase 2,
  misc_feature (47)..(250): Homolog of NCBI NO: 15228666 NR Description: adenylylsulfate kinase -related [Arabidopsis >gi|6006852|gb|AAF00628.1|AC009540_5 putative adenylylsulfate
  misc_feature (1)..(251): Homolog of NCBI NO: 9757873 NR Description: adenylylsulfate kinase-like protein [Arabidopsis
  misc_feature (48)..(249): Homolog of NCBI NO: 34393551 NR Description: putative adenosine-5'-phosphosulfate kinase
  misc_feature (1)..(231): Homolog of NCBI NO: 18425199 NR Description: adenylylsulfate kinase-related protein thaliana] >gi|28393175|gb|AAO42019.1| putative adenylylsulfate [Arabidopsis thaliana] >gi|28827764|gb|AAO50726.1| putative
  misc_feature (29)..(249): Homolog of NCBI NO: 6563285 NR Description: adenosine-5'-phosphosulfate kinase [Zea mays]
  misc_feature (1)..(231): Homolog of NCBI NO: 21537248 NR Description: adenylylsulfate kinase-like protein [Arabidopsis

SEQ ID NO: 105155 - DNA, 629 bp, Arabidopsis thaliana
  misc_feature (1)..(629): Ceres Seq. ID no. 13616572
  misc_feature: MA Experiment ID: 20000227 Result: Down-regulated in Transcription
  misc_feature: MA Experiment 20000227 PARAMETER Experiment Name: At_Root-Tips-vs-Tops_P Parameter: Tissue Value: Root Tips vs. Root Tops
  misc_feature: MA Experiment ID: 20000437 Result: Up-regulated in Transcription
  misc_feature: MA Experiment 20000437 PARAMETER Experiment Name: At_Drought_P Parameter: Age (day) Value: 8
  misc_feature: MA Experiment 20000437 PARAMETER Experiment Name: At_Drought_P Parameter: Organism Value: A. thaliana
  misc_feature: MA Experiment 20000437 PARAMETER Experiment Name: At_Drought_P Parameter: Plant Line Value: WS
  misc_feature: MA Experiment 20000437 PARAMETER Experiment Name: At_Drought_P Parameter: Timepoint (hr) Value: 24
  misc_feature: MA Experiment 20000437 PARAMETER Experiment Name: At_Drought_P Parameter: Tissue Value: Whole Plant
  misc_feature: MA Experiment 20000437 PARAMETER Experiment Name: At_Drought_P Parameter: Treatment Value: Drought vs. No Drought
atggcggaaaaagcaccgtcctcctcctcctcctcttctccgccgaaagaagttgcagatgaaacacaagactggatactcggagccgggtcgggttgggtcgaagctcgtaaaacttgcgatcacttgaacactttatctcccgatttacttcacttaccaactcctgatactccttgttctaggtgccaaaacccggtagagaactggttatgcctttgttgtaaagaggttctatgcagccgtttcgtgaataggcatatgctgatgcatcatcaacaaaccggtcactgccttgcactaagctatagtgacttgtcggtatggtgcttctgctgtgaagcgtatcttgatgctcagatcattttgcagctgagaccaattcaccaagctgcttacattcttaaatttggcgaggctcctcctttaccccaactttgataacaccaaagagctctctttttctgtacctatctgtctctctagatgtgttagtgaagaaagtttggtacattgagttctttgtttttgtttttttttaggttccaatgagatttattaagtttctaaatcactatattacatatcatctcacgaaccaatattatcaagagttaaattataatttc

SEQ ID NO: 105156 - protein, 146 aa, Arabidopsis thaliana
  peptide (1)..(146): Ceres Seq. ID no. 13616573
  misc_feature (60)..(130): Pfam Name: Zn-finger in ubiquitin-hydrolases and other protein Pfam Description: Zn-finger in ubiquitin-hydrolases and other
  misc_feature (7)..(146): Homolog of NCBI NO: 26984073 NR Description: hypothetical protein [Arabidopsis thaliana]
  misc_feature (1)..(62): Homolog of NCBI NO: 15226014 NR Description: hypothetical protein [Arabidopsis thaliana]
  misc_feature (1)..(142): Homolog of NCBI NO: 39588371 NR Description: Hypothetical protein CBG19959 [Caenorhabditis
  misc_feature (40)..(144): Homolog of NCBI NO: 7108921 NR Description: GR AF-1 specific histone deacetylase [Homo
  misc_feature (40)..(144): Homolog of NCBI NO: 11360193 NR Description: hypothetical protein DKFZp566E044.1 - human
  misc_feature (40)..(144): Homolog of NCBI NO: 15489272 NR Description: histone deacetylase 6 [Homo sapiens]
  misc_feature (40)..(144): Homolog of NCBI NO: 10720024 NR Description: Histone deacetylase 6 (HD6)
  misc_feature (40)..(144): Homolog of NCBI NO: 13128864 NR Description: histone deacetylase 6 [Homo sapiens]
  misc_feature (40)..(144): Homolog of NCBI NO: 40788979 NR Description: KIAA0901 protein [Homo sapiens]
  misc_feature (1)..(142): Homolog of NCBI NO: 17540332 NR Description: Histone DeAcetylase HDA-6 (106.7 kD) (hda-6) elegans] >gi|30923304|sp|Q20296|HDA6_CAEEL Histone deactylase 6
MAEKAPSSSSSSSPPKEVADETQDWILGAGSGWVEARKTCDHLNTLSPDLLHLPTPDTPCSRCQNPVENWLCLCCKEVLCSRFVNRHMLMHHQQTGHCLALSYSDLSVWCFCCEAYLDAQIILQLRPIHQAAYILKFGEAPPLPQL

SEQ ID NO: 105157 - DNA, 1624 bp, Arabidopsis thaliana
  misc_feature (1)..(1624): Ceres Seq. ID no. 13616589
  misc_feature: MA Experiment ID: 108434 Result: Down-regulated in Transcription
  misc_feature: MA Experiment 108434 PARAMETER Experiment Name: At_Root_Tips_cDNA_P Parameter: Tissue Value: Root Tips
  misc_feature: MA Experiment ID: 108461 Result: Down-regulated in Transcription
  misc_feature: MA Experiment 108461 PARAMETER Experiment Name: At_Germinating_Seeds_cDNA_P Parameter: Age (day) Value: 1 vs. 0
  misc_feature: MA Experiment 108461 PARAMETER Experiment Name: At_Germinating_Seeds_cDNA_P Parameter: Tissue Value: Germinating Seeds
  misc_feature: MA Experiment ID: 108462 Result: Down-regulated in Transcription
  misc_feature: MA Experiment 108462 PARAMETER Experiment Name: At_Germinating_Seeds_cDNA_P Parameter: Age (day) Value: 2 vs. 0
  misc_feature: MA Experiment 108462 PARAMETER Experiment Name: At_Germinating_Seeds_cDNA_P Parameter: Tissue Value: Germinating Seeds
  misc_feature: MA Experiment ID: 108463 Result: Down-regulated in Transcription
  misc_feature: MA Experiment 108463 PARAMETER Experiment Name: At_Germinating_Seeds_cDNA_P Parameter: Age (day) Value: 3 vs. 0
  misc_feature: MA Experiment 108463 PARAMETER Experiment Name: At_Germinating_Seeds_cDNA_P Parameter: Tissue Value: Germinating Seeds
  misc_feature: MA Experiment ID: 108569 Result: Up-regulated in Transcription
  misc_feature: MA Experiment 108569 PARAMETER Experiment Name: At_0.001%_MeJA__cDNA_P Parameter: Timepoint (hr) Value: 6
  misc_feature: MA Experiment 108569 PARAMETER Experiment Name: At_0.001%_MeJA__cDNA_P Parameter: Tissue Value: Aerial
  misc_feature: MA Experiment 108569 PARAMETER Experiment Name: At_0.001%_MeJA__cDNA_P Parameter: Treatment Value: 0.001% MeJA vs. No Treatment
  misc_feature: MA Experiment ID: 108572 Result: Up-regulated in Transcription
  misc_feature: MA Experiment 108572 PARAMETER Experiment Name: At_Drought_cDNA_P Parameter: Timepoint (hr) Value: 1
  misc_feature: MA Experiment 108572 PARAMETER Experiment Name: At_Drought_cDNA_P Parameter: Tissue Value: Aerial
  misc_feature: MA Experiment 108572 PARAMETER Experiment Name: At_Drought_cDNA_P Parameter: Treatment Value: Drought vs. No Drought
  misc_feature: MA Experiment ID: 108585 Result: Up-regulated in Transcription
  misc_feature: MA Experiment 108585 PARAMETER Experiment Name: At_5mM_NaNP_cDNA_P Parameter: Timepoint (hr) Value: 6
  misc_feature: MA Experiment 108585 PARAMETER Experiment Name: At_5mM_NaNP_cDNA_P Parameter: Tissue Value: Aerial
  misc_feature: MA Experiment 108585 PARAMETER Experiment Name: At_5mM_NaNP_cDNA_P Parameter: Treatment Value: null
  misc_feature: MA Experiment ID: 20000069 Result: Up-regulated in Transcription
  misc_feature: MA Experiment 20000069 PARAMETER Experiment Name: At_100uM_ABA_Mutants_cDNA_P Parameter: Plant Line Value: CS23
  misc_feature: MA Experiment 20000069 PARAMETER Experiment Name: At_100uM_ABA_Mutants_cDNA_P Parameter: Timepoint (hr) Value: 6
  misc_feature: MA Experiment 20000069 PARAMETER Experiment Name: At_100uM_ABA_Mutants_cDNA_P Parameter: Tissue Value: Aerial
  misc_feature: MA Experiment 20000069 PARAMETER Experiment Name: At_100uM_ABA_Mutants_cDNA_P Parameter: Treatment Value: 100uM ABA vs. No Treatment
  misc_feature: MA Experiment ID: 20000070 Result: Up-regulated in Transcription
  misc_feature: MA Experiment 20000070 PARAMETER Experiment Name: At_100uM_ABA_Mutants_cDNA_P Parameter: Plant Line Value: CS24
  misc_feature: MA Experiment 20000070 PARAMETER Experiment Name: At_100uM_ABA_Mutants_cDNA_P Parameter: Timepoint (hr) Value: 6
  misc_feature: MA Experiment 20000070 PARAMETER Experiment Name: At_100uM_ABA_Mutants_cDNA_P Parameter: Tissue Value: Aerial
  misc_feature: MA Experiment 20000070 PARAMETER Experiment Name: At_100uM_ABA_Mutants_cDNA_P Parameter: Treatment Value: 100uM ABA vs. No Treatment
  misc_feature: MA Experiment ID: 20000071 Result: Up-regulated in Transcription
  misc_feature: MA Experiment 20000071 PARAMETER Experiment Name: At_100uM_ABA_Mutants_cDNA_P Parameter: Plant Line Value: CS8104
  misc_feature: MA Experiment 20000071 PARAMETER Experiment Name: At_100uM_ABA_Mutants_cDNA_P Parameter: Timepoint (hr) Value: 6
  misc_feature: MA Experiment 20000071 PARAMETER Experiment Name: At_100uM_ABA_Mutants_cDNA_P Parameter: Tissue Value: Aerial
  misc_feature: MA Experiment 20000071 PARAMETER Experiment Name: At_100uM_ABA_Mutants_cDNA_P Parameter: Treatment Value: 100uM ABA vs. No Treatment
  misc_feature: MA Experiment ID: 20000072 Result: Up-regulated in Transcription
  misc_feature: MA Experiment 20000072 PARAMETER Experiment Name: At_100uM_ABA_Mutants_cDNA_P Parameter: Plant Line Value: CS8105
  misc_feature: MA Experiment 20000072 PARAMETER Experiment Name: At_100uM_ABA_Mutants_cDNA_P Parameter: Timepoint (hr) Value: 6
  misc_feature: MA Experiment 20000072 PARAMETER Experiment Name: At_100uM_ABA_Mutants_cDNA_P Parameter: Tissue Value: Aerial
  misc_feature: MA Experiment 20000072 PARAMETER Experiment Name: At_100uM_ABA_Mutants_cDNA_P Parameter: Treatment Value: 100uM ABA vs. No Treatment
  misc_feature: MA Experiment ID: 20000086 Result: Up-regulated in Transcription
  misc_feature: MA Experiment 20000086 PARAMETER Experiment Name: At_100uM_ABA_Mutants_cDNA_P Parameter: Plant Line Value: CS22
  misc_feature: MA Experiment 20000086 PARAMETER Experiment Name: At_100uM_ABA_Mutants_cDNA_P Parameter: Timepoint (hr) Value: 6
  misc_feature: MA Experiment 20000086 PARAMETER Experiment Name: At_100uM_ABA_Mutants_cDNA_P Parameter: Tissue Value: Aerial
  misc_feature: MA Experiment 20000086 PARAMETER Experiment Name: At_100uM_ABA_Mutants_cDNA_P Parameter: Treatment Value: 100uM ABA vs. No Treatment
  misc_feature: MA Experiment ID: 20000087 Result: Up-regulated in Transcription
  misc_feature: MA Experiment 20000087 PARAMETER Experiment Name: At_100uM_ABA_Mutants_cDNA_P Parameter: Plant Line Value: WS
  misc_feature: MA Experiment 20000087 PARAMETER Experiment Name: At_100uM_ABA_Mutants_cDNA_P Parameter: Timepoint (hr) Value: 6
  misc_feature: MA Experiment 20000087 PARAMETER Experiment Name: At_100uM_ABA_Mutants_cDNA_P Parameter: Tissue Value: Aerial
  misc_feature: MA Experiment 20000087 PARAMETER Experiment Name: At_100uM_ABA_Mutants_cDNA_P Parameter: Treatment Value: 100uM ABA vs. No Treatment
  misc_feature: MA Experiment ID: 20000088 Result: Up-regulated in Transcription
  misc_feature: MA Experiment 20000088 PARAMETER Experiment Name: At_100uM_ABA_Mutants_cDNA_P Parameter: Plant Line Value: Landsberg
  misc_feature: MA Experiment 20000088 PARAMETER Experiment Name: At_100uM_ABA_Mutants_cDNA_P Parameter: Timepoint (hr) Value: 6
  misc_feature: MA Experiment 20000088 PARAMETER Experiment Name: At_100uM_ABA_Mutants_cDNA_P Parameter: Tissue Value: Aerial
  misc_feature: MA Experiment 20000088 PARAMETER Experiment Name: At_100uM_ABA_Mutants_cDNA_P Parameter: Treatment Value: 100uM ABA vs. No Treatment
  misc_feature: MA Experiment ID: 20000224 Result: Up-regulated in Transcription
  misc_feature: MA Experiment ID: 20000306 Result: Down-regulated in Transcription
  misc_feature: MA Experiment 20000306 PARAMETER Experiment Name: At_Germinating_Seeds_Sub_P Parameter: Age (hr) Value: 6 vs. 0
  misc_feature: MA Experiment 20000306 PARAMETER Experiment Name: At_Germinating_Seeds_Sub_P Parameter: Organism Value: A. thaliana
  misc_feature: MA Experiment 20000306 PARAMETER Experiment Name: At_Germinating_Seeds_Sub_P Parameter: Plant Line Value: WS
  misc_feature: MA Experiment 20000306 PARAMETER Experiment Name: At_Germinating_Seeds_Sub_P Parameter: Tissue Value: Germinating Seeds
  misc_feature: MA Experiment ID: 20000307 Result: Down-regulated in Transcription
  misc_feature: MA Experiment 20000307 PARAMETER Experiment Name: At_Germinating_Seeds_Sub_P Parameter: Age (hr) Value: 24 vs. 0
  misc_feature: MA Experiment 20000307 PARAMETER Experiment Name: At_Germinating_Seeds_Sub_P Parameter: Organism Value: A. thaliana
  misc_feature: MA Experiment 20000307 PARAMETER Experiment Name: At_Germinating_Seeds_Sub_P Parameter: Plant Line Value: WS
  misc_feature: MA Experiment 20000307 PARAMETER Experiment Name: At_Germinating_Seeds_Sub_P Parameter: Tissue Value: Germinating Seeds
  misc_feature: MA Experiment ID: 20000315 Result: Down-regulated in Transcription
  misc_feature: MA Experiment 20000315 PARAMETER Experiment Name: At_14day_Shoots-Roots_Sub_P Parameter: Age (day) Value: 14
  misc_feature: MA Experiment 20000315 PARAMETER Experiment Name: At_14day_Shoots-Roots_Sub_P Parameter: Organism Value: A. thaliana
  misc_feature: MA Experiment 20000315 PARAMETER Experiment Name: At_14day_Shoots-Roots_Sub_P Parameter: Plant Line Value: WS
  misc_feature: MA Experiment 20000315 PARAMETER Experiment Name: At_14day_Shoots-Roots_Sub_P Parameter: Tissue Value: Shoots vs. Whole Plant
  misc_feature: MA Experiment ID: 20000355 Result: Down-regulated in Transcription
  misc_feature: MA Experiment 20000355 PARAMETER Experiment Name: At_Siliques_Sub_P Parameter: Age (day) Value: 21
  misc_feature: MA Experiment 20000355 PARAMETER Experiment Name: At_Siliques_Sub_P Parameter: Organism Value: A. thaliana
  misc_feature: MA Experiment 20000355 PARAMETER Experiment Name: At_Siliques_Sub_P Parameter: Plant Line Value: WS
  misc_feature: MA Experiment 20000355 PARAMETER Experiment Name: At_Siliques_Sub_P Parameter: Tissue Value: Less Than 5mm Siliques vs. Whole Plant
  misc_feature: MA Experiment ID: 20000440 Result: Down-regulated in Transcription
  misc_feature: MA Experiment 20000440 PARAMETER Experiment Name: At_Closed-Flower__Sub_P Parameter: Tissue Value: Closed Flower vs. Whole Plant
aagattggatatgatctaaaaaatcagaggcaaatcaatcaagattaagaagacgacaatggaagagccatttcttccgagagacgagcagttagtctcttgtaaatccacatggcaaagtggtcaggtcaccgtcgagctgaagaaagtgagccgcttggccgctcctatggccaccgtaaccatagctcagtacttattgcctgtcatctcagtcatggtcgccggccacatcggcgagttggagctcgccggtgtcgcgcttgccacgtctttcacaaacgtttccggcttcagcataatgtttgggttagttggtgcattggaaactctttgtggccaagcctatggagcagaacaatacgaaaaaatcggaacctatacatactctgcaatggcttccaacataccaatttgtttcatcatatcaattctatggatttacatcgaaaagctcttgatcactctcgggcaagagcctgacatctctagagtcgctggctcctactcattgtggctcgtaccggctttgtttgcccatgctattttcttaccactgactcggtttctgctagcacaagggttggttatttccctgctatactctgccatgaccacccttttgttccatattgcggtttgctggactttggttttcgcgcttggtcttggaagcaatggagctgctattgctattagtttgtctttctggttttacgctgtgatactctcatgtcatgtgagatttttcagctcttgcgagaagactcgcggatttgtatcaaatgattttatgtctagtatcaagcagtacttccagtacggagtcccatccgctggattgatttgcttagaatggtggctgtttgagctactcatactctgctcaggtcttctcccaaacccaaaactcgagacatctgttctttcgatttgtcttacaataggaactttacactatgtgattccatctggagtcgcggcggctgtgagcacacgagtgtcaaacaaattgggagctggaaatcctcaagttgctagggtttccgtattggcagggctttgtctctggcttgtagagtcagctttctttagcacacttctcttcacctgccgaaacatcataggctacacattcagcaacagcaaagaagttgttgactatgttgctgacatatctcctttgctctgtctctccttcatcctcgacggattaacggcagttctaaatggagtggctaggggatgtgggtggcaacacattggagctttgatcaacgtggtggcttattatcttgtaggagctcctgttggagtttacttagctttcagtcgtgagtggaatggaaaaggactctggtgcggtgttatggttggatccgcggtgcaagccactttactggctatcgtcacagcctccatgaactggaaggaacaggctgagaaagcaaggaagagaataatctctactgaaaatggattggtttaaataaaggttgttcctaagagctatctcaaagtatttgcaagtcatgtgcaaaaaaacatgtaatgttattttgatgggttataatatttttttgtaaaacttttatccaggatttatacattttttcttgagttg

SEQ ID NO: 105158 - protein, 476 aa, Arabidopsis thaliana; identical to SEQ ID NO: 22024
  peptide (1)..(476): Ceres Seq. ID no. 13616590
  misc_feature (1)..(476): Homolog of NCBI NO: 30678096 NR Description: MATE efflux protein - related [Arabidopsis >gi|26451343|dbj|BAC42772.1| unknown protein [Arabidopsis >gi|28973213|gb|AAO63931.1| unknown protein [Arabidopsis
  misc_feature (1)..(460): Homolog of NCBI NO: 25411053 NR Description: hypothetical protein At2g04080 [imported] - thaliana >gi|4734007|gb|AAD28684.1| hypothetical protein
  misc_feature (1)..(475): Homolog of NCBI NO: 15228073 NR Description: MATE efflux protein family [Arabidopsis thaliana]
  misc_feature (1)..(475): Homolog of NCBI NO: 15228071 NR Description: MATE efflux protein family [Arabidopsis thaliana]
  misc_feature (1)..(460): Homolog of NCBI NO: 15228081 NR Description: MATE efflux protein family [Arabidopsis thaliana]
  misc_feature (1)..(475): Homolog of NCBI NO: 22325453 NR Description: MATE efflux protein family [Arabidopsis thaliana] unknown protein [Arabidopsis thaliana]
  misc_feature (1)..(468): Homolog of NCBI NO: 15228085 NR Description: MATE efflux protein family [Arabidopsis thaliana]
  misc_feature (1)..(460): Homolog of NCBI NO: 25411056 NR Description: hypothetical protein At2g04100 [imported] - thaliana >gi|4734005|gb|AAD28682.1| hypothetical protein
  misc_feature (27)..(472): Homolog of NCBI NO: 15223961 NR Description: MATE efflux protein family [Arabidopsis thaliana]
  misc_feature (18)..(468): Homolog of NCBI NO: 15218070 NR Description: MATE efflux protein family [Arabidopsis thaliana] unknown protein [Arabidopsis thaliana]

SEQ ID NO: 105159 - protein, 439 aa, Arabidopsis thaliana; identical to SEQ ID NO: 22025
  peptide (1)..(439): Ceres Seq. ID no. 13616591
  misc_feature (1)..(439): Homolog of NCBI NO: 30678096 NR Description: MATE efflux protein - related [Arabidopsis >gi|26451343|dbj|BAC42772.1| unknown protein [Arabidopsis >gi|28973213|gb|AAO63931.1| unknown protein [Arabidopsis
  misc_feature (1)..(423): Homolog of NCBI NO: 25411053 NR Description: hypothetical protein At2g04080 [imported] - thaliana >gi|4734007|gb|AAD28684.1| hypothetical protein
  misc_feature (1)..(438): Homolog of NCBI NO: 15228073 NR Description: MATE efflux protein family [Arabidopsis thaliana]
  misc_feature (1)..(438): Homolog of NCBI NO: 15228071 NR Description: MATE efflux protein family [Arabidopsis thaliana]
  misc_feature (1)..(423): Homolog of NCBI NO: 15228081 NR Description: MATE efflux protein family [Arabidopsis thaliana]
  misc_feature (1)..(438): Homolog of NCBI NO: 22325453 NR Description: MATE efflux protein family [Arabidopsis thaliana] unknown protein [Arabidopsis thaliana]
  misc_feature (1)..(431): Homolog of NCBI NO: 15228085 NR Description: MATE efflux protein family [Arabidopsis thaliana]
  misc_feature (1)..(423): Homolog of NCBI NO: 25411056 NR Description: hypothetical protein At2g04100 [imported] - thaliana >gi|4734005|gb|AAD28682.1| hypothetical protein
  misc_feature (1)..(435): Homolog of NCBI NO: 15223961 NR Description: MATE efflux protein family [Arabidopsis thaliana]
  misc_feature (1)..(431): Homolog of NCBI NO: 15218070 NR Description: MATE efflux protein family [Arabidopsis thaliana] unknown protein [Arabidopsis thaliana]

SEQ ID NO: 105160 - protein, 423 aa, Arabidopsis thaliana; identical to SEQ ID NO: 22026
  peptide (1)..(423): Ceres Seq. ID no. 13616592
  misc_feature (1)..(423): Homolog of NCBI NO: 30678096 NR Description: MATE efflux protein - related [Arabidopsis >gi|26451343|dbj|BAC42772.1| unknown protein [Arabidopsis >gi|28973213|gb|AAO63931.1| unknown protein [Arabidopsis
  misc_feature (1)..(407): Homolog of NCBI NO: 25411053 NR Description: hypothetical protein At2g04080 [imported] - thaliana >gi|4734007|gb|AAD28684.1| hypothetical protein
  misc_feature (1)..(422): Homolog of NCBI NO: 15228073 NR Description: MATE efflux protein family [Arabidopsis thaliana]
  misc_feature (1)..(422): Homolog of NCBI NO: 15228071 NR Description: MATE efflux protein family [Arabidopsis thaliana]
  misc_feature (1)..(407): Homolog of NCBI NO: 15228081 NR Description: MATE efflux protein family [Arabidopsis thaliana]
  misc_feature (1)..(422): Homolog of NCBI NO: 22325453 NR Description: MATE efflux protein family [Arabidopsis thaliana] unknown protein [Arabidopsis thaliana]
  misc_feature (1)..(415): Homolog of NCBI NO: 15228085 NR Description: MATE efflux protein family [Arabidopsis thaliana]
  misc_feature (1)..(407): Homolog of NCBI NO: 25411056 NR Description: hypothetical protein At2g04100 [imported] - thaliana >gi|4734005|gb|AAD28682.1| hypothetical protein
  misc_feature (1)..(419): Homolog of NCBI NO: 15223961 NR Description: MATE efflux protein family [Arabidopsis thaliana]
  misc_feature (1)..(415): Homolog of NCBI NO: 15218070 NR Description: MATE efflux protein family [Arabidopsis thaliana] unknown protein [Arabidopsis thaliana]

SEQ ID NO: 105161 - DNA, 795 bp, Arabidopsis thaliana
  misc_feature (1)..(795): Ceres Seq. ID no. 13616605
  misc_feature: MA Experiment ID: 20000182 Result: Up-regulated in Transcription
  misc_feature: MA Experiment 20000182 PARAMETER Experiment Name: At_2mM_SA_P Parameter: Age (day) Value: 14
  misc_feature: MA Experiment 20000182 PARAMETER Experiment Name: At_2mM_SA_P Parameter: Organism Value: A. thaliana
  misc_feature: MA Experiment 20000182 PARAMETER Experiment Name: At_2mM_SA_P Parameter: Plant Line Value: WS
  misc_feature: MA Experiment 20000182 PARAMETER Experiment Name: At_2mM_SA_P Parameter: Timepoint (hr) Value: 6
  misc_feature: MA Experiment 20000182 PARAMETER Experiment Name: At_2mM_SA_P Parameter: Tissue Value: Aerial
  misc_feature: MA Experiment 20000182 PARAMETER Experiment Name: At_2mM_SA_P Parameter: Treatment Value: 2mM SA vs. No Treatment
  misc_feature: MA Experiment ID: 20000213 Result: Down-regulated in Transcription
  misc_feature: MA Experiment 20000213 PARAMETER Experiment Name: At_4deg_Cold_P Parameter: Timepoint (hr) Value: 2
  misc_feature: MA Experiment ID: 20000227 Result: Down-regulated in Transcription
  misc_feature: MA Experiment 20000227 PARAMETER Experiment Name: At_Root-Tips-vs-Tops_P Parameter: Tissue Value: Root Tips vs. Root Tops
  misc_feature: MA Experiment ID: 20000234 Result: Down-regulated in Transcription
  misc_feature: MA Experiment 20000234 PARAMETER Experiment Name: At_Siliques_P Parameter: Age (day) Value: 21
  misc_feature: MA Experiment 20000234 PARAMETER Experiment Name: At_Siliques_P Parameter: Organism Value: A. thaliana
  misc_feature: MA Experiment 20000234 PARAMETER Experiment Name: At_Siliques_P Parameter: Plant Line Value: WS
  misc_feature: MA Experiment 20000234 PARAMETER Experiment Name: At_Siliques_P Parameter: Tissue Value: Less Than 5mm Siliques vs. Whole Plant
  misc_feature: MA Experiment ID: 20000235 Result: Down-regulated in Transcription
  misc_feature: MA Experiment 20000235 PARAMETER Experiment Name: At_Siliques_P Parameter: Age (day) Value: 21
  misc_feature: MA Experiment 20000235 PARAMETER Experiment Name: At_Siliques_P Parameter: Organism Value: A. thaliana
  misc_feature: MA Experiment 20000235 PARAMETER Experiment Name: At_Siliques_P Parameter: Plant Line Value: WS
  misc_feature: MA Experiment 20000235 PARAMETER Experiment Name: At_Siliques_P Parameter: Tissue Value: 5-10mm Siliques vs. Whole Plant
  misc_feature: MA Experiment ID: 20000264 Result: Down-regulated in Transcription
  misc_feature: MA Experiment 20000264 PARAMETER Experiment Name: At_Open_Flower_P Parameter: Age (day) Value: 21
  misc_feature: MA Experiment 20000264 PARAMETER Experiment Name: At_Open_Flower_P Parameter: Plant Line Value: WS
  misc_feature: MA Experiment 20000264 PARAMETER Experiment Name: At_Open_Flower_P Parameter: Tissue Value: Open Flower vs. Whole Plant
  misc_feature: MA Experiment ID: 20000265 Result: Down-regulated in Transcription
  misc_feature: MA Experiment 20000265 PARAMETER Experiment Name: At_Open_Flower_P Parameter: Age (day) Value: 21
  misc_feature: MA Experiment 20000265 PARAMETER Experiment Name: At_Open_Flower_P Parameter: Plant Line Value: WS
  misc_feature: MA Experiment 20000265 PARAMETER Experiment Name: At_Open_Flower_P Parameter: Tissue Value: Closed Flower vs. Whole Plant
  misc_feature: MA Experiment ID: 20000438 Result: Down-regulated in Transcription
  misc_feature: MA Experiment 20000438 PARAMETER Experiment Name: At_Shoots__P Parameter: Age (day) Value: 14
  misc_feature: MA Experiment 20000438 PARAMETER Experiment Name: At_Shoots__P Parameter: Tissue Value: Shoots vs. Whole Plant
  misc_feature: MA Experiment ID: 20000439 Result: Down-regulated in Transcription
  misc_feature: MA Experiment 20000439 PARAMETER Experiment Name: At_Roots__P Parameter: Age (day) Value: 14 vs. 21
  misc_feature: MA Experiment 20000439 PARAMETER Experiment Name: At_Roots__P Parameter: Organism Value: A. thaliana
  misc_feature: MA Experiment 20000439 PARAMETER Experiment Name: At_Roots__P Parameter: Tissue Value: Roots vs. Whole Plant
  misc_feature: MA Experiment ID: 20000441 Result: Up-regulated in Transcription
  misc_feature: MA Experiment 20000441 PARAMETER Experiment Name: At_1uM_BR-BRZ__P Parameter: Tissue Value: Shoot Apices
  misc_feature: MA Experiment 20000441 PARAMETER Experiment Name: At_1uM_BR-BRZ__P Parameter: Treatment Value: 1uM BR vs. No Treatment
  misc_feature: MA Experiment ID: 20000460 Result: Up-regulated in Transcription
  misc_feature: MA Experiment 20000460 PARAMETER Experiment Name: At_10percent_PEG_P Parameter: Age (day) Value: 12
  misc_feature: MA Experiment 20000460 PARAMETER Experiment Name: At_10percent_PEG_P Parameter: Organism Value: A. thaliana
  misc_feature: MA Experiment 20000460 PARAMETER Experiment Name: At_10percent_PEG_P Parameter: Plant Line Value: WS
  misc_feature: MA Experiment 20000460 PARAMETER Experiment Name: At_10percent_PEG_P Parameter: Timepoint (day) Value: 12
  misc_feature: MA Experiment 20000460 PARAMETER Experiment Name: At_10percent_PEG_P Parameter: Tissue Value: Whole Plant
  misc_feature: MA Experiment 20000460 PARAMETER Experiment Name: At_10percent_PEG_P Parameter: Treatment Value: 10percent PEG vs. No Treatment
  misc_feature: MA Experiment ID: 20000495 Result: Up-regulated in Transcription
  misc_feature: MA Experiment 20000495 PARAMETER Experiment Name: At_Guard_Cells_P Parameter: Harvest Date Value: 8/2/2002
  misc_feature: MA Experiment 20000495 PARAMETER Experiment Name: At_Guard_Cells_P Parameter: Organism Value: A. thaliana
  misc_feature: MA Experiment 20000495 PARAMETER Experiment Name: At_Guard_Cells_P Parameter: Tissue Value: Guard Cells vs. Leaves
  misc_feature: MA Experiment ID: 20000527 Result: Up-regulated in Transcription
  misc_feature: MA Experiment 20000527 PARAMETER Experiment Name: At_10percent_PEG_P Parameter: Age (day) Value: 20
  misc_feature: MA Experiment 20000527 PARAMETER Experiment Name: At_10percent_PEG_P Parameter: Organism Value: A. thaliana
  misc_feature: MA Experiment 20000527 PARAMETER Experiment Name: At_10percent_PEG_P Parameter: Plant Line Value: WS
  misc_feature: MA Experiment 20000527 PARAMETER Experiment Name: At_10percent_PEG_P Parameter: Timepoint (day) Value: 20
  misc_feature: MA Experiment 20000527 PARAMETER Experiment Name: At_10percent_PEG_P Parameter: Tissue Value: Whole Plant
  misc_feature: MA Experiment 20000527 PARAMETER Experiment Name: At_10percent_PEG_P Parameter: Treatment Value: 10percent PEG vs. No Treatment
  misc_feature: MA Experiment ID: 20001247 Result: Up-regulated in Transcription
  misc_feature: MA Experiment 20001247 PARAMETER Experiment Name: At_Far-red-induction_P Parameter: Age (day) Value: 7
  misc_feature: MA Experiment 20001247 PARAMETER Experiment Name: At_Far-red-induction_P Parameter: Light Value: Far-red vs. White
  misc_feature: MA Experiment 20001247 PARAMETER Experiment Name: At_Far-red-induction_P Parameter: Organism Value: A. thaliana
  misc_feature: MA Experiment 20001247 PARAMETER Experiment Name: At_Far-red-induction_P Parameter: Plant Line Value: Columbia
  misc_feature: MA Experiment 20001247 PARAMETER Experiment Name: At_Far-red-induction_P Parameter: Timepoint (hr) Value: 1
  misc_feature: MA Experiment 20001247 PARAMETER Experiment Name: At_Far-red-induction_P Parameter: Tissue Value: Whole Plant
  misc_feature: MA Experiment ID: 20001248 Result: Up-regulated in Transcription
  misc_feature: MA Experiment 20001248 PARAMETER Experiment Name: At_Far-red-induction_P Parameter: Age (day) Value: 7
  misc_feature: MA Experiment 20001248 PARAMETER Experiment Name: At_Far-red-induction_P Parameter: Light Value: Far-red vs. White
  misc_feature: MA Experiment 20001248 PARAMETER Experiment Name: At_Far-red-induction_P Parameter: Organism Value: A. thaliana
  misc_feature: MA Experiment 20001248 PARAMETER Experiment Name: At_Far-red-induction_P Parameter: Plant Line Value: Columbia
  misc_feature: MA Experiment 20001248 PARAMETER Experiment Name: At_Far-red-induction_P Parameter: Timepoint (hr) Value: 4
  misc_feature: MA Experiment 20001248 PARAMETER Experiment Name: At_Far-red-induction_P Parameter: Tissue Value: Whole Plant
  misc_feature: MA Experiment ID: 20001450 Result: Up-regulated in Transcription
  misc_feature: MA Experiment 20001450 PARAMETER Experiment Name: At_Far-red-induction_P Parameter: Age (day) Value: 7
  misc_feature: MA Experiment 20001450 PARAMETER Experiment Name: At_Far-red-induction_P Parameter: Light Value: Far-red vs. White
  misc_feature: MA Experiment 20001450 PARAMETER Experiment Name: At_Far-red-induction_P Parameter: Organism Value: A. thaliana
  misc_feature: MA Experiment 20001450 PARAMETER Experiment Name: At_Far-red-induction_P Parameter: Plant Line Value: Columbia
  misc_feature: MA Experiment 20001450 PARAMETER Experiment Name: At_Far-red-induction_P Parameter: Timepoint (hr) Value: 8
  misc_feature: MA Experiment 20001450 PARAMETER Experiment Name: At_Far-red-induction_P Parameter: Tissue Value: Whole Plant
  misc_feature: MA Experiment ID: 20001451 Result: Up-regulated in Transcription
  misc_feature: MA Experiment 20001451 PARAMETER Experiment Name: At_Far-red-induction_P Parameter: Age (day) Value: 7
  misc_feature: MA Experiment 20001451 PARAMETER Experiment Name: At_Far-red-induction_P Parameter: Light Value: Far-red vs. White
  misc_feature: MA Experiment 20001451 PARAMETER Experiment Name: At_Far-red-induction_P Parameter: Organism Value: A. thaliana
  misc_feature: MA Experiment 20001451 PARAMETER Experiment Name: At_Far-red-induction_P Parameter: Plant Line Value: Columbia
  misc_feature: MA Experiment 20001451 PARAMETER Experiment Name: At_Far-red-induction_P Parameter: Timepoint (hr) Value: 24
  misc_feature: MA Experiment 20001451 PARAMETER Experiment Name: At_Far-red-induction_P Parameter: Tissue Value: Whole Plant
  misc_feature: MA Experiment ID: 20001757 Result: Up-regulated in Transcription
  misc_feature: MA Experiment 20001757 PARAMETER Experiment Name: At_50mM_NH4NO3_L-to-H_P Parameter: Timepoint (hr) Value: 6
  misc_feature: MA Experiment 20001757 PARAMETER Experiment Name: At_50mM_NH4NO3_L-to-H_P Parameter: Tissue Value: Leaf
  misc_feature: MA Experiment 20001757 PARAMETER Experiment Name: At_50mM_NH4NO3_L-to-H_P Parameter: Treatment Value: 50mM NH4NO3 vs 100mM Mannitol
acactcctaatccctcccatttttcaaaccactctctctttctctttctctaagtctttaacaatggcgcgccttctcttccgtcttctccaagaagccaattctacatctccggctgaagcttctccgcctttcaactccgacctcgtcctcatccttgcggttcttctttgtgcactgacatgtatcatcggcttaatagccgtctctcgatgcgcttggctccgccgtatcgcctcaagaaacagatcggatcaaactcatccaccgccggtagctgcagccaacaaaggattgaaaaagaaagtcctccggtcgttaccgaaactcacctactcgccggattctccgccggcggagaaactcgtggagtgtgctatctgtttaacggaattcgccgccggagacgagcttagggtgttgccgcagtgtggacatggtttccacgtatcgtgtatcgacacgtggcttggatcacactcttcttgtccttcttgccgtcaaatcttggtggttaccaggtgtcataaatgtggcgggttacccggtagctcaagttcaggacccgaacccgatacccgaatcaaacaacgtgaagatggtcctgataacttgccttgattcttttctttagacatatcccattttattttttataaagggaattcgattaaacaaagatataatattaattaaaaagtgttctttatcattttaaaggataatgttactctgtcatgtatatatttaattatctattgtaaatctatcatggaatggaaactttatgtcatt

SEQ ID NO: 105162 - protein, 206 aa, Arabidopsis thaliana
  peptide (1)..(206): Ceres Seq. ID no. 13616606
  misc_feature (125)..(166): Pfam Name: Zinc finger, C3HC4 type (RING finger) Pfam Description: Zinc finger, C3HC4 type (RING finger)
  misc_feature (22)..(206): Homolog of NCBI NO: 15223041 NR Description: RING zinc finger protein -related [Arabidopsis
  misc_feature (22)..(206): Homolog of NCBI NO: 21555237 NR Description: putative RING zinc finger protein [Arabidopsis
  misc_feature (22)..(206): Homolog of NCBI NO: 15218042 NR Description: RING zinc finger protein -related [Arabidopsis
  misc_feature (28)..(179): Homolog of NCBI NO: 15227839 NR Description: RING zinc finger protein -related [Arabidopsis
  misc_feature (28)..(179): Homolog of NCBI NO: 15237013 NR Description: RING-H2 finger protein RHA3b [Arabidopsis
  misc_feature (28)..(187): Homolog of NCBI NO: 7489432 NR Description: probable ring finger protein - barley
  misc_feature (21)..(205): Homolog of NCBI NO: 9293902 NR Description: contains similarity to RING zinc finger
  misc_feature (95)..(178): Homolog of NCBI NO: 37536508 NR Description: putative ring finger protein [Oryza sativa
  misc_feature (41)..(77): Homolog of NCBI NO: 37536508 NR Description: putative ring finger protein [Oryza sativa
  misc_feature (28)..(182): Homolog of NCBI NO: 32487554 NR Description: OSJNBa0013K16.6 [Oryza sativa (japonica
TLLIPPIFQTTLSFSFSKSLTMARLLFRLLQEANSTSPAEASPPFNSDLVLILAVLLCALTCIIGLIAVSRCAWLRRIASRNRSDQTHPPPVAAANKGLKKKVLRSLPKLTYSPDSPPAEKLVECAICLTEFAAGDELRVLPQCGHGFHVSCIDTWLGSHSSCPSCRQILVVTRCHKCGGLPGSSSSGPEPDTRIKQREDGPDNLP

SEQ ID NO: 105163 - protein, 185 aa, Arabidopsis thaliana; identical to SEQ ID NO: 20825
  peptide (1)..(185): Ceres Seq. ID no. 13616607
  misc_feature (104)..(145): Pfam Name: Zinc finger, C3HC4 type (RING finger) Pfam Description: Zinc finger, C3HC4 type (RING finger)
  misc_feature (1)..(185): Homolog of NCBI NO: 15223041 NR Description: RING zinc finger protein -related [Arabidopsis
  misc_feature (1)..(185): Homolog of NCBI NO: 21555237 NR Description: putative RING zinc finger protein [Arabidopsis
  misc_feature (1)..(185): Homolog of NCBI NO: 15218042 NR Description: RING zinc finger protein -related [Arabidopsis
  misc_feature (7)..(158): Homolog of NCBI NO: 15227839 NR Description: RING zinc finger protein -related [Arabidopsis
  misc_feature (7)..(158): Homolog of NCBI NO: 15237013 NR Description: RING-H2 finger protein RHA3b [Arabidopsis
  misc_feature (7)..(166): Homolog of NCBI NO: 7489432 NR Description: probable ring finger protein - barley
  misc_feature (1)..(184): Homolog of NCBI NO: 9293902 NR Description: contains similarity to RING zinc finger
  misc_feature (74)..(157): Homolog of NCBI NO: 37536508 NR Description: putative ring finger protein [Oryza sativa
  misc_feature (20)..(56): Homolog of NCBI NO: 37536508 NR Description: putative ring finger protein [Oryza sativa
  misc_feature (7)..(161): Homolog of NCBI NO: 32487554 NR Description: OSJNBa0013K16.6 [Oryza sativa (japonica

SEQ ID NO: 105164 - DNA, 1017 bp, Arabidopsis thaliana
  misc_feature (1)..(1017): Ceres Seq. ID no. 13616612
  misc_feature: MA Experiment ID: 108473 Result: Down-regulated in Transcription
  misc_feature: MA Experiment 108473 PARAMETER Experiment Name: At_Drought_Flowers_cDNA_P Parameter: Timepoint (hr) Value: 7 d
  misc_feature: MA Experiment 108473 PARAMETER Experiment Name: At_Drought_Flowers_cDNA_P Parameter: Tissue Value: Flower
  misc_feature: MA Experiment 108473 PARAMETER Experiment Name: At_Drought_Flowers_cDNA_P Parameter: Treatment Value: Drought vs. No Drought
  misc_feature: MA Experiment ID: 108501 Result: Down-regulated in Transcription
  misc_feature: MA Experiment 108501 PARAMETER Experiment Name: At_ap2_floral_buds_cDNA_P Parameter: Plant Line Value: ap2 (Ler.)
  misc_feature: MA Experiment 108501 PARAMETER Experiment Name: At_ap2_floral_buds_cDNA_P Parameter: Tissue Value: Closed Flower
  misc_feature: MA Experiment ID: 108573 Result: Up-regulated in Transcription
  misc_feature: MA Experiment 108573 PARAMETER Experiment Name: At_Drought_cDNA_P Parameter: Timepoint (hr) Value: 6
  misc_feature: MA Experiment 108573 PARAMETER Experiment Name: At_Drought_cDNA_P Parameter: Tissue Value: Aerial
  misc_feature: MA Experiment 108573 PARAMETER Experiment Name: At_Drought_cDNA_P Parameter: Treatment Value: Drought vs. No Drought
  misc_feature: MA Experiment ID: 108576 Result: Up-regulated in Transcription
  misc_feature: MA Experiment 108576 PARAMETER Experiment Name: At_42deg_Heat_cDNA_P Parameter: Temperature (deg C) Value: 42 vs. 22
  misc_feature: MA Experiment 108576 PARAMETER Experiment Name: At_42deg_Heat_cDNA_P Parameter: Timepoint (hr) Value: 1
  misc_feature: MA Experiment 108576 PARAMETER Experiment Name: At_42deg_Heat_cDNA_P Parameter: Tissue Value: Aerial
aaagagcatcctattaagttgctaaagagagagacgccaatggctgtaaagcaaaaggtctgtgttactggtgcaggagggtttattgcttcatggctcgtcaagtttcttctctctcgtggctacactgtccatggaaccgttcgagatccttgtgatgaaaagaatgaccatttgaggaaactggataatgcttcaaaaaatctgaaacttttcaaggcagatttgtttgatgatgaaggtcttttctcagccattgatggttgctctggcgttttccatatcgcttctcctgtgccttttgaaggagttcctctcacagaggaagaactgattaaaccagctctcactggcaccaagaatgttctagaagcatgcacagaaaccaaagtgcagaaagttgtggttgtatcatcaatcgctgcagttgtttacaatccaaaatggcctcaagatgttgctaaggacgaggattgttggtcagacactcaataccttcactcacttgagggttattggcgttattactatcttgccaaaacattaacggaacgtgaagctttagagtggagtaagagaaactttgctgatgttgttacgctctgtccgtctgtcattataggccctaggcttcaatccacgcttaactctagtagtttgggacttctcaagttcataaaaggtggtataaagtccttgttgagcgatgaactgtatcttgtggatgtgcgtgatgttgcggatgcgcttttgttggtgtatgaaaatcgagaagcaacaggaagatacatatgtaattctcattcactttacactgattctcttatggagaagctcaagaatatgtatcctaaacgcaacttccctgaaagtttcacggaggtaaaagagaaggaagtgaggcctctaagtgcagagaagttgaaaaacttggggtggaagtttaggccattagaagaaaccattgatgattctgttgtgagctttgaagcagctggtgatcttccaaaggcataa

SEQ ID NO: 105165 - protein, 338 aa, Arabidopsis thaliana
  peptide (1)..(338): Ceres Seq. ID no. 13616613
  misc_feature (16)..(289): Pfam Name: 3-beta hydroxysteroid dehydrogenase/isomerase family Pfam Description: 3-beta hydroxysteroid dehydrogenase/isomerase
  misc_feature (14)..(338): Homolog of NCBI NO: 6554472 NR Description: putative cinnamoyl-CoA reductase; 14056-15506
  misc_feature (14)..(338): Homolog of NCBI NO: 15223068 NR Description: cinnamoyl-CoA reductase family [Arabidopsis
  misc_feature (17)..(332): Homolog of NCBI NO: 15226134 NR Description: cinnamoyl-CoA reductase family [Arabidopsis
  misc_feature (14)..(332): Homolog of NCBI NO: 15226135 NR Description: cinnamoyl-CoA reductase family [Arabidopsis
  misc_feature (18)..(337): Homolog of NCBI NO: 17978649 NR Description: cinnamoyl-CoA reductase [Pinus taeda]
  misc_feature (18)..(336): Homolog of NCBI NO: 25989515 NR Description: cinnamoyl CoA reductase [Eucalyptus globulus]
  misc_feature (18)..(336): Homolog of NCBI NO: 9998901 NR Description: cinnamoyl-CoA reductase [Populus balsamifera
  misc_feature (18)..(336): Homolog of NCBI NO: 40233135 NR Description: cinnamoyl CoA reductase [Populus tomentosa]
  misc_feature (18)..(336): Homolog of NCBI NO: 7431407 NR Description: cinnamoyl-CoA reductase (EC 1.2.1.44) CCR - cider
  misc_feature (18)..(336): Homolog of NCBI NO: 10304406 NR Description: cinnamoyl-CoA reductase [Eucalyptus saligna]
KEHPIKLLKRETPMAVKQKVCVTGAGGFIASWLVKFLLSRGYTVHGTVRDPCDEKNDHLRKLDNASKNLKLFKADLFDDEGLFSAIDGCSGVFHIASPVPFEGVPLTEEELIKPALTGTKNVLEACTETKVQKVVVVSSIAAVVYNPKWPQDVAKDEDCWSDTQYLHSLEGYWRYYYLAKTLTEREALEWSKRNFADVVTLCPSVIIGPRLQSTLNSSSLGLLKFIKGGIKSLLSDELYLVDVRDVADALLLVYENREATGRYICNSHSLYTDSLMEKLKNMYPKRNFPESFTEVKEKEVRPLSAEKLKNLGWKFRPLEETIDDSVVSFEAAGDLPKA

SEQ ID NO: 105166 - protein, 325 aa, Arabidopsis thaliana
  peptide (1)..(325): Ceres Seq. ID no. 13616614
  misc_feature (3)..(276): Pfam Name: 3-beta hydroxysteroid dehydrogenase/isomerase family Pfam Description: 3-beta hydroxysteroid dehydrogenase/isomerase
  misc_feature (1)..(325): Homolog of NCBI NO: 6554472 NR Description: putative cinnamoyl-CoA reductase; 14056-15506
  misc_feature (1)..(325): Homolog of NCBI NO: 15223068 NR Description: cinnamoyl-CoA reductase family [Arabidopsis
  misc_feature (4)..(319): Homolog of NCBI NO: 15226134 NR Description: cinnamoyl-CoA reductase family [Arabidopsis
  misc_feature (1)..(319): Homolog of NCBI NO: 15226135 NR Description: cinnamoyl-CoA reductase family [Arabidopsis
  misc_feature (5)..(324): Homolog of NCBI NO: 17978649 NR Description: cinnamoyl-CoA reductase [Pinus taeda]
  misc_feature (5)..(323): Homolog of NCBI NO: 25989515 NR Description: cinnamoyl CoA reductase [Eucalyptus globulus]
  misc_feature (5)..(323): Homolog of NCBI NO: 9998901 NR Description: cinnamoyl-CoA reductase [Populus balsamifera
  misc_feature (5)..(323): Homolog of NCBI NO: 40233135 NR Description: cinnamoyl CoA reductase [Populus tomentosa]
  misc_feature (5)..(323): Homolog of NCBI NO: 7431407 NR Description: cinnamoyl-CoA reductase (EC 1.2.1.44) CCR - cider
  misc_feature (5)..(323): Homolog of NCBI NO: 10304406 NR Description: cinnamoyl-CoA reductase [Eucalyptus saligna]
MAVKQKVCVTGAGGFIASWLVKFLLSRGYTVHGTVRDPCDEKNDHLRKLDNASKNLKLFKADLFDDEGLFSAIDGCSGVFHIASPVPFEGVPLTEEELIKPALTGTKNVLEACTETKVQKVVVVSSIAAVVYNPKWPQDVAKDEDCWSDTQYLHSLEGYWRYYYLAKTLTEREALEWSKRNFADVVTLCPSVIIGPRLQSTLNSSSLGLLKFIKGGIKSLLSDELYLVDVRDVADALLLVYENREATGRYICNSHSLYTDSLMEKLKNMYPKRNFPESFTEVKEKEVRPLSAEKLKNLGWKFRPLEETIDDSVVSFEAAGDLPKA

SEQ ID NO: 105167 - DNA, 1227 bp, Arabidopsis thaliana
  misc_feature (1)..(1227): Ceres Seq. ID no. 13616619
  misc_feature: MA Experiment ID: 108434 Result: Down-regulated in Transcription
  misc_feature: MA Experiment 108434 PARAMETER Experiment Name: At_Root_Tips_cDNA_P Parameter: Tissue Value: Root Tips
  misc_feature: MA Experiment ID: 108461 Result: Down-regulated in Transcription
  misc_feature: MA Experiment 108461 PARAMETER Experiment Name: At_Germinating_Seeds_cDNA_P Parameter: Age (day) Value: 1 vs. 0
  misc_feature: MA Experiment 108461 PARAMETER Experiment Name: At_Germinating_Seeds_cDNA_P Parameter: Tissue Value: Germinating Seeds
  misc_feature: MA Experiment ID: 108462 Result: Down-regulated in Transcription
  misc_feature: MA Experiment 108462 PARAMETER Experiment Name: At_Germinating_Seeds_cDNA_P Parameter: Age (day) Value: 2 vs. 0
  misc_feature: MA Experiment 108462 PARAMETER Experiment Name: At_Germinating_Seeds_cDNA_P Parameter: Tissue Value: Germinating Seeds
  misc_feature: MA Experiment ID: 108464 Result: Down-regulated in Transcription
  misc_feature: MA Experiment 108464 PARAMETER Experiment Name: At_Germinating_Seeds_cDNA_P Parameter: Age (day) Value: 4 vs. 0
  misc_feature: MA Experiment 108464 PARAMETER Experiment Name: At_Germinating_Seeds_cDNA_P Parameter: Tissue Value: Germinating Seeds
  misc_feature: MA Experiment ID: 108473 Result: Up-regulated in Transcription
  misc_feature: MA Experiment 108473 PARAMETER Experiment Name: At_Drought_Flowers_cDNA_P Parameter: Timepoint (hr) Value: 7 d
  misc_feature: MA Experiment 108473 PARAMETER Experiment Name: At_Drought_Flowers_cDNA_P Parameter: Tissue Value: Flower
  misc_feature: MA Experiment 108473 PARAMETER Experiment Name: At_Drought_Flowers_cDNA_P Parameter: Treatment Value: Drought vs. No Drought
  misc_feature: MA Experiment ID: 108488 Result: Down-regulated in Transcription
  misc_feature: MA Experiment ID: 108561 Result: Up-regulated in Transcription
  misc_feature: MA Experiment 108561 PARAMETER Experiment Name: At_100uM_ABA_cDNA_P Parameter: Timepoint (hr) Value: 6
  misc_feature: MA Experiment 108561 PARAMETER Experiment Name: At_100uM_ABA_cDNA_P Parameter: Tissue Value: Aerial
  misc_feature: MA Experiment 108561 PARAMETER Experiment Name: At_100uM_ABA_cDNA_P Parameter: Treatment Value: 100uM ABA vs. No Treatment
  misc_feature: MA Experiment ID: 108572 Result: Up-regulated in Transcription
  misc_feature: MA Experiment 108572 PARAMETER Experiment Name: At_Drought_cDNA_P Parameter: Timepoint (hr) Value: 1
  misc_feature: MA Experiment 108572 PARAMETER Experiment Name: At_Drought_cDNA_P Parameter: Tissue Value: Aerial
  misc_feature: MA Experiment 108572 PARAMETER Experiment Name: At_Drought_cDNA_P Parameter: Treatment Value: Drought vs. No Drought
  misc_feature: MA Experiment ID: 108573 Result: Up-regulated in Transcription
  misc_feature: MA Experiment 108573 PARAMETER Experiment Name: At_Drought_cDNA_P Parameter: Timepoint (hr) Value: 6
  misc_feature: MA Experiment 108573 PARAMETER Experiment Name: At_Drought_cDNA_P Parameter: Tissue Value: Aerial
  misc_feature: MA Experiment 108573 PARAMETER Experiment Name: At_Drought_cDNA_P Parameter: Treatment Value: Drought vs. No Drought
  misc_feature: MA Experiment ID: 108577 Result: Up-regulated in Transcription
  misc_feature: MA Experiment 108577 PARAMETER Experiment Name: At_42deg_Heat_cDNA_P Parameter: Temperature (deg C) Value: 42 vs. 22
  misc_feature: MA Experiment 108577 PARAMETER Experiment Name: At_42deg_Heat_cDNA_P Parameter: Timepoint (hr) Value: 6
  misc_feature: MA Experiment 108577 PARAMETER Experiment Name: At_42deg_Heat_cDNA_P Parameter: Tissue Value: Aerial
  misc_feature: MA Experiment ID: 108579 Result: Up-regulated in Transcription
  misc_feature: MA Experiment 108579 PARAMETER Experiment Name: At_4deg_Cold_cDNA_P Parameter: Temperature (deg C) Value: 4 vs. 22
  misc_feature: MA Experiment 108579 PARAMETER Experiment Name: At_4deg_Cold_cDNA_P Parameter: Timepoint (hr) Value: 6
  misc_feature: MA Experiment 108579 PARAMETER Experiment Name: At_4deg_Cold_cDNA_P Parameter: Tissue Value: Aerial
  misc_feature: MA Experiment ID: 108585 Result: Up-regulated in Transcription
  misc_feature: MA Experiment 108585 PARAMETER Experiment Name: At_5mM_NaNP_cDNA_P Parameter: Timepoint (hr) Value: 6
  misc_feature: MA Experiment 108585 PARAMETER Experiment Name: At_5mM_NaNP_cDNA_P Parameter: Tissue Value: Aerial
  misc_feature: MA Experiment 108585 PARAMETER Experiment Name: At_5mM_NaNP_cDNA_P Parameter: Treatment Value: null
  misc_feature: MA Experiment ID: 108594 Result: Up-regulated in Transcription
  misc_feature: MA Experiment 108594 PARAMETER Experiment Name: At_Ler-rhl_Root_cDNA_P Parameter: Plant Line Value: null
  misc_feature: MA Experiment ID: 108595 Result: Up-regulated in Transcription
  misc_feature: MA Experiment 108595 PARAMETER Experiment Name: At_Ler-pi_Ovule_cDNA_P Parameter: Plant Line Value: null
  misc_feature: MA Experiment ID: 108667 Result: Up-regulated in Transcription
  misc_feature: MA Experiment 108667 PARAMETER Experiment Name: At_2mM_SA_cDNA_P Parameter: Plant Line Value: WS
  misc_feature: MA Experiment 108667 PARAMETER Experiment Name: At_2mM_SA_cDNA_P Parameter: Timepoint (hr) Value: 1
  misc_feature: MA Experiment 108667 PARAMETER Experiment Name: At_2mM_SA_cDNA_P Parameter: Treatment Value: 2mM SA vs. No Treatment
  misc_feature: MA Experiment ID: 20000069 Result: Up-regulated in Transcription
  misc_feature: MA Experiment 20000069 PARAMETER Experiment Name: At_100uM_ABA_Mutants_cDNA_P Parameter: Plant Line Value: CS23
  misc_feature: MA Experiment 20000069 PARAMETER Experiment Name: At_100uM_ABA_Mutants_cDNA_P Parameter: Timepoint (hr) Value: 6
  misc_feature: MA Experiment 20000069 PARAMETER Experiment Name: At_100uM_ABA_Mutants_cDNA_P Parameter: Tissue Value: Aerial
  misc_feature: MA Experiment 20000069 PARAMETER Experiment Name: At_100uM_ABA_Mutants_cDNA_P Parameter: Treatment Value: 100uM ABA vs. No Treatment
  misc_feature: MA Experiment ID: 20000070 Result: Up-regulated in Transcription
  misc_feature: MA Experiment 20000070 PARAMETER Experiment Name: At_100uM_ABA_Mutants_cDNA_P Parameter: Plant Line Value: CS24
  misc_feature: MA Experiment 20000070 PARAMETER Experiment Name: At_100uM_ABA_Mutants_cDNA_P Parameter: Timepoint (hr) Value: 6
  misc_feature: MA Experiment 20000070 PARAMETER Experiment Name: At_100uM_ABA_Mutants_cDNA_P Parameter: Tissue Value: Aerial
  misc_feature: MA Experiment 20000070 PARAMETER Experiment Name: At_100uM_ABA_Mutants_cDNA_P Parameter: Treatment Value: 100uM ABA vs. No Treatment
  misc_feature: MA Experiment ID: 20000071 Result: Up-regulated in Transcription
  misc_feature: MA Experiment 20000071 PARAMETER Experiment Name: At_100uM_ABA_Mutants_cDNA_P Parameter: Plant Line Value: CS8104
  misc_feature: MA Experiment 20000071 PARAMETER Experiment Name: At_100uM_ABA_Mutants_cDNA_P Parameter: Timepoint (hr) Value: 6
  misc_feature: MA Experiment 20000071 PARAMETER Experiment Name: At_100uM_ABA_Mutants_cDNA_P Parameter: Tissue Value: Aerial
  misc_feature: MA Experiment 20000071 PARAMETER Experiment Name: At_100uM_ABA_Mutants_cDNA_P Parameter: Treatment Value: 100uM ABA vs. No Treatment
  misc_feature: MA Experiment ID: 20000072 Result: Up-regulated in Transcription
  misc_feature: MA Experiment 20000072 PARAMETER Experiment Name: At_100uM_ABA_Mutants_cDNA_P Parameter: Plant Line Value: CS8105
  misc_feature: MA Experiment 20000072 PARAMETER Experiment Name: At_100uM_ABA_Mutants_cDNA_P Parameter: Timepoint (hr) Value: 6
  misc_feature: MA Experiment 20000072 PARAMETER Experiment Name: At_100uM_ABA_Mutants_cDNA_P Parameter: Tissue Value: Aerial
  misc_feature: MA Experiment 20000072 PARAMETER Experiment Name: At_100uM_ABA_Mutants_cDNA_P Parameter: Treatment Value: 100uM ABA vs. No Treatment
  misc_feature: MA Experiment ID: 20000086 Result: Up-regulated in Transcription
  misc_feature: MA Experiment 20000086 PARAMETER Experiment Name: At_100uM_ABA_Mutants_cDNA_P Parameter: Plant Line Value: CS22
  misc_feature: MA Experiment 20000086 PARAMETER Experiment Name: At_100uM_ABA_Mutants_cDNA_P Parameter: Timepoint (hr) Value: 6
  misc_feature: MA Experiment 20000086 PARAMETER Experiment Name: At_100uM_ABA_Mutants_cDNA_P Parameter: Tissue Value: Aerial
  misc_feature: MA Experiment 20000086 PARAMETER Experiment Name: At_100uM_ABA_Mutants_cDNA_P Parameter: Treatment Value: 100uM ABA vs. No Treatment
  misc_feature: MA Experiment ID: 20000087 Result: Up-regulated in Transcription
  misc_feature: MA Experiment 20000087 PARAMETER Experiment Name: At_100uM_ABA_Mutants_cDNA_P Parameter: Plant Line Value: WS
  misc_feature: MA Experiment 20000087 PARAMETER Experiment Name: At_100uM_ABA_Mutants_cDNA_P Parameter: Timepoint (hr) Value: 6
  misc_feature: MA Experiment 20000087 PARAMETER Experiment Name: At_100uM_ABA_Mutants_cDNA_P Parameter: Tissue Value: Aerial
  misc_feature: MA Experiment 20000087 PARAMETER Experiment Name: At_100uM_ABA_Mutants_cDNA_P Parameter: Treatment Value: 100uM ABA vs. No Treatment
  misc_feature: MA Experiment ID: 20000088 Result: Up-regulated in Transcription
  misc_feature: MA Experiment 20000088 PARAMETER Experiment Name: At_100uM_ABA_Mutants_cDNA_P Parameter: Plant Line Value: Landsberg
  misc_feature: MA Experiment 20000088 PARAMETER Experiment Name: At_100uM_ABA_Mutants_cDNA_P Parameter: Timepoint (hr) Value: 6
  misc_feature: MA Experiment 20000088 PARAMETER Experiment Name: At_100uM_ABA_Mutants_cDNA_P Parameter: Tissue Value: Aerial
  misc_feature: MA Experiment 20000088 PARAMETER Experiment Name: At_100uM_ABA_Mutants_cDNA_P Parameter: Treatment Value: 100uM ABA vs. No Treatment
  misc_feature: MA Experiment ID: 20000090 Result: Up-regulated in Transcription
  misc_feature: MA Experiment ID: 20000111 Result: Up-regulated in Transcription
  misc_feature: MA Experiment 20000111 PARAMETER Experiment Name: At_42deg_Heat_cDNA_P Parameter: Temperature (deg C) Value: 42 vs. 22
  misc_feature: MA Experiment 20000111 PARAMETER Experiment Name: At_42deg_Heat_cDNA_P Parameter: Timepoint (hr) Value: 6
  misc_feature: MA Experiment 20000111 PARAMETER Experiment Name: At_42deg_Heat_cDNA_P Parameter: Tissue Value: Aerial
  misc_feature: MA Experiment ID: 20000112 Result: Up-regulated in Transcription
  misc_feature: MA Experiment 20000112 PARAMETER Experiment Name: At_42deg_Heat_cDNA_P Parameter: Temperature (deg C) Value: 42 vs. 22
  misc_feature: MA Experiment 20000112 PARAMETER Experiment Name: At_42deg_Heat_cDNA_P Parameter: Timepoint (hr) Value: 2
  misc_feature: MA Experiment 20000112 PARAMETER Experiment Name: At_42deg_Heat_cDNA_P Parameter: Tissue Value: Aerial
  misc_feature: MA Experiment ID: 20000113 Result: Up-regulated in Transcription
  misc_feature: MA Experiment 20000113 PARAMETER Experiment Name: At_42deg_Heat_cDNA_P Parameter: Temperature (deg C) Value: 42 vs. 22
  misc_feature: MA Experiment 20000113 PARAMETER Experiment Name: At_42deg_Heat_cDNA_P Parameter: Timepoint (hr) Value: 8
  misc_feature: MA Experiment 20000113 PARAMETER Experiment Name: At_42deg_Heat_cDNA_P Parameter: Tissue Value: Aerial
  misc_feature: MA Experiment ID: 20000117 Result: Up-regulated in Transcription
  misc_feature: MA Experiment 20000117 PARAMETER Experiment Name: At_100uM_ABA_Mutants_cDNA_P Parameter: Plant Line Value: Columbia
  misc_feature: MA Experiment 20000117 PARAMETER Experiment Name: At_100uM_ABA_Mutants_cDNA_P Parameter: Timepoint (hr) Value: 6
  misc_feature: MA Experiment 20000117 PARAMETER Experiment Name: At_100uM_ABA_Mutants_cDNA_P Parameter: Tissue Value: Aerial
  misc_feature: MA Experiment 20000117 PARAMETER Experiment Name: At_100uM_ABA_Mutants_cDNA_P Parameter: Treatment Value: 100uM ABA vs. No Treatment
  misc_feature: MA Experiment ID: 20000171 Result: Up-regulated in Transcription
  misc_feature: MA Experiment 20000171 PARAMETER Experiment Name: At_42deg_Heat_P Parameter: Age (day) Value: 14
  misc_feature: MA Experiment 20000171 PARAMETER Experiment Name: At_42deg_Heat_P Parameter: Organism Value: A. thaliana
  misc_feature: MA Experiment 20000171 PARAMETER Experiment Name: At_42deg_Heat_P Parameter: Plant Line Value: WS
  misc_feature: MA Experiment 20000171 PARAMETER Experiment Name: At_42deg_Heat_P Parameter: Temperature (deg C) Value: 42 vs. 22
  misc_feature: MA Experiment 20000171 PARAMETER Experiment Name: At_42deg_Heat_P Parameter: Timepoint (hr) Value: 1
  misc_feature: MA Experiment 20000171 PARAMETER Experiment Name: At_42deg_Heat_P Parameter: Tissue Value: Aerial
  misc_feature: MA Experiment ID: 20000179 Result: Down-regulated in Transcription
  misc_feature: MA Experiment 20000179 PARAMETER Experiment Name: At_Germinating_Seeds_P Parameter: Age (hr) Value: 6 vs. 0
  misc_feature: MA Experiment 20000179 PARAMETER Experiment Name: At_Germinating_Seeds_P Parameter: Tissue Value: Germinating Seeds
  misc_feature: MA Experiment ID: 20000180 Result: Down-regulated in Transcription
  misc_feature: MA Experiment 20000180 PARAMETER Experiment Name: At_Germinating_Seeds_P Parameter: Age (hr) Value: 24 vs. 0
  misc_feature: MA Experiment 20000180 PARAMETER Experiment Name: At_Germinating_Seeds_P Parameter: Tissue Value: Germinating Seeds
  misc_feature: MA Experiment ID: 20000184 Result: Down-regulated in Transcription
  misc_feature: MA Experiment 20000184 PARAMETER Experiment Name: At_Shoots__P Parameter: Age (day) Value: 7
  misc_feature: MA Experiment 20000184 PARAMETER Experiment Name: At_Shoots__P Parameter: Tissue Value: Shoots vs. Whole Plant
  misc_feature: MA Experiment ID: 20000185 Result: Down-regulated in Transcription
  misc_feature: MA Experiment 20000185 PARAMETER Experiment Name: At_Roots__P Parameter: Age (day) Value: 7 vs. 21
  misc_feature: MA Experiment 20000185 PARAMETER Experiment Name: At_Roots__P Parameter: Organism Value: A. thaliana
  misc_feature: MA Experiment 20000185 PARAMETER Experiment Name: At_Roots__P Parameter: Tissue Value: Roots vs. Whole Plant
  misc_feature: MA Experiment ID: 20000224 Result: Down-regulated in Transcription
  misc_feature: MA Experiment ID: 20000227 Result: Down-regulated in Transcription
  misc_feature: MA Experiment 20000227 PARAMETER Experiment Name: At_Root-Tips-vs-Tops_P Parameter: Tissue Value: Root Tips vs. Root Tops
  misc_feature: MA Experiment ID: 20000234 Result: Down-regulated in Transcription
  misc_feature: MA Experiment 20000234 PARAMETER Experiment Name: At_Siliques_P Parameter: Age (day) Value: 21
  misc_feature: MA Experiment 20000234 PARAMETER Experiment Name: At_Siliques_P Parameter: Organism Value: A. thaliana
  misc_feature: MA Experiment 20000234 PARAMETER Experiment Name: At_Siliques_P Parameter: Plant Line Value: WS
  misc_feature: MA Experiment 20000234 PARAMETER Experiment Name: At_Siliques_P Parameter: Tissue Value: Less Than 5mm Siliques vs. Whole Plant
  misc_feature: MA Experiment ID: 20000235 Result: Down-regulated in Transcription
  misc_feature: MA Experiment 20000235 PARAMETER Experiment Name: At_Siliques_P Parameter: Age (day) Value: 21
  misc_feature: MA Experiment 20000235 PARAMETER Experiment Name: At_Siliques_P Parameter: Organism Value: A. thaliana
  misc_feature: MA Experiment 20000235 PARAMETER Experiment Name: At_Siliques_P Parameter: Plant Line Value: WS
  misc_feature: MA Experiment 20000235 PARAMETER Experiment Name: At_Siliques_P Parameter: Tissue Value: 5-10mm Siliques vs. Whole Plant
  misc_feature: MA Experiment ID: 20000264 Result: Down-regulated in Transcription
  misc_feature: MA Experiment 20000264 PARAMETER Experiment Name: At_Open_Flower_P Parameter: Age (day) Value: 21
  misc_feature: MA Experiment 20000264 PARAMETER Experiment Name: At_Open_Flower_P Parameter: Plant Line Value: WS
  misc_feature: MA Experiment 20000264 PARAMETER Experiment Name: At_Open_Flower_P Parameter: Tissue Value: Open Flower vs. Whole Plant
  misc_feature: MA Experiment ID: 20000265 Result: Down-regulated in Transcription
  misc_feature: MA Experiment 20000265 PARAMETER Experiment Name: At_Open_Flower_P Parameter: Age (day) Value: 21
  misc_feature: MA Experiment 20000265 PARAMETER Experiment Name: At_Open_Flower_P Parameter: Plant Line Value: WS
  misc_feature: MA Experiment 20000265 PARAMETER Experiment Name: At_Open_Flower_P Parameter: Tissue Value: Closed Flower vs. Whole Plant
  misc_feature: MA Experiment ID: 20000267 Result: Up-regulated in Transcription
  misc_feature: MA Experiment 20000267 PARAMETER Experiment Name: At_Drought_P Parameter: Age (day) Value: 7
  misc_feature: MA Experiment 20000267 PARAMETER Experiment Name: At_Drought_P Parameter: Organism Value: A. thaliana
  misc_feature: MA Experiment 20000267 PARAMETER Experiment Name: At_Drought_P Parameter: Plant Line Value: WS
  misc_feature: MA Experiment 20000267 PARAMETER Experiment Name: At_Drought_P Parameter: Timepoint (hr) Value: 6
  misc_feature: MA Experiment 20000267 PARAMETER Experiment Name: At_Drought_P Parameter: Tissue Value: Whole Plant
  misc_feature: MA Experiment 20000267 PARAMETER Experiment Name: At_Drought_P Parameter: Treatment Value: Drought vs. No Drought
  misc_feature: MA Experiment ID: 20000269 Result: Down-regulated in Transcription
  misc_feature: MA Experiment 20000269 PARAMETER Experiment Name: At_1mM_KNO3_L-vs-H_Roots_P Parameter: Age (day) Value: 7,10,12
  misc_feature: MA Experiment 20000269 PARAMETER Experiment Name: At_1mM_KNO3_L-vs-H_Roots_P Parameter: Organism Value: A. thaliana
  misc_feature: MA Experiment 20000269 PARAMETER Experiment Name: At_1mM_KNO3_L-vs-H_Roots_P Parameter: Plant Line Value: WS
  misc_feature: MA Experiment 20000269 PARAMETER Experiment Name: At_1mM_KNO3_L-vs-H_Roots_P Parameter: Timepoint (day) Value: 7,10,12
  misc_feature: MA Experiment 20000269 PARAMETER Experiment Name: At_1mM_KNO3_L-vs-H_Roots_P Parameter: Tissue Value: Roots
  misc_feature: MA Experiment 20000269 PARAMETER Experiment Name: At_1mM_KNO3_L-vs-H_Roots_P Parameter: Treatment Value: 1mM KNO3 vs. 50mM KNO3
  misc_feature: MA Experiment ID: 20000286 Result: Down-regulated in Transcription
  misc_feature: MA Experiment 20000286 PARAMETER Experiment Name: At_Open_Flower_P Parameter: Age (day) Value: 21
  misc_feature: MA Experiment 20000286 PARAMETER Experiment Name: At_Open_Flower_P Parameter: Plant Line Value: WS
  misc_feature: MA Experiment 20000286 PARAMETER Experiment Name: At_Open_Flower_P Parameter: Tissue Value: Half Open vs. Whole Plant
  misc_feature: MA Experiment ID: 20000436 Result: Up-regulated in Transcription
  misc_feature: MA Experiment 20000436 PARAMETER Experiment Name: At_Drought_P Parameter: Age (day) Value: 7
  misc_feature: MA Experiment 20000436 PARAMETER Experiment Name: At_Drought_P Parameter: Organism Value: A. thaliana
  misc_feature: MA Experiment 20000436 PARAMETER Experiment Name: At_Drought_P Parameter: Plant Line Value: WS
  misc_feature: MA Experiment 20000436 PARAMETER Experiment Name: At_Drought_P Parameter: Timepoint (hr) Value: 12
  misc_feature: MA Experiment 20000436 PARAMETER Experiment Name: At_Drought_P Parameter: Tissue Value: Whole Plant
  misc_feature: MA Experiment 20000436 PARAMETER Experiment Name: At_Drought_P Parameter: Treatment Value: Drought vs. No Drought
  misc_feature: MA Experiment ID: 20000437 Result: Up-regulated in Transcription
  misc_feature: MA Experiment 20000437 PARAMETER Experiment Name: At_Drought_P Parameter: Age (day) Value: 8
  misc_feature: MA Experiment 20000437 PARAMETER Experiment Name: At_Drought_P Parameter: Organism Value: A. thaliana
  misc_feature: MA Experiment 20000437 PARAMETER Experiment Name: At_Drought_P Parameter: Plant Line Value: WS
  misc_feature: MA Experiment 20000437 PARAMETER Experiment Name: At_Drought_P Parameter: Timepoint (hr) Value: 24
  misc_feature: MA Experiment 20000437 PARAMETER Experiment Name: At_Drought_P Parameter: Tissue Value: Whole Plant
  misc_feature: MA Experiment 20000437 PARAMETER Experiment Name: At_Drought_P Parameter: Treatment Value: Drought vs. No Drought
  misc_feature: MA Experiment ID: 20000438 Result: Down-regulated in Transcription
  misc_feature: MA Experiment 20000438 PARAMETER Experiment Name: At_Shoots__P Parameter: Age (day) Value: 14
  misc_feature: MA Experiment 20000438 PARAMETER Experiment Name: At_Shoots__P Parameter: Tissue Value: Shoots vs. Whole Plant
  misc_feature: MA Experiment ID: 20000439 Result: Down-regulated in Transcription
  misc_feature: MA Experiment 20000439 PARAMETER Experiment Name: At_Roots__P Parameter: Age (day) Value: 14 vs. 21
  misc_feature: MA Experiment 20000439 PARAMETER Experiment Name: At_Roots__P Parameter: Organism Value: A. thaliana
  misc_feature: MA Experiment 20000439 PARAMETER Experiment Name: At_Roots__P Parameter: Tissue Value: Roots vs. Whole Plant
  misc_feature: MA Experiment ID: 20000451 Result: Down-regulated in Transcription
  misc_feature: MA Experiment 20000451 PARAMETER Experiment Name: At_CS6879_Shoots-Roots_P Parameter: Age (day) Value: 14
  misc_feature: MA Experiment 20000451 PARAMETER Experiment Name: At_CS6879_Shoots-Roots_P Parameter: Organism Value: A. thaliana
  misc_feature: MA Experiment 20000451 PARAMETER Experiment Name: At_CS6879_Shoots-Roots_P Parameter: Plant Line Value: CS6879 vs. WS
  misc_feature: MA Experiment 20000451 PARAMETER Experiment Name: At_CS6879_Shoots-Roots_P Parameter: Tissue Value: Roots
  misc_feature: MA Experiment ID: 20000453 Result: Up-regulated in Transcription
  misc_feature: MA Experiment 20000453 PARAMETER Experiment Name: At_100uM_ABA_P Parameter: Age (day) Value: 15
  misc_feature: MA Experiment 20000453 PARAMETER Experiment Name: At_100uM_ABA_P Parameter: Organism Value: A. thaliana
  misc_feature: MA Experiment 20000453 PARAMETER Experiment Name: At_100uM_ABA_P Parameter: Plant Line Value: WS
  misc_feature: MA Experiment 20000453 PARAMETER Experiment Name: At_100uM_ABA_P Parameter: Timepoint (hr) Value: 24
  misc_feature: MA Experiment 20000453 PARAMETER Experiment Name: At_100uM_ABA_P Parameter: Tissue Value: Aerial
  misc_feature: MA Experiment 20000453 PARAMETER Experiment Name: At_100uM_ABA_P Parameter: Treatment Value: 100uM ABA vs. No Treatment
  misc_feature: MA Experiment ID: 20001248 Result: Up-regulated in Transcription
  misc_feature: MA Experiment 20001248 PARAMETER Experiment Name: At_Far-red-induction_P Parameter: Age (day) Value: 7
  misc_feature: MA Experiment 20001248 PARAMETER Experiment Name: At_Far-red-induction_P Parameter: Light Value: Far-red vs. White
  misc_feature: MA Experiment 20001248 PARAMETER Experiment Name: At_Far-red-induction_P Parameter: Organism Value: A. thaliana
  misc_feature: MA Experiment 20001248 PARAMETER Experiment Name: At_Far-red-induction_P Parameter: Plant Line Value: Columbia
  misc_feature: MA Experiment 20001248 PARAMETER Experiment Name: At_Far-red-induction_P Parameter: Timepoint (hr) Value: 4
  misc_feature: MA Experiment 20001248 PARAMETER Experiment Name: At_Far-red-induction_P Parameter: Tissue Value: Whole Plant
  misc_feature: MA Experiment ID: 20001450 Result: Up-regulated in Transcription
  misc_feature: MA Experiment 20001450 PARAMETER Experiment Name: At_Far-red-induction_P Parameter: Age (day) Value: 7
  misc_feature: MA Experiment 20001450 PARAMETER Experiment Name: At_Far-red-induction_P Parameter: Light Value: Far-red vs. White
  misc_feature: MA Experiment 20001450 PARAMETER Experiment Name: At_Far-red-induction_P Parameter: Organism Value: A. thaliana
  misc_feature: MA Experiment 20001450 PARAMETER Experiment Name: At_Far-red-induction_P Parameter: Plant Line Value: Columbia
  misc_feature: MA Experiment 20001450 PARAMETER Experiment Name: At_Far-red-induction_P Parameter: Timepoint (hr) Value: 8
  misc_feature: MA Experiment 20001450 PARAMETER Experiment Name: At_Far-red-induction_P Parameter: Tissue Value: Whole Plant
  misc_feature: MA Experiment ID: 20001554 Result: Up-regulated in Transcription
  misc_feature: MA Experiment 20001554 PARAMETER Experiment Name: At_Drought_Soil_Dry_P Parameter: Age (day) Value: 21
  misc_feature: MA Experiment 20001554 PARAMETER Experiment Name: At_Drought_Soil_Dry_P Parameter: Organism Value: A. thaliana
  misc_feature: MA Experiment 20001554 PARAMETER Experiment Name: At_Drought_Soil_Dry_P Parameter: Plant Line Value: WS
  misc_feature: MA Experiment 20001554 PARAMETER Experiment Name: At_Drought_Soil_Dry_P Parameter: Post Timepoint (hr) Value: None
  misc_feature: MA Experiment 20001554 PARAMETER Experiment Name: At_Drought_Soil_Dry_P Parameter: Post-Treatment Value: None
  misc_feature: MA Experiment 20001554 PARAMETER Experiment Name: At_Drought_Soil_Dry_P Parameter: Timepoint (day) Value: 7
  misc_feature: MA Experiment 20001554 PARAMETER Experiment Name: At_Drought_Soil_Dry_P Parameter: Treatment Value: Drought vs. No Drought
  misc_feature: MA Experiment ID: 20001555 Result: Up-regulated in Transcription
  misc_feature: MA Experiment 20001555 PARAMETER Experiment Name: At_Drought_Soil_Dry_P Parameter: Age (day) Value: 24
  misc_feature: MA Experiment 20001555 PARAMETER Experiment Name: At_Drought_Soil_Dry_P Parameter: Organism Value: A. thaliana
  misc_feature: MA Experiment 20001555 PARAMETER Experiment Name: At_Drought_Soil_Dry_P Parameter: Plant Line Value: WS
  misc_feature: MA Experiment 20001555 PARAMETER Experiment Name: At_Drought_Soil_Dry_P Parameter: Post Timepoint (hr) Value: None
  misc_feature: MA Experiment 20001555 PARAMETER Experiment Name: At_Drought_Soil_Dry_P Parameter: Post-Treatment Value: None
  misc_feature: MA Experiment 20001555 PARAMETER Experiment Name: At_Drought_Soil_Dry_P Parameter: Timepoint (day) Value: 10
  misc_feature: MA Experiment 20001555 PARAMETER Experiment Name: At_Drought_Soil_Dry_P Parameter: Treatment Value: Drought vs. No Drought
  misc_feature: MA Experiment ID: 20001558 Result: Down-regulated in Transcription
  misc_feature: MA Experiment 20001558 PARAMETER Experiment Name: At_Drought_Soil_Dry_P Parameter: Age (day) Value: 27
  misc_feature: MA Experiment 20001558 PARAMETER Experiment Name: At_Drought_Soil_Dry_P Parameter: Organism Value: A. thaliana
  misc_feature: MA Experiment 20001558 PARAMETER Experiment Name: At_Drought_Soil_Dry_P Parameter: Plant Line Value: WS
  misc_feature: MA Experiment 20001558 PARAMETER Experiment Name: At_Drought_Soil_Dry_P Parameter: Post Timepoint (hr) Value: 6
  misc_feature: MA Experiment 20001558 PARAMETER Experiment Name: At_Drought_Soil_Dry_P Parameter: Post-Treatment Value: Re-Water vs. No Drought
  misc_feature: MA Experiment 20001558 PARAMETER Experiment Name: At_Drought_Soil_Dry_P Parameter: Timepoint (day) Value: 13
  misc_feature: MA Experiment 20001558 PARAMETER Experiment Name: At_Drought_Soil_Dry_P Parameter: Treatment Value: Drought vs. No Drought
  misc_feature: MA Experiment ID: 20001560 Result: Down-regulated in Transcription
  misc_feature: MA Experiment 20001560 PARAMETER Experiment Name: At_Drought_Soil_Dry_P Parameter: Age (day) Value: 28
  misc_feature: MA Experiment 20001560 PARAMETER Experiment Name: At_Drought_Soil_Dry_P Parameter: Organism Value: A. thaliana
  misc_feature: MA Experiment 20001560 PARAMETER Experiment Name: At_Drought_Soil_Dry_P Parameter: Plant Line Value: WS
  misc_feature: MA Experiment 20001560 PARAMETER Experiment Name: At_Drought_Soil_Dry_P Parameter: Post Timepoint (hr) Value: None
  misc_feature: MA Experiment 20001560 PARAMETER Experiment Name: At_Drought_Soil_Dry_P Parameter: Post-Treatment Value: None
  misc_feature: MA Experiment 20001560 PARAMETER Experiment Name: At_Drought_Soil_Dry_P Parameter: Timepoint (day) Value: 14
  misc_feature: MA Experiment 20001560 PARAMETER Experiment Name: At_Drought_Soil_Dry_P Parameter: Treatment Value: Drought vs. No Drought
  misc_feature: MA Experiment ID: 20001906 Result: Up-regulated in Transcription
  misc_feature: MA Experiment 20001906 PARAMETER Experiment Name: At_Drought_Reproduction_P Parameter: Age (day) Value: 35
  misc_feature: MA Experiment 20001906 PARAMETER Experiment Name: At_Drought_Reproduction_P Parameter: Organism Value: A. thaliana
  misc_feature: MA Experiment 20001906 PARAMETER Experiment Name: At_Drought_Reproduction_P Parameter: Plant Line Value: WS
  misc_feature: MA Experiment 20001906 PARAMETER Experiment Name: At_Drought_Reproduction_P Parameter: Timepoint (day) Value: 5
  misc_feature: MA Experiment 20001906 PARAMETER Experiment Name: At_Drought_Reproduction_P Parameter: Tissue Value: Siliques
  misc_feature: MA Experiment 20001906 PARAMETER Experiment Name: At_Drought_Reproduction_P Parameter: Treatment Value: Drought vs. No Drought
  misc_feature: MA Experiment ID: 20001908 Result: Up-regulated in Transcription
  misc_feature: MA Experiment 20001908 PARAMETER Experiment Name: At_Drought_Reproduction_P Parameter: Age (day) Value: 40
  misc_feature: MA Experiment 20001908 PARAMETER Experiment Name: At_Drought_Reproduction_P Parameter: Organism Value: A. thaliana
  misc_feature: MA Experiment 20001908 PARAMETER Experiment Name: At_Drought_Reproduction_P Parameter: Plant Line Value: WS
  misc_feature: MA Experiment 20001908 PARAMETER Experiment Name: At_Drought_Reproduction_P Parameter: Timepoint (day) Value: 10
  misc_feature: MA Experiment 20001908 PARAMETER Experiment Name: At_Drought_Reproduction_P Parameter: Tissue Value: Siliques
  misc_feature: MA Experiment 20001908 PARAMETER Experiment Name: At_Drought_Reproduction_P Parameter: Treatment Value: Drought vs. No Drought
  misc_feature: MA Experiment ID: 20001911 Result: Up-regulated in Transcription
  misc_feature: MA Experiment 20001911 PARAMETER Experiment Name: At_Drought_Reproduction_P Parameter: Age (day) Value: 40
  misc_feature: MA Experiment 20001911 PARAMETER Experiment Name: At_Drought_Reproduction_P Parameter: Organism Value: A. thaliana
  misc_feature: MA Experiment 20001911 PARAMETER Experiment Name: At_Drought_Reproduction_P Parameter: Plant Line Value: WS
  misc_feature: MA Experiment 20001911 PARAMETER Experiment Name: At_Drought_Reproduction_P Parameter: Timepoint (day) Value: 10
  misc_feature: MA Experiment 20001911 PARAMETER Experiment Name: At_Drought_Reproduction_P Parameter: Tissue Value: Flowers
  misc_feature: MA Experiment 20001911 PARAMETER Experiment Name: At_Drought_Reproduction_P Parameter: Treatment Value: Drought vs. No Drought
atgtgaattataaaacgtattgagtattatcgtgaccgacttcaaaaaacaagaaaaacctcaacttctctttttcagctatagccgccgcctcctcccactaaactcaaatcctctcatagtcttttcaatcaaatctgctcttcttcactgttgaagctggctatcaaaactcacaataactatgggaccgatgatgatgagagcagaagaagataactacaatctaaatcctccaccatggctaatcccaatgctaagagcaaactacttcatcccttgttcaatccacgccgcttccaacaaaagcgagtgcaacatgttctgtcttgactgttcttctgaggccttttgctcttactgtttgctcaatcacagaaaccatcgtgtcctccagatacggagatcatcgtaccacaacgttgtgagagtaaacgagattcagaagtacatagacatatcttgtgttcagacatatataatcaacagcgcaaggatcgttttcttgaacgaacgtcctcagccaagaatcggcaaaggagtcaccaatacttgtgaaatctgttgcagaagccttctcgattctttccgtttctgctctctcggttgcaaacttggaggaatgaagcgtgatccaagtctaaccttctctttgagagggaagcatggaagagagtacgaaggtgagtgggaatctgatgaagcgactacaccaactaagatacgcaagacatgtgctttcaaccgtctgatgagtggtctttccatctccaccgttaaatgtgattacttgtcaggagatcaaccgtcttcgagctccggtgatgagagcggttttaaactttctccggggacaccgccgatatataatcaccggaattcaagtagacggaagggcgtcccacaccgtgctcctttctaaaattaatactaacggaagctaattatatagtgtagattatagaaaatgtggttgttatgttgtaactaaatggttagtagtttttaaccttttgagctaggaatatacatattgtaagacatattacttacaggtattgtttggtttttctttttatagtacatatagaaattaggtatatactgtactcaaagggattgaaatatgttttcatatagtttttttgctgtaaatatacgtttgaaggaggtatgtttcttcaacttgtttgtatcgtatactgtgtactatcttcacaataaaat

SEQ ID NO: 105168 - protein, 245 aa, Arabidopsis thaliana
  peptide (1)..(245): Ceres Seq. ID no. 13616620
  misc_feature (15)..(239): Pfam Name: Protein of unknown function, DUF597 Pfam Description: Protein of unknown function, DUF597
  misc_feature (1)..(245): Homolog of NCBI NO: 18411153 NR Description: expressed protein [Arabidopsis thaliana]
  misc_feature (4)..(245): Homolog of NCBI NO: 25337904 NR Description: unknown protein F14G6.19 [imported] - Arabidopsis
  misc_feature (5)..(245): Homolog of NCBI NO: 21536890 NR Description: unknown [Arabidopsis thaliana]
  misc_feature (1)..(245): Homolog of NCBI NO: 18394936 NR Description: expressed protein [Arabidopsis thaliana] At1g21000/F9H16_1 [Arabidopsis thaliana]
  misc_feature (1)..(245): Homolog of NCBI NO: 21537073 NR Description: unknown [Arabidopsis thaliana]
  misc_feature (5)..(245): Homolog of NCBI NO: 25337907 NR Description: hypothetical protein F9H16.1 - Arabidopsis >gi|4836888|gb|AAD30591.1|AC007369_1 Unknown protein [Arabidopsis >gi|13877713|gb|AAK43934.1|AF370615_1 Unknown protein
  misc_feature (11)..(196): Homolog of NCBI NO: 15217560 NR Description: hypothetical protein [Arabidopsis thaliana]
  misc_feature (18)..(179): Homolog of NCBI NO: 37537092 NR Description: unknown protein [Oryza sativa (japonica
  misc_feature (204)..(245): Homolog of NCBI NO: 37537092 NR Description: unknown protein [Oryza sativa (japonica
  misc_feature (6)..(149): Homolog of NCBI NO: 18398555 NR Description: expressed protein [Arabidopsis thaliana]
MGPMMMRAEEDNYNLNPPPWLIPMLRANYFIPCSIHAASNKSECNMFCLDCSSEAFCSYCLLNHRNHRVLQIRRSSYHNVVRVNEIQKYIDISCVQTYIINSARIVFLNERPQPRIGKGVTNTCEICCRSLLDSFRFCSLGCKLGGMKRDPSLTFSLRGKHGREYEGEWESDEATTPTKIRKTCAFNRLMSGLSISTVKCDYLSGDQPSSSSGDESGFKLSPGTPPIYNHRNSSRRKGVPHRAPF

SEQ ID NO: 105169 - protein, 242 aa, Arabidopsis thaliana
  peptide (1)..(242): Ceres Seq. ID no. 13616621
  misc_feature (12)..(236): Pfam Name: Protein of unknown function, DUF597 Pfam Description: Protein of unknown function, DUF597
  misc_feature (1)..(242): Homolog of NCBI NO: 18411153 NR Description: expressed protein [Arabidopsis thaliana]
  misc_feature (1)..(242): Homolog of NCBI NO: 25337904 NR Description: unknown protein F14G6.19 [imported] - Arabidopsis
  misc_feature (2)..(242): Homolog of NCBI NO: 21536890 NR Description: unknown [Arabidopsis thaliana]
  misc_feature (1)..(242): Homolog of NCBI NO: 18394936 NR Description: expressed protein [Arabidopsis thaliana] At1g21000/F9H16_1 [Arabidopsis thaliana]
  misc_feature (1)..(242): Homolog of NCBI NO: 21537073 NR Description: unknown [Arabidopsis thaliana]
  misc_feature (2)..(242): Homolog of NCBI NO: 25337907 NR Description: hypothetical protein F9H16.1 - Arabidopsis >gi|4836888|gb|AAD30591.1|AC007369_1 Unknown protein [Arabidopsis >gi|13877713|gb|AAK43934.1|AF370615_1 Unknown protein
  misc_feature (8)..(193): Homolog of NCBI NO: 15217560 NR Description: hypothetical protein [Arabidopsis thaliana]
  misc_feature (15)..(176): Homolog of NCBI NO: 37537092 NR Description: unknown protein [Oryza sativa (japonica
  misc_feature (201)..(242): Homolog of NCBI NO: 37537092 NR Description: unknown protein [Oryza sativa (japonica
  misc_feature (3)..(146): Homolog of NCBI NO: 18398555 NR Description: expressed protein [Arabidopsis thaliana]
MMMRAEEDNYNLNPPPWLIPMLRANYFIPCSIHAASNKSECNMFCLDCSSEAFCSYCLLNHRNHRVLQIRRSSYHNVVRVNEIQKYIDISCVQTYIINSARIVFLNERPQPRIGKGVTNTCEICCRSLLDSFRFCSLGCKLGGMKRDPSLTFSLRGKHGREYEGEWESDEATTPTKIRKTCAFNRLMSGLSISTVKCDYLSGDQPSSSSGDESGFKLSPGTPPIYNHRNSSRRKGVPHRAPF

SEQ ID NO: 105170 - protein, 241 aa, Arabidopsis thaliana
  peptide (1)..(241): Ceres Seq. ID no. 13616622
  misc_feature (11)..(235): Pfam Name: Protein of unknown function, DUF597 Pfam Description: Protein of unknown function, DUF597
  misc_feature (1)..(241): Homolog of NCBI NO: 18411153 NR Description: expressed protein [Arabidopsis thaliana]
  misc_feature (1)..(241): Homolog of NCBI NO: 25337904 NR Description: unknown protein F14G6.19 [imported] - Arabidopsis
  misc_feature (1)..(241): Homolog of NCBI NO: 21536890 NR Description: unknown [Arabidopsis thaliana]
  misc_feature (1)..(241): Homolog of NCBI NO: 18394936 NR Description: expressed protein [Arabidopsis thaliana] At1g21000/F9H16_1 [Arabidopsis thaliana]
  misc_feature (1)..(241): Homolog of NCBI NO: 21537073 NR Description: unknown [Arabidopsis thaliana]
  misc_feature (1)..(241): Homolog of NCBI NO: 25337907 NR Description: hypothetical protein F9H16.1 - Arabidopsis >gi|4836888|gb|AAD30591.1|AC007369_1 Unknown protein [Arabidopsis >gi|13877713|gb|AAK43934.1|AF370615_1 Unknown protein
  misc_feature (7)..(192): Homolog of NCBI NO: 15217560 NR Description: hypothetical protein [Arabidopsis thaliana]
  misc_feature (14)..(175): Homolog of NCBI NO: 37537092 NR Description: unknown protein [Oryza sativa (japonica
  misc_feature (200)..(241): Homolog of NCBI NO: 37537092 NR Description: unknown protein [Oryza sativa (japonica
  misc_feature (2)..(145): Homolog of NCBI NO: 18398555 NR Description: expressed protein [Arabidopsis thaliana]
MMRAEEDNYNLNPPPWLIPMLRANYFIPCSIHAASNKSECNMFCLDCSSEAFCSYCLLNHRNHRVLQIRRSSYHNVVRVNEIQKYIDISCVQTYIINSARIVFLNERPQPRIGKGVTNTCEICCRSLLDSFRFCSLGCKLGGMKRDPSLTFSLRGKHGREYEGEWESDEATTPTKIRKTCAFNRLMSGLSISTVKCDYLSGDQPSSSSGDESGFKLSPGTPPIYNHRNSSRRKGVPHRAPF

SEQ ID NO: 105171 - DNA, 1867 bp, Arabidopsis thaliana
  misc_feature (1)..(1867): Ceres Seq. ID no. 13616635
  misc_feature: MA Experiment ID: 108464 Result: Up-regulated in Transcription
  misc_feature: MA Experiment 108464 PARAMETER Experiment Name: At_Germinating_Seeds_cDNA_P Parameter: Age (day) Value: 4 vs. 0
  misc_feature: MA Experiment 108464 PARAMETER Experiment Name: At_Germinating_Seeds_cDNA_P Parameter: Tissue Value: Germinating Seeds
  misc_feature: MA Experiment ID: 108585 Result: Down-regulated in Transcription
  misc_feature: MA Experiment 108585 PARAMETER Experiment Name: At_5mM_NaNP_cDNA_P Parameter: Timepoint (hr) Value: 6
  misc_feature: MA Experiment 108585 PARAMETER Experiment Name: At_5mM_NaNP_cDNA_P Parameter: Tissue Value: Aerial
  misc_feature: MA Experiment 108585 PARAMETER Experiment Name: At_5mM_NaNP_cDNA_P Parameter: Treatment Value: null
  misc_feature: MA Experiment ID: 108608 Result: Down-regulated in Transcription
  misc_feature: MA Experiment 108608 PARAMETER Experiment Name: At_100uM_ABA_cDNA_P Parameter: Timepoint (hr) Value: 1
  misc_feature: MA Experiment 108608 PARAMETER Experiment Name: At_100uM_ABA_cDNA_P Parameter: Tissue Value: Aerial
  misc_feature: MA Experiment 108608 PARAMETER Experiment Name: At_100uM_ABA_cDNA_P Parameter: Treatment Value: 100uM ABA vs. No Treatment
  misc_feature: MA Experiment ID: 20000111 Result: Down-regulated in Transcription
  misc_feature: MA Experiment 20000111 PARAMETER Experiment Name: At_42deg_Heat_cDNA_P Parameter: Temperature (deg C) Value: 42 vs. 22
  misc_feature: MA Experiment 20000111 PARAMETER Experiment Name: At_42deg_Heat_cDNA_P Parameter: Timepoint (hr) Value: 6
  misc_feature: MA Experiment 20000111 PARAMETER Experiment Name: At_42deg_Heat_cDNA_P Parameter: Tissue Value: Aerial
  misc_feature: MA Experiment ID: 20000112 Result: Down-regulated in Transcription
  misc_feature: MA Experiment 20000112 PARAMETER Experiment Name: At_42deg_Heat_cDNA_P Parameter: Temperature (deg C) Value: 42 vs. 22
  misc_feature: MA Experiment 20000112 PARAMETER Experiment Name: At_42deg_Heat_cDNA_P Parameter: Timepoint (hr) Value: 2
  misc_feature: MA Experiment 20000112 PARAMETER Experiment Name: At_42deg_Heat_cDNA_P Parameter: Tissue Value: Aerial
  misc_feature: MA Experiment ID: 20000113 Result: Down-regulated in Transcription
  misc_feature: MA Experiment 20000113 PARAMETER Experiment Name: At_42deg_Heat_cDNA_P Parameter: Temperature (deg C) Value: 42 vs. 22
  misc_feature: MA Experiment 20000113 PARAMETER Experiment Name: At_42deg_Heat_cDNA_P Parameter: Timepoint (hr) Value: 8
  misc_feature: MA Experiment 20000113 PARAMETER Experiment Name: At_42deg_Heat_cDNA_P Parameter: Tissue Value: Aerial
  misc_feature: MA Experiment ID: 20000166 Result: Down-regulated in Transcription
  misc_feature: MA Experiment 20000166 PARAMETER Experiment Name: At_100uM_ABA_P Parameter: Age (day) Value: 14
  misc_feature: MA Experiment 20000166 PARAMETER Experiment Name: At_100uM_ABA_P Parameter: Organism Value: A. thaliana
  misc_feature: MA Experiment 20000166 PARAMETER Experiment Name: At_100uM_ABA_P Parameter: Plant Line Value: WS
  misc_feature: MA Experiment 20000166 PARAMETER Experiment Name: At_100uM_ABA_P Parameter: Timepoint (hr) Value: 1
  misc_feature: MA Experiment 20000166 PARAMETER Experiment Name: At_100uM_ABA_P Parameter: Tissue Value: Aerial
  misc_feature: MA Experiment 20000166 PARAMETER Experiment Name: At_100uM_ABA_P Parameter: Treatment Value: 100uM ABA vs. No Treatment
  misc_feature: MA Experiment ID: 20000171 Result: Down-regulated in Transcription
  misc_feature: MA Experiment 20000171 PARAMETER Experiment Name: At_42deg_Heat_P Parameter: Age (day) Value: 14
  misc_feature: MA Experiment 20000171 PARAMETER Experiment Name: At_42deg_Heat_P Parameter: Organism Value: A. thaliana
  misc_feature: MA Experiment 20000171 PARAMETER Experiment Name: At_42deg_Heat_P Parameter: Plant Line Value: WS
  misc_feature: MA Experiment 20000171 PARAMETER Experiment Name: At_42deg_Heat_P Parameter: Temperature (deg C) Value: 42 vs. 22
  misc_feature: MA Experiment 20000171 PARAMETER Experiment Name: At_42deg_Heat_P Parameter: Timepoint (hr) Value: 1
  misc_feature: MA Experiment 20000171 PARAMETER Experiment Name: At_42deg_Heat_P Parameter: Tissue Value: Aerial
  misc_feature: MA Experiment ID: 20000173 Result: Down-regulated in Transcription
  misc_feature: MA Experiment 20000173 PARAMETER Experiment Name: At_42deg_Heat_P Parameter: Age (day) Value: 14
  misc_feature: MA Experiment 20000173 PARAMETER Experiment Name: At_42deg_Heat_P Parameter: Organism Value: A. thaliana
  misc_feature: MA Experiment 20000173 PARAMETER Experiment Name: At_42deg_Heat_P Parameter: Plant Line Value: WS
  misc_feature: MA Experiment 20000173 PARAMETER Experiment Name: At_42deg_Heat_P Parameter: Temperature (deg C) Value: 42 vs. 22
  misc_feature: MA Experiment 20000173 PARAMETER Experiment Name: At_42deg_Heat_P Parameter: Timepoint (hr) Value: 6
  misc_feature: MA Experiment 20000173 PARAMETER Experiment Name: At_42deg_Heat_P Parameter: Tissue Value: Aerial
  misc_feature: MA Experiment ID: 20000184 Result: Down-regulated in Transcription
  misc_feature: MA Experiment 20000184 PARAMETER Experiment Name: At_Shoots__P Parameter: Age (day) Value: 7
  misc_feature: MA Experiment 20000184 PARAMETER Experiment Name: At_Shoots__P Parameter: Tissue Value: Shoots vs. Whole Plant
  misc_feature: MA Experiment ID: 20000224 Result: Up-regulated in Transcription
  misc_feature: MA Experiment ID: 20000227 Result: Up-regulated in Transcription
  misc_feature: MA Experiment 20000227 PARAMETER Experiment Name: At_Root-Tips-vs-Tops_P Parameter: Tissue Value: Root Tips vs. Root Tops
  misc_feature: MA Experiment ID: 20000436 Result: Down-regulated in Transcription
  misc_feature: MA Experiment 20000436 PARAMETER Experiment Name: At_Drought_P Parameter: Age (day) Value: 7
  misc_feature: MA Experiment 20000436 PARAMETER Experiment Name: At_Drought_P Parameter: Organism Value: A. thaliana
  misc_feature: MA Experiment 20000436 PARAMETER Experiment Name: At_Drought_P Parameter: Plant Line Value: WS
  misc_feature: MA Experiment 20000436 PARAMETER Experiment Name: At_Drought_P Parameter: Timepoint (hr) Value: 12
  misc_feature: MA Experiment 20000436 PARAMETER Experiment Name: At_Drought_P Parameter: Tissue Value: Whole Plant
  misc_feature: MA Experiment 20000436 PARAMETER Experiment Name: At_Drought_P Parameter: Treatment Value: Drought vs. No Drought
  misc_feature: MA Experiment ID: 20000437 Result: Down-regulated in Transcription
  misc_feature: MA Experiment 20000437 PARAMETER Experiment Name: At_Drought_P Parameter: Age (day) Value: 8
  misc_feature: MA Experiment 20000437 PARAMETER Experiment Name: At_Drought_P Parameter: Organism Value: A. thaliana
  misc_feature: MA Experiment 20000437 PARAMETER Experiment Name: At_Drought_P Parameter: Plant Line Value: WS
  misc_feature: MA Experiment 20000437 PARAMETER Experiment Name: At_Drought_P Parameter: Timepoint (hr) Value: 24
  misc_feature: MA Experiment 20000437 PARAMETER Experiment Name: At_Drought_P Parameter: Tissue Value: Whole Plant
  misc_feature: MA Experiment 20000437 PARAMETER Experiment Name: At_Drought_P Parameter: Treatment Value: Drought vs. No Drought
  misc_feature: MA Experiment ID: 20000794 Result: Up-regulated in Transcription
  misc_feature: MA Experiment 20000794 PARAMETER Experiment Name: At_Petals_P Parameter: Age (day) Value: 23-25 days
  misc_feature: MA Experiment 20000794 PARAMETER Experiment Name: At_Petals_P Parameter: Plant Line Value: WS
  misc_feature: MA Experiment 20000794 PARAMETER Experiment Name: At_Petals_P Parameter: Tissue Value: Petals vs. Whole plant
  misc_feature: MA Experiment ID: 20001247 Result: Up-regulated in Transcription
  misc_feature: MA Experiment 20001247 PARAMETER Experiment Name: At_Far-red-induction_P Parameter: Age (day) Value: 7
  misc_feature: MA Experiment 20001247 PARAMETER Experiment Name: At_Far-red-induction_P Parameter: Light Value: Far-red vs. White
  misc_feature: MA Experiment 20001247 PARAMETER Experiment Name: At_Far-red-induction_P Parameter: Organism Value: A. thaliana
  misc_feature: MA Experiment 20001247 PARAMETER Experiment Name: At_Far-red-induction_P Parameter: Plant Line Value: Columbia
  misc_feature: MA Experiment 20001247 PARAMETER Experiment Name: At_Far-red-induction_P Parameter: Timepoint (hr) Value: 1
  misc_feature: MA Experiment 20001247 PARAMETER Experiment Name: At_Far-red-induction_P Parameter: Tissue Value: Whole Plant
  misc_feature: MA Experiment ID: 20001451 Result: Up-regulated in Transcription
  misc_feature: MA Experiment 20001451 PARAMETER Experiment Name: At_Far-red-induction_P Parameter: Age (day) Value: 7
  misc_feature: MA Experiment 20001451 PARAMETER Experiment Name: At_Far-red-induction_P Parameter: Light Value: Far-red vs. White
  misc_feature: MA Experiment 20001451 PARAMETER Experiment Name: At_Far-red-induction_P Parameter: Organism Value: A. thaliana
  misc_feature: MA Experiment 20001451 PARAMETER Experiment Name: At_Far-red-induction_P Parameter: Plant Line Value: Columbia
  misc_feature: MA Experiment 20001451 PARAMETER Experiment Name: At_Far-red-induction_P Parameter: Timepoint (hr) Value: 24
  misc_feature: MA Experiment 20001451 PARAMETER Experiment Name: At_Far-red-induction_P Parameter: Tissue Value: Whole Plant
acaaccttcgtcttctcttgaaactctcctcatctctctcaagaaagattcaagttcgagtcttagctatgtctggaaactcagaaggactgttagagagctcaggcggcggcgtgggaggttccgtcgaggaggaaaaagatatgaagatggaggaaaccggtgaaggagccggcagcggaggaaaccggtggccaagaccagagactttagctctattgagaatacgttcagagatggataaagcttttcgtgactctactctcaaagctcccttatgggaagaaatttccaggaaaatgatggagcttggttacaagagaagttcaaagaaatgcaaggagaagttcgagaacgtgtacaagtaccacaaacgtaccaaagaaggtcgtaccgggaaatccgaaggcaaaacttaccggtttttcgaagagttagaagctttcgagactctcagttcctatcaacctgaacctgagtcgcaacccgcgaaatcttctgcagtgatcacgaacgcgcccgcaacctcttccttgataccatggattagctctagcaatccatcaaccgaaaaaagttcttcaccgttgaaacatcatcatcaggttagtgtacaacccatcaccacaaaccctaccttcctcgccaagcaaccatcttccacgacgccttttcctttttatagcagcaacaatactactactgttagccagccgccaatttcaaatgacttgatgaacaatgtttcatcgctgaatcttttctcgagctcaacttcttcatctactgcatctgacgaggaagaagatcatcatcaggttaagagctcgagaaagaagaggaagtattggaaagggttgtttacgaagttgacaaaagagttaatggagaaacaagagaagatgcaaaaaaggttcttggaaacactggagtatcgtgagaaagagagaatctcaagagaagaagcttggagggtccaagagatagggagaatcaacagagaacacgaaacattaatccatgagaggtccaatgctgcagctaaagacgctgcaatcatatccttcttacacaaaatctcaggaggacaaccacaacaaccgcaacaacataatcataaaccatcacaaaggaaacaatatcaaagcgatcattcaataacgtttgagagtaaagagccgagggcggttctattggatacaacaataaagatggggaattacgataacaatcattcggtgtctcctagttcttcaagatggcctaaaaccgaggtcgaggccttgataaggataagaaagaatcttgaagctaactatcaagaaaacggtactaagggaccattatgggaagagatctctgcagggatgagaagattgggatacaatagaagcgcgaaacgctgcaaagagaagtgggaaaacatcaacaagtactttaagaaagtcaaagaaagcaacaagaaacgtccccttgattccaagacttgcccttattttcaccagctcgaagctttgtacaacgagaggaacaaaagtggggcaatgccattgccattgcctctaatggtgactccacagagacagttgcttctctcgcaagaaacccagaccgagtttgagactgatcagagggaaaaagttggtgataaagaagatgaagaagaaggagagagtgaagaagatgaatacgatgaagaagaagagggagaaggagacaatgagacaagtgagttcgagattgtgttgaacaaaacatcttcacctatggacattaacaataatcttttcacctaagtggttttataatcattttattatatacactttcctgtaaaatggggttgaaggaaaaaaaaaaagcatat

SEQ ID NO: 105172 - protein, 597 aa, Arabidopsis thaliana; identical to SEQ ID NO: 26626
  peptide (1)..(597): Ceres Seq. ID no. 13616636
  misc_feature (432)..(476): Pfam Name: Myb-like DNA-binding domain Pfam Description: Myb-like DNA-binding domain
  misc_feature (23)..(597): Homolog of NCBI NO: 15223771 NR Description: trihelix DNA-binding protein (GT2) [Arabidopsis
  misc_feature (23)..(597): Homolog of NCBI NO: 2664202 NR Description: GT2 [Arabidopsis thaliana]
  misc_feature (50)..(597): Homolog of NCBI NO: 21592726 NR Description: trihelix DNA-binding protein (GT2) [Arabidopsis
  misc_feature (100)..(597): Homolog of NCBI NO: 30699205 NR Description: trihelix DNA-binding protein (GT2) [Arabidopsis
  misc_feature (30)..(367): Homolog of NCBI NO: 38344985 NR Description: OSJNBa0011L07.15 [Oryza sativa (japonica
  misc_feature (365)..(513): Homolog of NCBI NO: 38344985 NR Description: OSJNBa0011L07.15 [Oryza sativa (japonica
  misc_feature (54)..(374): Homolog of NCBI NO: 15217472 NR Description: DNA-binding factor -related [Arabidopsis thaliana]
  misc_feature (409)..(561): Homolog of NCBI NO: 15217472 NR Description: DNA-binding factor -related [Arabidopsis thaliana]
  misc_feature (54)..(374): Homolog of NCBI NO: 25403172 NR Description: protein trihelix DNA-binding protein (GTL1)
  misc_feature (409)..(555): Homolog of NCBI NO: 25403172 NR Description: protein trihelix DNA-binding protein (GTL1)

SEQ ID NO: 105173 - protein, 575 aa, Arabidopsis thaliana; identical to SEQ ID NO: 26627
  peptide (1)..(575): Ceres Seq. ID no. 13616637
  misc_feature (410)..(454): Pfam Name: Myb-like DNA-binding domain Pfam Description: Myb-like DNA-binding domain
  misc_feature (1)..(575): Homolog of NCBI NO: 15223771 NR Description: trihelix DNA-binding protein (GT2) [Arabidopsis
  misc_feature (1)..(575): Homolog of NCBI NO: 2664202 NR Description: GT2 [Arabidopsis thaliana]
  misc_feature (28)..(575): Homolog of NCBI NO: 21592726 NR Description: trihelix DNA-binding protein (GT2) [Arabidopsis
  misc_feature (78)..(575): Homolog of NCBI NO: 30699205 NR Description: trihelix DNA-binding protein (GT2) [Arabidopsis
  misc_feature (8)..(345): Homolog of NCBI NO: 38344985 NR Description: OSJNBa0011L07.15 [Oryza sativa (japonica
  misc_feature (343)..(491): Homolog of NCBI NO: 38344985 NR Description: OSJNBa0011L07.15 [Oryza sativa (japonica
  misc_feature (32)..(352): Homolog of NCBI NO: 15217472 NR Description: DNA-binding factor -related [Arabidopsis thaliana]
  misc_feature (387)..(539): Homolog of NCBI NO: 15217472 NR Description: DNA-binding factor -related [Arabidopsis thaliana]
  misc_feature (32)..(352): Homolog of NCBI NO: 25403172 NR Description: protein trihelix DNA-binding protein (GTL1)
  misc_feature (387)..(533): Homolog of NCBI NO: 25403172 NR Description: protein trihelix DNA-binding protein (GTL1)

SEQ ID NO: 105174 - protein, 550 aa, Arabidopsis thaliana; identical to SEQ ID NO: 26628
  peptide (1)..(550): Ceres Seq. ID no. 13616638
  misc_feature (385)..(429): Pfam Name: Myb-like DNA-binding domain Pfam Description: Myb-like DNA-binding domain
  misc_feature (1)..(550): Homolog of NCBI NO: 15223771 NR Description: trihelix DNA-binding protein (GT2) [Arabidopsis
  misc_feature (1)..(550): Homolog of NCBI NO: 2664202 NR Description: GT2 [Arabidopsis thaliana]
  misc_feature (3)..(550): Homolog of NCBI NO: 21592726 NR Description: trihelix DNA-binding protein (GT2) [Arabidopsis
  misc_feature (53)..(550): Homolog of NCBI NO: 30699205 NR Description: trihelix DNA-binding protein (GT2) [Arabidopsis
  misc_feature (1)..(320): Homolog of NCBI NO: 38344985 NR Description: OSJNBa0011L07.15 [Oryza sativa (japonica
  misc_feature (318)..(466): Homolog of NCBI NO: 38344985 NR Description: OSJNBa0011L07.15 [Oryza sativa (japonica
  misc_feature (7)..(327): Homolog of NCBI NO: 15217472 NR Description: DNA-binding factor -related [Arabidopsis thaliana]
  misc_feature (362)..(514): Homolog of NCBI NO: 15217472 NR Description: DNA-binding factor -related [Arabidopsis thaliana]
  misc_feature (7)..(327): Homolog of NCBI NO: 25403172 NR Description: protein trihelix DNA-binding protein (GTL1)
  misc_feature (362)..(508): Homolog of NCBI NO: 25403172 NR Description: protein trihelix DNA-binding protein (GTL1)

SEQ ID NO: 105175 - DNA, 851 bp, Arabidopsis thaliana
  misc_feature (1)..(851): Ceres Seq. ID no. 13616643
  misc_feature: MA Experiment ID: 108573 Result: Up-regulated in Transcription
  misc_feature: MA Experiment 108573 PARAMETER Experiment Name: At_Drought_cDNA_P Parameter: Timepoint (hr) Value: 6
  misc_feature: MA Experiment 108573 PARAMETER Experiment Name: At_Drought_cDNA_P Parameter: Tissue Value: Aerial
  misc_feature: MA Experiment 108573 PARAMETER Experiment Name: At_Drought_cDNA_P Parameter: Treatment Value: Drought vs. No Drought
  misc_feature: MA Experiment ID: 20000112 Result: Up-regulated in Transcription
  misc_feature: MA Experiment 20000112 PARAMETER Experiment Name: At_42deg_Heat_cDNA_P Parameter: Temperature (deg C) Value: 42 vs. 22
  misc_feature: MA Experiment 20000112 PARAMETER Experiment Name: At_42deg_Heat_cDNA_P Parameter: Timepoint (hr) Value: 2
  misc_feature: MA Experiment 20000112 PARAMETER Experiment Name: At_42deg_Heat_cDNA_P Parameter: Tissue Value: Aerial
  misc_feature: MA Experiment ID: 20000495 Result: Down-regulated in Transcription
  misc_feature: MA Experiment 20000495 PARAMETER Experiment Name: At_Guard_Cells_P Parameter: Harvest Date Value: 8/2/2002
  misc_feature: MA Experiment 20000495 PARAMETER Experiment Name: At_Guard_Cells_P Parameter: Organism Value: A. thaliana
  misc_feature: MA Experiment 20000495 PARAMETER Experiment Name: At_Guard_Cells_P Parameter: Tissue Value: Guard Cells vs. Leaves
agatttgagaaaacttttgatttcgagagtgcttcggagcagaagaacgagcaaagctagggtttccatctatcaaatccagctacaatcgaacctattcatcgaaattagggttttttttttggtcccttaatttttcccttctagtagcttctgatccttcgatttccatggcggatgggtactggaaccagcagcgacagcaacatcatcctcctggtggtcctatgaaacgtccccgttccgatttcgaagctccatcatcaacaatgactatagggcacggtggtggttattatccgcgagatgaggatctcgatgttcccgatactagaactatcggttcagcttacgatcgctatctccagagcgtgcaatcaggagaaggtggttctgtttccatgggaagatcaggaggaggaggaggaggaggaggaggtaacgttcaaaccatagatgattttatgttgagacgtggtggagttctccctttagaccatggtccaaatggtcacaccattggttttgatcccccagaacctgttggtaggcgtaacctaccttcagatgcatccaacactttatatgttgaaggacttccttctaattgctctaggagggaagtagctcgatacagagaagtgagacttgtgaccaaagactccaaacatcggaacggagatcctattgttctttgctttgttgattttacaaaccctgcctgtgctgcgactgctctgagcgccttacaaggctatcgaatggacgaaaacgagtctgattccaagttcctgcggctccagttttctaggaaaccaggttcaagaccaggacaaagaggaagaaggtga

SEQ ID NO: 105176 - protein, 226 aa, Arabidopsis thaliana
  peptide (1)..(226): Ceres Seq. ID no. 13616644
  misc_feature (138)..(205): Pfam Name: RNA recognition motif. (a.k.a. RRM, RBD, or RNP domain) Pfam Description: RNA recognition motif. (a.k.a. RRM, RBD, or RNP
  misc_feature (1)..(226): Homolog of NCBI NO: 30699215 NR Description: expressed protein [Arabidopsis thaliana]
  misc_feature (78)..(226): Homolog of NCBI NO: 26450151 NR Description: unknown protein [Arabidopsis thaliana]
  misc_feature (28)..(128): Homolog of NCBI NO: 25406479 NR Description: hypothetical protein F22K20.4 [imported] - thaliana >gi|2829909|gb|AAC00617.1| Hypothetical protein
  misc_feature (42)..(226): Homolog of NCBI NO: 25513502 NR Description: F16F4.3 protein - Arabidopsis thaliana
  misc_feature (67)..(221): Homolog of NCBI NO: 23304837 NR Description: RNA-binding protein [Medicago truncatula]
  misc_feature (17)..(154): Homolog of NCBI NO: 25553563 NR Description: OSJNBa0038F22.13 [Oryza sativa (japonica
  misc_feature (150)..(221): Homolog of NCBI NO: 25553563 NR Description: OSJNBa0038F22.13 [Oryza sativa (japonica
  misc_feature (9)..(226): Homolog of NCBI NO: 15218968 NR Description: hypothetical protein [Arabidopsis thaliana]
  misc_feature (1)..(104): Homolog of NCBI NO: 25406479 NR Description: hypothetical protein F22K20.4 [imported] - thaliana >gi|2829909|gb|AAC00617.1| Hypothetical protein
MADGYWNQQRQQHHPPGGPMKRPRSDFEAPSSTMTIGHGGGYYPRDEDLDVPDTRTIGSAYDRYLQSVQSGEGGSVSMGRSGGGGGGGGGNVQTIDDFMLRRGGVLPLDHGPNGHTIGFDPPEPVGRRNLPSDASNTLYVEGLPSNCSRREVARYREVRLVTKDSKHRNGDPIVLCFVDFTNPACAATALSALQGYRMDENESDSKFLRLQFSRKPGSRPGQRGRR

SEQ ID NO: 105177 - protein, 207 aa, Arabidopsis thaliana
  peptide (1)..(207): Ceres Seq. ID no. 13616645
  misc_feature (119)..(186): Pfam Name: RNA recognition motif. (a.k.a. RRM, RBD, or RNP domain) Pfam Description: RNA recognition motif. (a.k.a. RRM, RBD, or RNP
  misc_feature (1)..(207): Homolog of NCBI NO: 30699215 NR Description: expressed protein [Arabidopsis thaliana]
  misc_feature (59)..(207): Homolog of NCBI NO: 26450151 NR Description: unknown protein [Arabidopsis thaliana]
  misc_feature (9)..(109): Homolog of NCBI NO: 25406479 NR Description: hypothetical protein F22K20.4 [imported] - thaliana >gi|2829909|gb|AAC00617.1| Hypothetical protein
  misc_feature (23)..(207): Homolog of NCBI NO: 25513502 NR Description: F16F4.3 protein - Arabidopsis thaliana
  misc_feature (48)..(202): Homolog of NCBI NO: 23304837 NR Description: RNA-binding protein [Medicago truncatula]
  misc_feature (1)..(135): Homolog of NCBI NO: 25553563 NR Description: OSJNBa0038F22.13 [Oryza sativa (japonica
  misc_feature (131)..(202): Homolog of NCBI NO: 25553563 NR Description: OSJNBa0038F22.13 [Oryza sativa (japonica
  misc_feature (1)..(207): Homolog of NCBI NO: 15218968 NR Description: hypothetical protein [Arabidopsis thaliana]
  misc_feature (1)..(85): Homolog of NCBI NO: 25406479 NR Description: hypothetical protein F22K20.4 [imported] - thaliana >gi|2829909|gb|AAC00617.1| Hypothetical protein
MKRPRSDFEAPSSTMTIGHGGGYYPRDEDLDVPDTRTIGSAYDRYLQSVQSGEGGSVSMGRSGGGGGGGGGNVQTIDDFMLRRGGVLPLDHGPNGHTIGFDPPEPVGRRNLPSDASNTLYVEGLPSNCSRREVARYREVRLVTKDSKHRNGDPIVLCFVDFTNPACAATALSALQGYRMDENESDSKFLRLQFSRKPGSRPGQRGRR

SEQ ID NO: 105178 - protein, 193 aa, Arabidopsis thaliana
  peptide (1)..(193): Ceres Seq. ID no. 13616646
  misc_feature (105)..(172): Pfam Name: RNA recognition motif. (a.k.a. RRM, RBD, or RNP domain) Pfam Description: RNA recognition motif. (a.k.a. RRM, RBD, or RNP
  misc_feature (1)..(193): Homolog of NCBI NO: 30699215 NR Description: expressed protein [Arabidopsis thaliana]
  misc_feature (45)..(193): Homolog of NCBI NO: 26450151 NR Description: unknown protein [Arabidopsis thaliana]
  misc_feature (1)..(95): Homolog of NCBI NO: 25406479 NR Description: hypothetical protein F22K20.4 [imported] - thaliana >gi|2829909|gb|AAC00617.1| Hypothetical protein
  misc_feature (9)..(193): Homolog of NCBI NO: 25513502 NR Description: F16F4.3 protein - Arabidopsis thaliana
  misc_feature (34)..(188): Homolog of NCBI NO: 23304837 NR Description: RNA-binding protein [Medicago truncatula]
  misc_feature (1)..(121): Homolog of NCBI NO: 25553563 NR Description: OSJNBa0038F22.13 [Oryza sativa (japonica
  misc_feature (117)..(188): Homolog of NCBI NO: 25553563 NR Description: OSJNBa0038F22.13 [Oryza sativa (japonica
  misc_feature (1)..(193): Homolog of NCBI NO: 15218968 NR Description: hypothetical protein [Arabidopsis thaliana]
  misc_feature (1)..(71): Homolog of NCBI NO: 25406479 NR Description: hypothetical protein F22K20.4 [imported] - thaliana >gi|2829909|gb|AAC00617.1| Hypothetical protein
MTIGHGGGYYPRDEDLDVPDTRTIGSAYDRYLQSVQSGEGGSVSMGRSGGGGGGGGGNVQTIDDFMLRRGGVLPLDHGPNGHTIGFDPPEPVGRRNLPSDASNTLYVEGLPSNCSRREVARYREVRLVTKDSKHRNGDPIVLCFVDFTNPACAATALSALQGYRMDENESDSKFLRLQFSRKPGSRPGQRGRR

SEQ ID NO: 105179 - DNA, 1170 bp, Arabidopsis thaliana
  misc_feature (1)..(1170): Ceres Seq. ID no. 13616647
  misc_feature: MA Experiment ID: 108595 Result: Down-regulated in Transcription
  misc_feature: MA Experiment 108595 PARAMETER Experiment Name: At_Ler-pi_Ovule_cDNA_P Parameter: Plant Line Value: null
  misc_feature: MA Experiment ID: 108668 Result: Down-regulated in Transcription
  misc_feature: MA Experiment 108668 PARAMETER Experiment Name: At_2mM_SA_cDNA_P Parameter: Plant Line Value: WS
  misc_feature: MA Experiment 108668 PARAMETER Experiment Name: At_2mM_SA_cDNA_P Parameter: Timepoint (hr) Value: 6
  misc_feature: MA Experiment 108668 PARAMETER Experiment Name: At_2mM_SA_cDNA_P Parameter: Treatment Value: 2mM SA vs. No Treatment
  misc_feature: MA Experiment ID: 20000180 Result: Up-regulated in Transcription
  misc_feature: MA Experiment 20000180 PARAMETER Experiment Name: At_Germinating_Seeds_P Parameter: Age (hr) Value: 24 vs. 0
  misc_feature: MA Experiment 20000180 PARAMETER Experiment Name: At_Germinating_Seeds_P Parameter: Tissue Value: Germinating Seeds
  misc_feature: MA Experiment ID: 20000182 Result: Down-regulated in Transcription
  misc_feature: MA Experiment 20000182 PARAMETER Experiment Name: At_2mM_SA_P Parameter: Age (day) Value: 14
  misc_feature: MA Experiment 20000182 PARAMETER Experiment Name: At_2mM_SA_P Parameter: Organism Value: A. thaliana
  misc_feature: MA Experiment 20000182 PARAMETER Experiment Name: At_2mM_SA_P Parameter: Plant Line Value: WS
  misc_feature: MA Experiment 20000182 PARAMETER Experiment Name: At_2mM_SA_P Parameter: Timepoint (hr) Value: 6
  misc_feature: MA Experiment 20000182 PARAMETER Experiment Name: At_2mM_SA_P Parameter: Tissue Value: Aerial
  misc_feature: MA Experiment 20000182 PARAMETER Experiment Name: At_2mM_SA_P Parameter: Treatment Value: 2mM SA vs. No Treatment
  misc_feature: MA Experiment ID: 20000185 Result: Down-regulated in Transcription
  misc_feature: MA Experiment 20000185 PARAMETER Experiment Name: At_Roots__P Parameter: Age (day) Value: 7 vs. 21
  misc_feature: MA Experiment 20000185 PARAMETER Experiment Name: At_Roots__P Parameter: Organism Value: A. thaliana
  misc_feature: MA Experiment 20000185 PARAMETER Experiment Name: At_Roots__P Parameter: Tissue Value: Roots vs. Whole Plant
  misc_feature: MA Experiment ID: 20000264 Result: Down-regulated in Transcription
  misc_feature: MA Experiment 20000264 PARAMETER Experiment Name: At_Open_Flower_P Parameter: Age (day) Value: 21
  misc_feature: MA Experiment 20000264 PARAMETER Experiment Name: At_Open_Flower_P Parameter: Plant Line Value: WS
  misc_feature: MA Experiment 20000264 PARAMETER Experiment Name: At_Open_Flower_P Parameter: Tissue Value: Open Flower vs. Whole Plant
  misc_feature: MA Experiment ID: 20000286 Result: Down-regulated in Transcription
  misc_feature: MA Experiment 20000286 PARAMETER Experiment Name: At_Open_Flower_P Parameter: Age (day) Value: 21
  misc_feature: MA Experiment 20000286 PARAMETER Experiment Name: At_Open_Flower_P Parameter: Plant Line Value: WS
  misc_feature: MA Experiment 20000286 PARAMETER Experiment Name: At_Open_Flower_P Parameter: Tissue Value: Half Open vs. Whole Plant
  misc_feature: MA Experiment ID: 20000436 Result: Down-regulated in Transcription
  misc_feature: MA Experiment 20000436 PARAMETER Experiment Name: At_Drought_P Parameter: Age (day) Value: 7
  misc_feature: MA Experiment 20000436 PARAMETER Experiment Name: At_Drought_P Parameter: Organism Value: A. thaliana
  misc_feature: MA Experiment 20000436 PARAMETER Experiment Name: At_Drought_P Parameter: Plant Line Value: WS
  misc_feature: MA Experiment 20000436 PARAMETER Experiment Name: At_Drought_P Parameter: Timepoint (hr) Value: 12
  misc_feature: MA Experiment 20000436 PARAMETER Experiment Name: At_Drought_P Parameter: Tissue Value: Whole Plant
  misc_feature: MA Experiment 20000436 PARAMETER Experiment Name: At_Drought_P Parameter: Treatment Value: Drought vs. No Drought
  misc_feature: MA Experiment ID: 20000437 Result: Down-regulated in Transcription
  misc_feature: MA Experiment 20000437 PARAMETER Experiment Name: At_Drought_P Parameter: Age (day) Value: 8
  misc_feature: MA Experiment 20000437 PARAMETER Experiment Name: At_Drought_P Parameter: Organism Value: A. thaliana
  misc_feature: MA Experiment 20000437 PARAMETER Experiment Name: At_Drought_P Parameter: Plant Line Value: WS
  misc_feature: MA Experiment 20000437 PARAMETER Experiment Name: At_Drought_P Parameter: Timepoint (hr) Value: 24
  misc_feature: MA Experiment 20000437 PARAMETER Experiment Name: At_Drought_P Parameter: Tissue Value: Whole Plant
  misc_feature: MA Experiment 20000437 PARAMETER Experiment Name: At_Drought_P Parameter: Treatment Value: Drought vs. No Drought
  misc_feature: MA Experiment ID: 20000439 Result: Down-regulated in Transcription
  misc_feature: MA Experiment 20000439 PARAMETER Experiment Name: At_Roots__P Parameter: Age (day) Value: 14 vs. 21
  misc_feature: MA Experiment 20000439 PARAMETER Experiment Name: At_Roots__P Parameter: Organism Value: A. thaliana
  misc_feature: MA Experiment 20000439 PARAMETER Experiment Name: At_Roots__P Parameter: Tissue Value: Roots vs. Whole Plant
  misc_feature: MA Experiment ID: 20000794 Result: Down-regulated in Transcription
  misc_feature: MA Experiment 20000794 PARAMETER Experiment Name: At_Petals_P Parameter: Age (day) Value: 23-25 days
  misc_feature: MA Experiment 20000794 PARAMETER Experiment Name: At_Petals_P Parameter: Plant Line Value: WS
  misc_feature: MA Experiment 20000794 PARAMETER Experiment Name: At_Petals_P Parameter: Tissue Value: Petals vs. Whole plant
  misc_feature: MA Experiment ID: 20001757 Result: Up-regulated in Transcription
  misc_feature: MA Experiment 20001757 PARAMETER Experiment Name: At_50mM_NH4NO3_L-to-H_P Parameter: Timepoint (hr) Value: 6
  misc_feature: MA Experiment 20001757 PARAMETER Experiment Name: At_50mM_NH4NO3_L-to-H_P Parameter: Tissue Value: Leaf
  misc_feature: MA Experiment 20001757 PARAMETER Experiment Name: At_50mM_NH4NO3_L-to-H_P Parameter: Treatment Value: 50mM NH4NO3 vs 100mM Mannitol
  misc_feature: MA Experiment ID: 20001905 Result: Down-regulated in Transcription
  misc_feature: MA Experiment 20001905 PARAMETER Experiment Name: At_Drought_Reproduction_P Parameter: Age (day) Value: 40
  misc_feature: MA Experiment 20001905 PARAMETER Experiment Name: At_Drought_Reproduction_P Parameter: Organism Value: A. thaliana
  misc_feature: MA Experiment 20001905 PARAMETER Experiment Name: At_Drought_Reproduction_P Parameter: Plant Line Value: WS
  misc_feature: MA Experiment 20001905 PARAMETER Experiment Name: At_Drought_Reproduction_P Parameter: Timepoint (day) Value: 10
  misc_feature: MA Experiment 20001905 PARAMETER Experiment Name: At_Drought_Reproduction_P Parameter: Tissue Value: Rosettes
  misc_feature: MA Experiment 20001905 PARAMETER Experiment Name: At_Drought_Reproduction_P Parameter: Treatment Value: Drought vs. No Drought
  misc_feature: MA Experiment ID: 20001906 Result: Down-regulated in Transcription
  misc_feature: MA Experiment 20001906 PARAMETER Experiment Name: At_Drought_Reproduction_P Parameter: Age (day) Value: 35
  misc_feature: MA Experiment 20001906 PARAMETER Experiment Name: At_Drought_Reproduction_P Parameter: Organism Value: A. thaliana
  misc_feature: MA Experiment 20001906 PARAMETER Experiment Name: At_Drought_Reproduction_P Parameter: Plant Line Value: WS
  misc_feature: MA Experiment 20001906 PARAMETER Experiment Name: At_Drought_Reproduction_P Parameter: Timepoint (day) Value: 5
  misc_feature: MA Experiment 20001906 PARAMETER Experiment Name: At_Drought_Reproduction_P Parameter: Tissue Value: Siliques
  misc_feature: MA Experiment 20001906 PARAMETER Experiment Name: At_Drought_Reproduction_P Parameter: Treatment Value: Drought vs. No Drought
  misc_feature: MA Experiment ID: 20001907 Result: Down-regulated in Transcription
  misc_feature: MA Experiment 20001907 PARAMETER Experiment Name: At_Drought_Reproduction_P Parameter: Age (day) Value: 37
  misc_feature: MA Experiment 20001907 PARAMETER Experiment Name: At_Drought_Reproduction_P Parameter: Organism Value: A. thaliana
  misc_feature: MA Experiment 20001907 PARAMETER Experiment Name: At_Drought_Reproduction_P Parameter: Plant Line Value: WS
  misc_feature: MA Experiment 20001907 PARAMETER Experiment Name: At_Drought_Reproduction_P Parameter: Timepoint (day) Value: 7
  misc_feature: MA Experiment 20001907 PARAMETER Experiment Name: At_Drought_Reproduction_P Parameter: Tissue Value: Siliques
  misc_feature: MA Experiment 20001907 PARAMETER Experiment Name: At_Drought_Reproduction_P Parameter: Treatment Value: Drought vs. No Drought
  misc_feature: MA Experiment ID: 20001911 Result: Down-regulated in Transcription
  misc_feature: MA Experiment 20001911 PARAMETER Experiment Name: At_Drought_Reproduction_P Parameter: Age (day) Value: 40
  misc_feature: MA Experiment 20001911 PARAMETER Experiment Name: At_Drought_Reproduction_P Parameter: Organism Value: A. thaliana
  misc_feature: MA Experiment 20001911 PARAMETER Experiment Name: At_Drought_Reproduction_P Parameter: Plant Line Value: WS
  misc_feature: MA Experiment 20001911 PARAMETER Experiment Name: At_Drought_Reproduction_P Parameter: Timepoint (day) Value: 10
  misc_feature: MA Experiment 20001911 PARAMETER Experiment Name: At_Drought_Reproduction_P Parameter: Tissue Value: Flowers
  misc_feature: MA Experiment 20001911 PARAMETER Experiment Name: At_Drought_Reproduction_P Parameter: Treatment Value: Drought vs. No Drought
agaagaaaaaacttgttcgaggcttcgaagaatgtcgatgttaatggctgtcaaaacaacttcactctgttgtagcagcttaaaccttacagcttcaccaacattccgacggaacccacgcgcggcgagattggtgaatccgacagcgagaatccaaacacgttttcatcgcctgattgaagaacaaggcattgtgcttatgcctggatgctacgatgccttatccgcggctattgtgcagcaaaccggattctccgctggttttatatccggttacgccttatccgcttctctcctgggaaaacccgatttcggtttgctaacaccaccggagatggctgcgacggcaaggtcggtgtgtgcgtcagctcctaatatacccatcattgcagatgctgataccggtggaggaaatgcgctaaacattcaaagaaccgtaaaggatttgattgcagctggtgctgctggttgcttccttgaggaccaagcatggccaaagaagtgtggtcatatgcgtggtaaacaggtgataccagcagaagaacatgccgcaaaaatagcatcagctcgagatgctattggagactctgacttcttccttgtcgcaagaacagacgtgcgtgctacttctgcaaaatcagggcttgaagacgccattgcacgtgttaatctatacatggaggcaggagctgatgcttcctttgtagaggcaccaagagacgacgatgagctcaaggaaattggaaaacgcacaaaaggttatagagtttgcaacatgattgaaggaggagtcacaccattacacacgcctgatgagcttaaagaaatgggattccacttgatagttcacccccttaccgcactctatgcatcgactcgagctctggtcgatgttctcaagactcttaaagaaaacggtagcactcgagatcacttgcaaaagatggctacttttgaggaattcaatagtttggtggatttagattcgtggtttgagcttgaagctcgctattcaaacctcagaaacgctcttgggacaaccaaatcatgaagatagggacatttttttttttttttggaactctctcaagcaatggtctcatcaataatgtaactattgccgttgttagaaaaacgtatttaagtatattaatgggccttaatggtgtt

SEQ ID NO: 105180 - protein, 349 aa, Arabidopsis thaliana; identical to SEQ ID NO: 28907
  peptide (1)..(349): Ceres Seq. ID no. 13616648
  misc_feature (127)..(205): Pfam Name: Isocitrate lyase family Pfam Description: Isocitrate lyase family
  misc_feature (11)..(349): Homolog of NCBI NO: 18411340 NR Description: carboxyphosphonoenolpyruvate mutase -related thaliana] >gi|21537183|gb|AAM61524.1|
  misc_feature (13)..(349): Homolog of NCBI NO: 18252195 NR Description: putative carboxyphosphonoenolpyruvate mutase thaliana] >gi|21386949|gb|AAM47878.1| putative
  misc_feature (15)..(349): Homolog of NCBI NO: 6831518 NR Description: Putative carboxyvinyl-carboxyphosphonate (Carboxyphosphonoenolpyruvate phosphonomutase) (CPEP >gi|25324618|pir||E96799 probable carboxyphosphonoenolpyruvate
  misc_feature (11)..(348): Homolog of NCBI NO: 30687359 NR Description: expressed protein [Arabidopsis thaliana]
  misc_feature (48)..(339): Homolog of NCBI NO: 6831519 NR Description: PUTATIVE CARBOXYVINYL-CARBOXYPHOSPHONATE (CARBOXYPHOSPHONOENOLPYRUVATE PHOSPHONOMUTASE) (CPEP
  misc_feature (78)..(348): Homolog of NCBI NO: 25324627 NR Description: F24J8.7 protein - Arabidopsis thaliana Similar carboxyphosphonoenolpyruvate phosphonomutases
  misc_feature (54)..(338): Homolog of NCBI NO: 23043034 NR Description: hypothetical protein [Trichodesmium erythraeum
  misc_feature (54)..(339): Homolog of NCBI NO: 17229355 NR Description: carboxyphosphonoenolpyruvate phosphonomutase sp. PCC 7120] >gi|25324632|pir||AI2038
  misc_feature (59)..(339): Homolog of NCBI NO: 18312827 NR Description: carboxyphosphonoenolpyruvate phosphonomutase [Pyrobaculum aerophilum] >gi|18160313|gb|AAL63676.1|
  misc_feature (42)..(325): Homolog of NCBI NO: 16082233 NR Description: probable carboxyphosphonoenolpyruvate [Thermoplasma acidophilum] >gi|10640537|emb|CAC12351.1| probable

SEQ ID NO: 105181 - protein, 339 aa, Arabidopsis thaliana; identical to SEQ ID NO: 28908
  peptide (1)..(339): Ceres Seq. ID no. 13616649
  misc_feature (117)..(195): Pfam Name: Isocitrate lyase family Pfam Description: Isocitrate lyase family
  misc_feature (1)..(339): Homolog of NCBI NO: 18411340 NR Description: carboxyphosphonoenolpyruvate mutase -related thaliana] >gi|21537183|gb|AAM61524.1|
  misc_feature (3)..(339): Homolog of NCBI NO: 18252195 NR Description: putative carboxyphosphonoenolpyruvate mutase thaliana] >gi|21386949|gb|AAM47878.1| putative
  misc_feature (5)..(339): Homolog of NCBI NO: 6831518 NR Description: Putative carboxyvinyl-carboxyphosphonate (Carboxyphosphonoenolpyruvate phosphonomutase) (CPEP >gi|25324618|pir||E96799 probable carboxyphosphonoenolpyruvate
  misc_feature (1)..(338): Homolog of NCBI NO: 30687359 NR Description: expressed protein [Arabidopsis thaliana]
  misc_feature (38)..(329): Homolog of NCBI NO: 6831519 NR Description: PUTATIVE CARBOXYVINYL-CARBOXYPHOSPHONATE (CARBOXYPHOSPHONOENOLPYRUVATE PHOSPHONOMUTASE) (CPEP
  misc_feature (68)..(338): Homolog of NCBI NO: 25324627 NR Description: F24J8.7 protein - Arabidopsis thaliana Similar carboxyphosphonoenolpyruvate phosphonomutases
  misc_feature (44)..(328): Homolog of NCBI NO: 23043034 NR Description: hypothetical protein [Trichodesmium erythraeum
  misc_feature (44)..(329): Homolog of NCBI NO: 17229355 NR Description: carboxyphosphonoenolpyruvate phosphonomutase sp. PCC 7120] >gi|25324632|pir||AI2038
  misc_feature (49)..(329): Homolog of NCBI NO: 18312827 NR Description: carboxyphosphonoenolpyruvate phosphonomutase [Pyrobaculum aerophilum] >gi|18160313|gb|AAL63676.1|
  misc_feature (32)..(315): Homolog of NCBI NO: 16082233 NR Description: probable carboxyphosphonoenolpyruvate [Thermoplasma acidophilum] >gi|10640537|emb|CAC12351.1| probable

SEQ ID NO: 105182 - protein, 337 aa, Arabidopsis thaliana; identical to SEQ ID NO: 28909
  peptide (1)..(337): Ceres Seq. ID no. 13616650
  misc_feature (115)..(193): Pfam Name: Isocitrate lyase family Pfam Description: Isocitrate lyase family
  misc_feature (1)..(337): Homolog of NCBI NO: 18411340 NR Description: carboxyphosphonoenolpyruvate mutase -related thaliana] >gi|21537183|gb|AAM61524.1|
  misc_feature (1)..(337): Homolog of NCBI NO: 18252195 NR Description: putative carboxyphosphonoenolpyruvate mutase thaliana] >gi|21386949|gb|AAM47878.1| putative
  misc_feature (3)..(337): Homolog of NCBI NO: 6831518 NR Description: Putative carboxyvinyl-carboxyphosphonate (Carboxyphosphonoenolpyruvate phosphonomutase) (CPEP >gi|25324618|pir||E96799 probable carboxyphosphonoenolpyruvate
  misc_feature (1)..(336): Homolog of NCBI NO: 30687359 NR Description: expressed protein [Arabidopsis thaliana]
  misc_feature (36)..(327): Homolog of NCBI NO: 6831519 NR Description: PUTATIVE CARBOXYVINYL-CARBOXYPHOSPHONATE (CARBOXYPHOSPHONOENOLPYRUVATE PHOSPHONOMUTASE) (CPEP
  misc_feature (66)..(336): Homolog of NCBI NO: 25324627 NR Description: F24J8.7 protein - Arabidopsis thaliana Similar carboxyphosphonoenolpyruvate phosphonomutases
  misc_feature (42)..(326): Homolog of NCBI NO: 23043034 NR Description: hypothetical protein [Trichodesmium erythraeum
  misc_feature (42)..(327): Homolog of NCBI NO: 17229355 NR Description: carboxyphosphonoenolpyruvate phosphonomutase sp. PCC 7120] >gi|25324632|pir||AI2038
  misc_feature (47)..(327): Homolog of NCBI NO: 18312827 NR Description: carboxyphosphonoenolpyruvate phosphonomutase [Pyrobaculum aerophilum] >gi|18160313|gb|AAL63676.1|
  misc_feature (30)..(313): Homolog of NCBI NO: 16082233 NR Description: probable carboxyphosphonoenolpyruvate [Thermoplasma acidophilum] >gi|10640537|emb|CAC12351.1| probable

SEQ ID NO: 105183 - DNA, 1397 bp, Arabidopsis thaliana
  misc_feature (1)..(1397): Ceres Seq. ID no. 13616651
  misc_feature: MA Experiment ID: 20000179 Result: Down-regulated in Transcription
  misc_feature: MA Experiment 20000179 PARAMETER Experiment Name: At_Germinating_Seeds_P Parameter: Age (hr) Value: 6 vs. 0
  misc_feature: MA Experiment 20000179 PARAMETER Experiment Name: At_Germinating_Seeds_P Parameter: Tissue Value: Germinating Seeds
  misc_feature: MA Experiment ID: 20000267 Result: Up-regulated in Transcription
  misc_feature: MA Experiment 20000267 PARAMETER Experiment Name: At_Drought_P Parameter: Age (day) Value: 7
  misc_feature: MA Experiment 20000267 PARAMETER Experiment Name: At_Drought_P Parameter: Organism Value: A. thaliana
  misc_feature: MA Experiment 20000267 PARAMETER Experiment Name: At_Drought_P Parameter: Plant Line Value: WS
  misc_feature: MA Experiment 20000267 PARAMETER Experiment Name: At_Drought_P Parameter: Timepoint (hr) Value: 6
  misc_feature: MA Experiment 20000267 PARAMETER Experiment Name: At_Drought_P Parameter: Tissue Value: Whole Plant
  misc_feature: MA Experiment 20000267 PARAMETER Experiment Name: At_Drought_P Parameter: Treatment Value: Drought vs. No Drought
  misc_feature: MA Experiment ID: 20000268 Result: Up-regulated in Transcription
  misc_feature: MA Experiment 20000268 PARAMETER Experiment Name: At_100mM_NaCl__P Parameter: Age (day) Value: 14
  misc_feature: MA Experiment 20000268 PARAMETER Experiment Name: At_100mM_NaCl__P Parameter: Organism Value: A. thaliana
  misc_feature: MA Experiment 20000268 PARAMETER Experiment Name: At_100mM_NaCl__P Parameter: Plant Line Value: WS
  misc_feature: MA Experiment 20000268 PARAMETER Experiment Name: At_100mM_NaCl__P Parameter: Timepoint (hr) Value: 6
  misc_feature: MA Experiment 20000268 PARAMETER Experiment Name: At_100mM_NaCl__P Parameter: Tissue Value: Whole Plant
  misc_feature: MA Experiment 20000268 PARAMETER Experiment Name: At_100mM_NaCl__P Parameter: Treatment Value: 100mM NaCl vs. No Treatment
  misc_feature: MA Experiment ID: 20000308 Result: Up-regulated in Transcription
  misc_feature: MA Experiment 20000308 PARAMETER Experiment Name: At_100mM_NaCl__P Parameter: Age (day) Value: 17
  misc_feature: MA Experiment 20000308 PARAMETER Experiment Name: At_100mM_NaCl__P Parameter: Organism Value: A. thaliana
  misc_feature: MA Experiment 20000308 PARAMETER Experiment Name: At_100mM_NaCl__P Parameter: Plant Line Value: WS
  misc_feature: MA Experiment 20000308 PARAMETER Experiment Name: At_100mM_NaCl__P Parameter: Timepoint (hr) Value: 72
  misc_feature: MA Experiment 20000308 PARAMETER Experiment Name: At_100mM_NaCl__P Parameter: Tissue Value: Whole Plant
  misc_feature: MA Experiment 20000308 PARAMETER Experiment Name: At_100mM_NaCl__P Parameter: Treatment Value: 100mM NaCl vs. No Treatment
  misc_feature: MA Experiment ID: 20000436 Result: Up-regulated in Transcription
  misc_feature: MA Experiment 20000436 PARAMETER Experiment Name: At_Drought_P Parameter: Age (day) Value: 7
  misc_feature: MA Experiment 20000436 PARAMETER Experiment Name: At_Drought_P Parameter: Organism Value: A. thaliana
  misc_feature: MA Experiment 20000436 PARAMETER Experiment Name: At_Drought_P Parameter: Plant Line Value: WS
  misc_feature: MA Experiment 20000436 PARAMETER Experiment Name: At_Drought_P Parameter: Timepoint (hr) Value: 12
  misc_feature: MA Experiment 20000436 PARAMETER Experiment Name: At_Drought_P Parameter: Tissue Value: Whole Plant
  misc_feature: MA Experiment 20000436 PARAMETER Experiment Name: At_Drought_P Parameter: Treatment Value: Drought vs. No Drought
  misc_feature: MA Experiment ID: 20000437 Result: Up-regulated in Transcription
  misc_feature: MA Experiment 20000437 PARAMETER Experiment Name: At_Drought_P Parameter: Age (day) Value: 8
  misc_feature: MA Experiment 20000437 PARAMETER Experiment Name: At_Drought_P Parameter: Organism Value: A. thaliana
  misc_feature: MA Experiment 20000437 PARAMETER Experiment Name: At_Drought_P Parameter: Plant Line Value: WS
  misc_feature: MA Experiment 20000437 PARAMETER Experiment Name: At_Drought_P Parameter: Timepoint (hr) Value: 24
  misc_feature: MA Experiment 20000437 PARAMETER Experiment Name: At_Drought_P Parameter: Tissue Value: Whole Plant
  misc_feature: MA Experiment 20000437 PARAMETER Experiment Name: At_Drought_P Parameter: Treatment Value: Drought vs. No Drought
  misc_feature: MA Experiment ID: 20000441 Result: Down-regulated in Transcription
  misc_feature: MA Experiment 20000441 PARAMETER Experiment Name: At_1uM_BR-BRZ__P Parameter: Tissue Value: Shoot Apices
  misc_feature: MA Experiment 20000441 PARAMETER Experiment Name: At_1uM_BR-BRZ__P Parameter: Treatment Value: 1uM BR vs. No Treatment
  misc_feature: MA Experiment ID: 20000443 Result: Down-regulated in Transcription
  misc_feature: MA Experiment 20000443 PARAMETER Experiment Name: At_1uM_BR-BRZ__P Parameter: Tissue Value: Shoot Apices
  misc_feature: MA Experiment 20000443 PARAMETER Experiment Name: At_1uM_BR-BRZ__P Parameter: Treatment Value: 1uM BRZ vs. No Treatment
  misc_feature: MA Experiment ID: 20000451 Result: Up-regulated in Transcription
  misc_feature: MA Experiment 20000451 PARAMETER Experiment Name: At_CS6879_Shoots-Roots_P Parameter: Age (day) Value: 14
  misc_feature: MA Experiment 20000451 PARAMETER Experiment Name: At_CS6879_Shoots-Roots_P Parameter: Organism Value: A. thaliana
  misc_feature: MA Experiment 20000451 PARAMETER Experiment Name: At_CS6879_Shoots-Roots_P Parameter: Plant Line Value: CS6879 vs. WS
  misc_feature: MA Experiment 20000451 PARAMETER Experiment Name: At_CS6879_Shoots-Roots_P Parameter: Tissue Value: Roots
  misc_feature: MA Experiment ID: 20000460 Result: Down-regulated in Transcription
  misc_feature: MA Experiment 20000460 PARAMETER Experiment Name: At_10percent_PEG_P Parameter: Age (day) Value: 12
  misc_feature: MA Experiment 20000460 PARAMETER Experiment Name: At_10percent_PEG_P Parameter: Organism Value: A. thaliana
  misc_feature: MA Experiment 20000460 PARAMETER Experiment Name: At_10percent_PEG_P Parameter: Plant Line Value: WS
  misc_feature: MA Experiment 20000460 PARAMETER Experiment Name: At_10percent_PEG_P Parameter: Timepoint (day) Value: 12
  misc_feature: MA Experiment 20000460 PARAMETER Experiment Name: At_10percent_PEG_P Parameter: Tissue Value: Whole Plant
  misc_feature: MA Experiment 20000460 PARAMETER Experiment Name: At_10percent_PEG_P Parameter: Treatment Value: 10percent PEG vs. No Treatment
  misc_feature: MA Experiment ID: 20000527 Result: Down-regulated in Transcription
  misc_feature: MA Experiment 20000527 PARAMETER Experiment Name: At_10percent_PEG_P Parameter: Age (day) Value: 20
  misc_feature: MA Experiment 20000527 PARAMETER Experiment Name: At_10percent_PEG_P Parameter: Organism Value: A. thaliana
  misc_feature: MA Experiment 20000527 PARAMETER Experiment Name: At_10percent_PEG_P Parameter: Plant Line Value: WS
  misc_feature: MA Experiment 20000527 PARAMETER Experiment Name: At_10percent_PEG_P Parameter: Timepoint (day) Value: 20
  misc_feature: MA Experiment 20000527 PARAMETER Experiment Name: At_10percent_PEG_P Parameter: Tissue Value: Whole Plant
  misc_feature: MA Experiment 20000527 PARAMETER Experiment Name: At_10percent_PEG_P Parameter: Treatment Value: 10percent PEG vs. No Treatment
  misc_feature: MA Experiment ID: 20001557 Result: Up-regulated in Transcription
  misc_feature: MA Experiment 20001557 PARAMETER Experiment Name: At_Drought_Soil_Dry_P Parameter: Age (day) Value: 27
  misc_feature: MA Experiment 20001557 PARAMETER Experiment Name: At_Drought_Soil_Dry_P Parameter: Organism Value: A. thaliana
  misc_feature: MA Experiment 20001557 PARAMETER Experiment Name: At_Drought_Soil_Dry_P Parameter: Plant Line Value: WS
  misc_feature: MA Experiment 20001557 PARAMETER Experiment Name: At_Drought_Soil_Dry_P Parameter: Post Timepoint (hr) Value: 3
  misc_feature: MA Experiment 20001557 PARAMETER Experiment Name: At_Drought_Soil_Dry_P Parameter: Post-Treatment Value: Re-Water vs. No Drought
  misc_feature: MA Experiment 20001557 PARAMETER Experiment Name: At_Drought_Soil_Dry_P Parameter: Timepoint (day) Value: 13
  misc_feature: MA Experiment 20001557 PARAMETER Experiment Name: At_Drought_Soil_Dry_P Parameter: Treatment Value: Drought vs. No Drought
  misc_feature: MA Experiment ID: 20001905 Result: Up-regulated in Transcription
  misc_feature: MA Experiment 20001905 PARAMETER Experiment Name: At_Drought_Reproduction_P Parameter: Age (day) Value: 40
  misc_feature: MA Experiment 20001905 PARAMETER Experiment Name: At_Drought_Reproduction_P Parameter: Organism Value: A. thaliana
  misc_feature: MA Experiment 20001905 PARAMETER Experiment Name: At_Drought_Reproduction_P Parameter: Plant Line Value: WS
  misc_feature: MA Experiment 20001905 PARAMETER Experiment Name: At_Drought_Reproduction_P Parameter: Timepoint (day) Value: 10
  misc_feature: MA Experiment 20001905 PARAMETER Experiment Name: At_Drought_Reproduction_P Parameter: Tissue Value: Rosettes
  misc_feature: MA Experiment 20001905 PARAMETER Experiment Name: At_Drought_Reproduction_P Parameter: Treatment Value: Drought vs. No Drought
  misc_feature: MA Experiment ID: 20001906 Result: Up-regulated in Transcription
  misc_feature: MA Experiment 20001906 PARAMETER Experiment Name: At_Drought_Reproduction_P Parameter: Age (day) Value: 35
  misc_feature: MA Experiment 20001906 PARAMETER Experiment Name: At_Drought_Reproduction_P Parameter: Organism Value: A. thaliana
  misc_feature: MA Experiment 20001906 PARAMETER Experiment Name: At_Drought_Reproduction_P Parameter: Plant Line Value: WS
  misc_feature: MA Experiment 20001906 PARAMETER Experiment Name: At_Drought_Reproduction_P Parameter: Timepoint (day) Value: 5
  misc_feature: MA Experiment 20001906 PARAMETER Experiment Name: At_Drought_Reproduction_P Parameter: Tissue Value: Siliques
  misc_feature: MA Experiment 20001906 PARAMETER Experiment Name: At_Drought_Reproduction_P Parameter: Treatment Value: Drought vs. No Drought
  misc_feature: MA Experiment ID: 20001908 Result: Up-regulated in Transcription
  misc_feature: MA Experiment 20001908 PARAMETER Experiment Name: At_Drought_Reproduction_P Parameter: Age (day) Value: 40
  misc_feature: MA Experiment 20001908 PARAMETER Experiment Name: At_Drought_Reproduction_P Parameter: Organism Value: A. thaliana
  misc_feature: MA Experiment 20001908 PARAMETER Experiment Name: At_Drought_Reproduction_P Parameter: Plant Line Value: WS
  misc_feature: MA Experiment 20001908 PARAMETER Experiment Name: At_Drought_Reproduction_P Parameter: Timepoint (day) Value: 10
  misc_feature: MA Experiment 20001908 PARAMETER Experiment Name: At_Drought_Reproduction_P Parameter: Tissue Value: Siliques
  misc_feature: MA Experiment 20001908 PARAMETER Experiment Name: At_Drought_Reproduction_P Parameter: Treatment Value: Drought vs. No Drought
  misc_feature: MA Experiment ID: 20001910 Result: Up-regulated in Transcription
  misc_feature: MA Experiment 20001910 PARAMETER Experiment Name: At_Drought_Reproduction_P Parameter: Age (day) Value: 37
  misc_feature: MA Experiment 20001910 PARAMETER Experiment Name: At_Drought_Reproduction_P Parameter: Organism Value: A. thaliana
  misc_feature: MA Experiment 20001910 PARAMETER Experiment Name: At_Drought_Reproduction_P Parameter: Plant Line Value: WS
  misc_feature: MA Experiment 20001910 PARAMETER Experiment Name: At_Drought_Reproduction_P Parameter: Timepoint (day) Value: 7
  misc_feature: MA Experiment 20001910 PARAMETER Experiment Name: At_Drought_Reproduction_P Parameter: Tissue Value: Flowers
  misc_feature: MA Experiment 20001910 PARAMETER Experiment Name: At_Drought_Reproduction_P Parameter: Treatment Value: Drought vs. No Drought
  misc_feature: MA Experiment ID: 20001911 Result: Up-regulated in Transcription
  misc_feature: MA Experiment 20001911 PARAMETER Experiment Name: At_Drought_Reproduction_P Parameter: Age (day) Value: 40
  misc_feature: MA Experiment 20001911 PARAMETER Experiment Name: At_Drought_Reproduction_P Parameter: Organism Value: A. thaliana
  misc_feature: MA Experiment 20001911 PARAMETER Experiment Name: At_Drought_Reproduction_P Parameter: Plant Line Value: WS
  misc_feature: MA Experiment 20001911 PARAMETER Experiment Name: At_Drought_Reproduction_P Parameter: Timepoint (day) Value: 10
  misc_feature: MA Experiment 20001911 PARAMETER Experiment Name: At_Drought_Reproduction_P Parameter: Tissue Value: Flowers
  misc_feature: MA Experiment 20001911 PARAMETER Experiment Name: At_Drought_Reproduction_P Parameter: Treatment Value: Drought vs. No Drought
acatcacaatcacacaaaactaacaaaagatcaaaagcaagttcttcactgttgataatgtctaccaccggacagattattcgatgcaaagctgctgtggcatgggaagccggaaagccactggtgatcgaggaagtggaggttgctccaccgcagaaacacgaagttcgtatcaagattctcttcacttctctctgtcacaccgatgtttacttctgggaagctaagggacaaacaccgttgtttccacgtatcttcggccatgaagctggagggattgttgagagtgttggagaaggagtgactgatcttcagccaggagatcatgtgttgccgatctttaccggagaatgtggggagtgtcgtcattgccactcggaggaatcaaacatgtgtgatcttctcaggatcaacaccgagcgaggagggatgattcacgatggtgaatcaagattctccattaatggcaaaccaatttaccatttccttgggacttccacgttcagtgagtacacagtggttcactctggtcaggttgctaagatcaatccggatgctcctcttgacaaggtctgtattgtcagttgtggtttgtctactgggttaggagcaactttgaatgtggctaaacccaagaaaggtcaaagtgttgccatttttggtcttggtgctgttggtttaggcgctgcagaaggtgctagaatcgctggtgcttctaggatcatcggtgttgattttaactctaaaagattcgaccaagctaaggaattcggtgtgaccgagtgtgtgaacccgaaagaccatgacaagccaattcaacaggtgatcgctgagatgacggatggtggggtggacaggagtgtggaatgcaccggaagcgttcaggccatgattcaagcatttgaatgtgtccacgatggctggggtgttgcagtgctggtgggtgtgccaagcaaagacgatgccttcaagactcatccgatgaatttcttgaatgagaggactcttaagggtactttcttcgggaactacaaacccaaaactgacattcccggggttgtggaaaagtacatgaacaaggagctggagcttgagaaattcatcactcacacagtgccattctcggaaatcaacaaggcctttgattacatgctgaagggagagagtattcgttgcatcatcaccatgggtgcttgaagccattctctcgcagatgatgttcactttgtgttttacttcctttatgcattcacagcaataaaagaaagaaatctccatcgcttttggttttcttctctgtcttaagttagtcgttttcgtgtctaatctattacttatcattgtaatagactcttcttctattgagatttgaatataaactaaaacacattccattt

SEQ ID NO: 105184 - protein, 398 aa, Arabidopsis thaliana; identical to SEQ ID NO: 26842
  peptide (1)..(398): Ceres Seq. ID no. 13616652
  misc_feature (20)..(398): Homolog of NCBI NO: 15223838 NR Description: alcohol dehydrogenase (ADH) [Arabidopsis >gi|469467|emb|CAA54911.1| alcohol dehydrogenase [Arabidopsis >gi|1944214|dbj|BAA19619.1| alcohol dehydrogenase [Arabidopsis
  misc_feature (20)..(398): Homolog of NCBI NO: 1944215 NR Description: alcohol dehydrogenase [Arabidopsis thaliana]
  misc_feature (20)..(398): Homolog of NCBI NO: 1944212 NR Description: alcohol dehydrogenase [Arabidopsis thaliana]
  misc_feature (20)..(398): Homolog of NCBI NO: 2570190 NR Description: alcohol dehydrogenase [Arabidopsis thaliana]
  misc_feature (20)..(398): Homolog of NCBI NO: 12862752 NR Description: alcohol dehydrogenase [Arabidopsis thaliana]
  misc_feature (20)..(398): Homolog of NCBI NO: 1944216 NR Description: alcohol dehydrogenase [Arabidopsis thaliana]
  misc_feature (20)..(398): Homolog of NCBI NO: 12862754 NR Description: alcohol dehydrogenase [Arabidopsis thaliana]
  misc_feature (20)..(398): Homolog of NCBI NO: 113412 NR Description: Alcohol dehydrogenase >gi|65899|pir||DEMUAM
  misc_feature (20)..(398): Homolog of NCBI NO: 1944211 NR Description: alcohol dehydrogenase [Arabidopsis thaliana] alcohol dehydrogenase [Arabidopsis thaliana]
  misc_feature (20)..(398): Homolog of NCBI NO: 21593589 NR Description: alcohol dehydrogenase [Arabidopsis thaliana]

SEQ ID NO: 105185 - protein, 379 aa, Arabidopsis thaliana; identical to SEQ ID NO: 26843
  peptide (1)..(379): Ceres Seq. ID no. 13616653
  misc_feature (1)..(379): Homolog of NCBI NO: 15223838 NR Description: alcohol dehydrogenase (ADH) [Arabidopsis >gi|469467|emb|CAA54911.1| alcohol dehydrogenase [Arabidopsis >gi|1944214|dbj|BAA19619.1| alcohol dehydrogenase [Arabidopsis
  misc_feature (1)..(379): Homolog of NCBI NO: 1944215 NR Description: alcohol dehydrogenase [Arabidopsis thaliana]
  misc_feature (1)..(379): Homolog of NCBI NO: 1944212 NR Description: alcohol dehydrogenase [Arabidopsis thaliana]
  misc_feature (1)..(379): Homolog of NCBI NO: 2570190 NR Description: alcohol dehydrogenase [Arabidopsis thaliana]
  misc_feature (1)..(379): Homolog of NCBI NO: 1944216 NR Description: alcohol dehydrogenase [Arabidopsis thaliana]
  misc_feature (1)..(379): Homolog of NCBI NO: 12862752 NR Description: alcohol dehydrogenase [Arabidopsis thaliana]
  misc_feature (1)..(379): Homolog of NCBI NO: 12862754 NR Description: alcohol dehydrogenase [Arabidopsis thaliana]
  misc_feature (1)..(379): Homolog of NCBI NO: 113412 NR Description: Alcohol dehydrogenase >gi|65899|pir||DEMUAM
  misc_feature (1)..(379): Homolog of NCBI NO: 1944211 NR Description: alcohol dehydrogenase [Arabidopsis thaliana] alcohol dehydrogenase [Arabidopsis thaliana]
  misc_feature (1)..(379): Homolog of NCBI NO: 21593589 NR Description: alcohol dehydrogenase [Arabidopsis thaliana]

SEQ ID NO: 105186 - protein, 268 aa, Arabidopsis thaliana; identical to SEQ ID NO: 26844
  peptide (1)..(268): Ceres Seq. ID no. 13616654
  misc_feature (1)..(268): Homolog of NCBI NO: 15223838 NR Description: alcohol dehydrogenase (ADH) [Arabidopsis >gi|469467|emb|CAA54911.1| alcohol dehydrogenase [Arabidopsis >gi|1944214|dbj|BAA19619.1| alcohol dehydrogenase [Arabidopsis
  misc_feature (1)..(268): Homolog of NCBI NO: 1944215 NR Description: alcohol dehydrogenase [Arabidopsis thaliana]
  misc_feature (1)..(268): Homolog of NCBI NO: 1944212 NR Description: alcohol dehydrogenase [Arabidopsis thaliana]
  misc_feature (1)..(268): Homolog of NCBI NO: 1944216 NR Description: alcohol dehydrogenase [Arabidopsis thaliana]
  misc_feature (1)..(268): Homolog of NCBI NO: 12862752 NR Description: alcohol dehydrogenase [Arabidopsis thaliana]
  misc_feature (1)..(268): Homolog of NCBI NO: 2570190 NR Description: alcohol dehydrogenase [Arabidopsis thaliana]
  misc_feature (1)..(268): Homolog of NCBI NO: 12862754 NR Description: alcohol dehydrogenase [Arabidopsis thaliana]
  misc_feature (1)..(268): Homolog of NCBI NO: 113412 NR Description: Alcohol dehydrogenase >gi|65899|pir||DEMUAM
  misc_feature (1)..(268): Homolog of NCBI NO: 1944211 NR Description: alcohol dehydrogenase [Arabidopsis thaliana] alcohol dehydrogenase [Arabidopsis thaliana]
  misc_feature (1)..(268): Homolog of NCBI NO: 21593589 NR Description: alcohol dehydrogenase [Arabidopsis thaliana]

SEQ ID NO: 105187 - DNA, 973 bp, Arabidopsis thaliana
  misc_feature (1)..(973): Ceres Seq. ID no. 13616661
gagatcccatttcttttgttggcttacttctctcgaatttacgcaggaagatcattagcagagaattctcatctgattcagtccatggctgccacggctcttttccgatcgattcgccgacgcgacgtcgtctccgcgcctctttccgtttacaaatcccttgctggtaatgctcaaccttcctggggtagttcatacattggtcagaactatgcaagtttctccagagctttcgggtcaaaacctgttgtgaatgacattcttggtactggtttgggcactaacaatgccattagagaggagagagagaagtcaaaatctactgaagctgcaattgttggtgctcaattgactcgatctttccgtgctcttgatgtgggaacatcgaaacgattgttttctacaatctcaggggatataaagacaacacaggaggaaccaaaaatcaaaagctttcgccctttatctcctcacctttctgtttaccagcctcagatgaactccatgctatcgattttcaacagaatctcaggggtttacttgaccggtgtcactttcgctggctaccttctctacctgaagatgggtatgatctgcctcacctacccgagtttctaccaagtcctttaccatacacaacagcaacttccagtcatcacctcggttactgcattagccgctatttatcatactatcaagagtactcactcactcttgacccattaaaaacctttaccaaagctctttcgatgaagccgccaaagtctccagtaagagtttctttgagatgattaataaggagacaagaaaacatttgttaaactctgtcttgaaaaggtaaagatttagcacctgtttctttggattcgaggcttttttgggggtatgtttgttgcttttctttgttctcagaccttttttgaatgatgtaataaatgtttaccaaagttctgttgctacgttactctttttg

SEQ ID NO: 105188 - protein, 241 aa, Arabidopsis thaliana; identical to SEQ ID NO: 37868
  peptide (1)..(241): Ceres Seq. ID no. 13616662
  misc_feature (1)..(241): Homolog of NCBI NO: 15236709 NR Description: expressed protein [Arabidopsis thaliana]
  misc_feature (2)..(241): Homolog of NCBI NO: 11022654 NR Description: gene_id:MTH16.1~pir||T05407~strong similarity to
  misc_feature (29)..(241): Homolog of NCBI NO: 15242460 NR Description: expressed protein [Arabidopsis thaliana]
  misc_feature (29)..(241): Homolog of NCBI NO: 21593777 NR Description: unknown [Arabidopsis thaliana]
  misc_feature (118)..(239): Homolog of NCBI NO: 14861484 NR Description: succinate dehydrogenase subunit 3 [Gossypium

SEQ ID NO: 105189 - protein, 213 aa, Arabidopsis thaliana; identical to SEQ ID NO: 37869
  peptide (1)..(213): Ceres Seq. ID no. 13616663
  misc_feature (1)..(213): Homolog of NCBI NO: 15236709 NR Description: expressed protein [Arabidopsis thaliana]
  misc_feature (1)..(213): Homolog of NCBI NO: 11022654 NR Description: gene_id:MTH16.1~pir||T05407~strong similarity to
  misc_feature (1)..(213): Homolog of NCBI NO: 15242460 NR Description: expressed protein [Arabidopsis thaliana]
  misc_feature (1)..(213): Homolog of NCBI NO: 21593777 NR Description: unknown [Arabidopsis thaliana]
  misc_feature (90)..(211): Homolog of NCBI NO: 14861484 NR Description: succinate dehydrogenase subunit 3 [Gossypium

SEQ ID NO: 105190 - DNA, 1167 bp, Arabidopsis thaliana
  misc_feature (1)..(1167): Ceres Seq. ID no. 13616664
  misc_feature: MA Experiment ID: 108434 Result: Up-regulated in Transcription
  misc_feature: MA Experiment 108434 PARAMETER Experiment Name: At_Root_Tips_cDNA_P Parameter: Tissue Value: Root Tips
  misc_feature: MA Experiment ID: 108462 Result: Down-regulated in Transcription
  misc_feature: MA Experiment 108462 PARAMETER Experiment Name: At_Germinating_Seeds_cDNA_P Parameter: Age (day) Value: 2 vs. 0
  misc_feature: MA Experiment 108462 PARAMETER Experiment Name: At_Germinating_Seeds_cDNA_P Parameter: Tissue Value: Germinating Seeds
  misc_feature: MA Experiment ID: 108463 Result: Down-regulated in Transcription
  misc_feature: MA Experiment 108463 PARAMETER Experiment Name: At_Germinating_Seeds_cDNA_P Parameter: Age (day) Value: 3 vs. 0
  misc_feature: MA Experiment 108463 PARAMETER Experiment Name: At_Germinating_Seeds_cDNA_P Parameter: Tissue Value: Germinating Seeds
  misc_feature: MA Experiment ID: 108464 Result: Down-regulated in Transcription
  misc_feature: MA Experiment 108464 PARAMETER Experiment Name: At_Germinating_Seeds_cDNA_P Parameter: Age (day) Value: 4 vs. 0
  misc_feature: MA Experiment 108464 PARAMETER Experiment Name: At_Germinating_Seeds_cDNA_P Parameter: Tissue Value: Germinating Seeds
  misc_feature: MA Experiment ID: 108489 Result: Up-regulated in Transcription
  misc_feature: MA Experiment ID: 20000111 Result: Down-regulated in Transcription
  misc_feature: MA Experiment 20000111 PARAMETER Experiment Name: At_42deg_Heat_cDNA_P Parameter: Temperature (deg C) Value: 42 vs. 22
  misc_feature: MA Experiment 20000111 PARAMETER Experiment Name: At_42deg_Heat_cDNA_P Parameter: Timepoint (hr) Value: 6
  misc_feature: MA Experiment 20000111 PARAMETER Experiment Name: At_42deg_Heat_cDNA_P Parameter: Tissue Value: Aerial
  misc_feature: MA Experiment ID: 20000113 Result: Down-regulated in Transcription
  misc_feature: MA Experiment 20000113 PARAMETER Experiment Name: At_42deg_Heat_cDNA_P Parameter: Temperature (deg C) Value: 42 vs. 22
  misc_feature: MA Experiment 20000113 PARAMETER Experiment Name: At_42deg_Heat_cDNA_P Parameter: Timepoint (hr) Value: 8
  misc_feature: MA Experiment 20000113 PARAMETER Experiment Name: At_42deg_Heat_cDNA_P Parameter: Tissue Value: Aerial
  misc_feature: MA Experiment ID: 20000173 Result: Down-regulated in Transcription
  misc_feature: MA Experiment 20000173 PARAMETER Experiment Name: At_42deg_Heat_P Parameter: Age (day) Value: 14
  misc_feature: MA Experiment 20000173 PARAMETER Experiment Name: At_42deg_Heat_P Parameter: Organism Value: A. thaliana
  misc_feature: MA Experiment 20000173 PARAMETER Experiment Name: At_42deg_Heat_P Parameter: Plant Line Value: WS
  misc_feature: MA Experiment 20000173 PARAMETER Experiment Name: At_42deg_Heat_P Parameter: Temperature (deg C) Value: 42 vs. 22
  misc_feature: MA Experiment 20000173 PARAMETER Experiment Name: At_42deg_Heat_P Parameter: Timepoint (hr) Value: 6
  misc_feature: MA Experiment 20000173 PARAMETER Experiment Name: At_42deg_Heat_P Parameter: Tissue Value: Aerial
  misc_feature: MA Experiment ID: 20000180 Result: Down-regulated in Transcription
  misc_feature: MA Experiment 20000180 PARAMETER Experiment Name: At_Germinating_Seeds_P Parameter: Age (hr) Value: 24 vs. 0
  misc_feature: MA Experiment 20000180 PARAMETER Experiment Name: At_Germinating_Seeds_P Parameter: Tissue Value: Germinating Seeds
  misc_feature: MA Experiment ID: 20001451 Result: Up-regulated in Transcription
  misc_feature: MA Experiment 20001451 PARAMETER Experiment Name: At_Far-red-induction_P Parameter: Age (day) Value: 7
  misc_feature: MA Experiment 20001451 PARAMETER Experiment Name: At_Far-red-induction_P Parameter: Light Value: Far-red vs. White
  misc_feature: MA Experiment 20001451 PARAMETER Experiment Name: At_Far-red-induction_P Parameter: Organism Value: A. thaliana
  misc_feature: MA Experiment 20001451 PARAMETER Experiment Name: At_Far-red-induction_P Parameter: Plant Line Value: Columbia
  misc_feature: MA Experiment 20001451 PARAMETER Experiment Name: At_Far-red-induction_P Parameter: Timepoint (hr) Value: 24
  misc_feature: MA Experiment 20001451 PARAMETER Experiment Name: At_Far-red-induction_P Parameter: Tissue Value: Whole Plant
  misc_feature: MA Experiment ID: 20001557 Result: Up-regulated in Transcription
  misc_feature: MA Experiment 20001557 PARAMETER Experiment Name: At_Drought_Soil_Dry_P Parameter: Age (day) Value: 27
  misc_feature: MA Experiment 20001557 PARAMETER Experiment Name: At_Drought_Soil_Dry_P Parameter: Organism Value: A. thaliana
  misc_feature: MA Experiment 20001557 PARAMETER Experiment Name: At_Drought_Soil_Dry_P Parameter: Plant Line Value: WS
  misc_feature: MA Experiment 20001557 PARAMETER Experiment Name: At_Drought_Soil_Dry_P Parameter: Post Timepoint (hr) Value: 3
  misc_feature: MA Experiment 20001557 PARAMETER Experiment Name: At_Drought_Soil_Dry_P Parameter: Post-Treatment Value: Re-Water vs. No Drought
  misc_feature: MA Experiment 20001557 PARAMETER Experiment Name: At_Drought_Soil_Dry_P Parameter: Timepoint (day) Value: 13
  misc_feature: MA Experiment 20001557 PARAMETER Experiment Name: At_Drought_Soil_Dry_P Parameter: Treatment Value: Drought vs. No Drought
  misc_feature: MA Experiment ID: 20001560 Result: Up-regulated in Transcription
  misc_feature: MA Experiment 20001560 PARAMETER Experiment Name: At_Drought_Soil_Dry_P Parameter: Age (day) Value: 28
  misc_feature: MA Experiment 20001560 PARAMETER Experiment Name: At_Drought_Soil_Dry_P Parameter: Organism Value: A. thaliana
  misc_feature: MA Experiment 20001560 PARAMETER Experiment Name: At_Drought_Soil_Dry_P Parameter: Plant Line Value: WS
  misc_feature: MA Experiment 20001560 PARAMETER Experiment Name: At_Drought_Soil_Dry_P Parameter: Post Timepoint (hr) Value: None
  misc_feature: MA Experiment 20001560 PARAMETER Experiment Name: At_Drought_Soil_Dry_P Parameter: Post-Treatment Value: None
  misc_feature: MA Experiment 20001560 PARAMETER Experiment Name: At_Drought_Soil_Dry_P Parameter: Timepoint (day) Value: 14
  misc_feature: MA Experiment 20001560 PARAMETER Experiment Name: At_Drought_Soil_Dry_P Parameter: Treatment Value: Drought vs. No Drought
aatttcagttctagggttttaatttgatacgaggtcagcgaatccggcgacgaatatccgccactagtaactctagctcaggtaaggatttgtgtccatggcagctttgcaaacgcttcgtgaatggatcggtatccagcagttcccacctgctactcaatctaaattgctcgagatccttgggaagtataaagaagaggatgtgagctcgctaacggtccttgtaatggggaaaggtggtgttggaaagtcatcaactgtgaattcagttataggcgagaaagctgctgcagttagtactttccagtctgaaggactgaggcctaccttggtctctcgcacaagatcgggatttacattgaatatcatcgacactcctggtcttattgagggaggatatgtgaatgatcaagccatcaacattataaaacgatttctcctcaacatgactatagatgtgctactatacgtagaccgtttggatgtgtaccgggtggatgaccttgataggcaagttgtcggtgctataactgatgcatttggtaaagagatatggaagaagtctgctcttgttctcacccatgctcagttctctccaccagacgggttaaattataaccactttgtctccaaaagatctaatgctcttctaaaagttatccagacaggcgctcaactgaagaaacaggatttgcagggtttttctattcctgtcattcttgttgagaacagcggaagatgccataagaacgaaagcgatgaaaagattcttccatgcgggactagttggattcccaatctgttcaacaaaatcacagagatctcttttaatggcaacaaggcgattcatgttgacaagaaactggtcgaagggccaaacccaaacgaaagaggaaaaaaactgattcctttaatgtttgcattccaatacttgctggtgatgaagccattggttcgagcaatcaagtccgatgtttcgagagagagtaaaccggcgtgggagctgcgagactccggtttagcaagtcgaaggtcttgagttgtggacacgagttttgtttggtttgtttgtctatctgagagattgttctgtagttgaaattgtgatacaactcgagaaatgtggttcacagataattactgtcgcaaagttctctcatcttaatt

SEQ ID NO: 105191 - protein, 313 aa, Arabidopsis thaliana; identical to SEQ ID NO: 98100
  peptide (1)..(313): Ceres Seq. ID no. 13616665
  misc_feature (39)..(236): Pfam Name: AIG1 family Pfam Description: AIG1 family
  misc_feature (1)..(313): Homolog of NCBI NO: 15238381 NR Description: GTP-binding protein (gb|AAD09203.1) [Arabidopsis
  misc_feature (1)..(313): Homolog of NCBI NO: 21594231 NR Description: GTP-binding protein [Arabidopsis thaliana]
  misc_feature (1)..(313): Homolog of NCBI NO: 25091410 NR Description: Translocase of chloroplast 34 (34 kDa chloroplast
  misc_feature (5)..(307): Homolog of NCBI NO: 25091388 NR Description: Translocase of chloroplast 34 (34 kDa chloroplast
  misc_feature (5)..(307): Homolog of NCBI NO: 1076522 NR Description: chloroplast import-associated protein IAP36,
  misc_feature (8)..(312): Homolog of NCBI NO: 6689637 NR Description: Toc34-1 protein [Zea mays]
  misc_feature (8)..(312): Homolog of NCBI NO: 7259224 NR Description: Toc34-2 protein [Zea mays]
  misc_feature (7)..(299): Homolog of NCBI NO: 15217705 NR Description: GTP-binding protein -related [Arabidopsis
  misc_feature (7)..(299): Homolog of NCBI NO: 14596163 NR Description: similar to GTP-binding protein [Arabidopsis
  misc_feature (7)..(299): Homolog of NCBI NO: 32765535 NR Description: TOC33 [Brassica napus]

SEQ ID NO: 105192 - protein, 270 aa, Arabidopsis thaliana; identical to SEQ ID NO: 98101
  peptide (1)..(270): Ceres Seq. ID no. 13616666
  misc_feature (1)..(193): Pfam Name: AIG1 family Pfam Description: AIG1 family
  misc_feature (1)..(270): Homolog of NCBI NO: 15238381 NR Description: GTP-binding protein (gb|AAD09203.1) [Arabidopsis
  misc_feature (1)..(270): Homolog of NCBI NO: 21594231 NR Description: GTP-binding protein [Arabidopsis thaliana]
  misc_feature (1)..(270): Homolog of NCBI NO: 25091410 NR Description: Translocase of chloroplast 34 (34 kDa chloroplast
  misc_feature (1)..(264): Homolog of NCBI NO: 25091388 NR Description: Translocase of chloroplast 34 (34 kDa chloroplast
  misc_feature (1)..(264): Homolog of NCBI NO: 1076522 NR Description: chloroplast import-associated protein IAP36,
  misc_feature (1)..(269): Homolog of NCBI NO: 6689637 NR Description: Toc34-1 protein [Zea mays]
  misc_feature (1)..(269): Homolog of NCBI NO: 7259224 NR Description: Toc34-2 protein [Zea mays]
  misc_feature (1)..(256): Homolog of NCBI NO: 15217705 NR Description: GTP-binding protein -related [Arabidopsis
  misc_feature (1)..(256): Homolog of NCBI NO: 14596163 NR Description: similar to GTP-binding protein [Arabidopsis
  misc_feature (1)..(256): Homolog of NCBI NO: 32765535 NR Description: TOC33 [Brassica napus]

SEQ ID NO: 105193 - protein, 197 aa, Arabidopsis thaliana; identical to SEQ ID NO: 27602
  peptide (1)..(197): Ceres Seq. ID no. 13616667
  misc_feature (1)..(120): Pfam Name: AIG1 family Pfam Description: AIG1 family
  misc_feature (1)..(197): Homolog of NCBI NO: 15238381 NR Description: GTP-binding protein (gb|AAD09203.1) [Arabidopsis
  misc_feature (1)..(197): Homolog of NCBI NO: 21594231 NR Description: GTP-binding protein [Arabidopsis thaliana]
  misc_feature (1)..(197): Homolog of NCBI NO: 25091410 NR Description: Translocase of chloroplast 34 (34 kDa chloroplast
  misc_feature (1)..(191): Homolog of NCBI NO: 25091388 NR Description: Translocase of chloroplast 34 (34 kDa chloroplast
  misc_feature (1)..(191): Homolog of NCBI NO: 1076522 NR Description: chloroplast import-associated protein IAP36,
  misc_feature (1)..(196): Homolog of NCBI NO: 6689637 NR Description: Toc34-1 protein [Zea mays]
  misc_feature (1)..(196): Homolog of NCBI NO: 7259224 NR Description: Toc34-2 protein [Zea mays]
  misc_feature (1)..(183): Homolog of NCBI NO: 15217705 NR Description: GTP-binding protein -related [Arabidopsis
  misc_feature (1)..(183): Homolog of NCBI NO: 14596163 NR Description: similar to GTP-binding protein [Arabidopsis
  misc_feature (1)..(183): Homolog of NCBI NO: 32765535 NR Description: TOC33 [Brassica napus]

SEQ ID NO: 105194 - DNA, 1299 bp, Arabidopsis thaliana
  misc_feature (1)..(1299): Ceres Seq. ID no. 13616684
  misc_feature: MA Experiment ID: 108433 Result: Up-regulated in Transcription
  misc_feature: MA Experiment 108433 PARAMETER Experiment Name: At_rhl_Mutant2_cDNA_P Parameter: Age (day) Value: 7
  misc_feature: MA Experiment 108433 PARAMETER Experiment Name: At_rhl_Mutant2_cDNA_P Parameter: Organism Value: A. thaliana
  misc_feature: MA Experiment 108433 PARAMETER Experiment Name: At_rhl_Mutant2_cDNA_P Parameter: Plant Line Value: rhl Mutant vs. wt landsburg
  misc_feature: MA Experiment 108433 PARAMETER Experiment Name: At_rhl_Mutant2_cDNA_P Parameter: Tissue Value: Roots
  misc_feature: MA Experiment ID: 108434 Result: Down-regulated in Transcription
  misc_feature: MA Experiment 108434 PARAMETER Experiment Name: At_Root_Tips_cDNA_P Parameter: Tissue Value: Root Tips
  misc_feature: MA Experiment ID: 108461 Result: Down-regulated in Transcription
  misc_feature: MA Experiment 108461 PARAMETER Experiment Name: At_Germinating_Seeds_cDNA_P Parameter: Age (day) Value: 1 vs. 0
  misc_feature: MA Experiment 108461 PARAMETER Experiment Name: At_Germinating_Seeds_cDNA_P Parameter: Tissue Value: Germinating Seeds
  misc_feature: MA Experiment ID: 108585 Result: Up-regulated in Transcription
  misc_feature: MA Experiment 108585 PARAMETER Experiment Name: At_5mM_NaNP_cDNA_P Parameter: Timepoint (hr) Value: 6
  misc_feature: MA Experiment 108585 PARAMETER Experiment Name: At_5mM_NaNP_cDNA_P Parameter: Tissue Value: Aerial
  misc_feature: MA Experiment 108585 PARAMETER Experiment Name: At_5mM_NaNP_cDNA_P Parameter: Treatment Value: null
  misc_feature: MA Experiment ID: 108594 Result: Down-regulated in Transcription
  misc_feature: MA Experiment 108594 PARAMETER Experiment Name: At_Ler-rhl_Root_cDNA_P Parameter: Plant Line Value: null
  misc_feature: MA Experiment ID: 108668 Result: Up-regulated in Transcription
  misc_feature: MA Experiment 108668 PARAMETER Experiment Name: At_2mM_SA_cDNA_P Parameter: Plant Line Value: WS
  misc_feature: MA Experiment 108668 PARAMETER Experiment Name: At_2mM_SA_cDNA_P Parameter: Timepoint (hr) Value: 6
  misc_feature: MA Experiment 108668 PARAMETER Experiment Name: At_2mM_SA_cDNA_P Parameter: Treatment Value: 2mM SA vs. No Treatment
  misc_feature: MA Experiment ID: 20000070 Result: Up-regulated in Transcription
  misc_feature: MA Experiment 20000070 PARAMETER Experiment Name: At_100uM_ABA_Mutants_cDNA_P Parameter: Plant Line Value: CS24
  misc_feature: MA Experiment 20000070 PARAMETER Experiment Name: At_100uM_ABA_Mutants_cDNA_P Parameter: Timepoint (hr) Value: 6
  misc_feature: MA Experiment 20000070 PARAMETER Experiment Name: At_100uM_ABA_Mutants_cDNA_P Parameter: Tissue Value: Aerial
  misc_feature: MA Experiment 20000070 PARAMETER Experiment Name: At_100uM_ABA_Mutants_cDNA_P Parameter: Treatment Value: 100uM ABA vs. No Treatment
  misc_feature: MA Experiment ID: 20000088 Result: Up-regulated in Transcription
  misc_feature: MA Experiment 20000088 PARAMETER Experiment Name: At_100uM_ABA_Mutants_cDNA_P Parameter: Plant Line Value: Landsberg
  misc_feature: MA Experiment 20000088 PARAMETER Experiment Name: At_100uM_ABA_Mutants_cDNA_P Parameter: Timepoint (hr) Value: 6
  misc_feature: MA Experiment 20000088 PARAMETER Experiment Name: At_100uM_ABA_Mutants_cDNA_P Parameter: Tissue Value: Aerial
  misc_feature: MA Experiment 20000088 PARAMETER Experiment Name: At_100uM_ABA_Mutants_cDNA_P Parameter: Treatment Value: 100uM ABA vs. No Treatment
  misc_feature: MA Experiment ID: 20000090 Result: Up-regulated in Transcription
  misc_feature: MA Experiment ID: 20000307 Result: Down-regulated in Transcription
  misc_feature: MA Experiment 20000307 PARAMETER Experiment Name: At_Germinating_Seeds_Sub_P Parameter: Age (hr) Value: 24 vs. 0
  misc_feature: MA Experiment 20000307 PARAMETER Experiment Name: At_Germinating_Seeds_Sub_P Parameter: Organism Value: A. thaliana
  misc_feature: MA Experiment 20000307 PARAMETER Experiment Name: At_Germinating_Seeds_Sub_P Parameter: Plant Line Value: WS
  misc_feature: MA Experiment 20000307 PARAMETER Experiment Name: At_Germinating_Seeds_Sub_P Parameter: Tissue Value: Germinating Seeds
  misc_feature: MA Experiment ID: 20000347 Result: Up-regulated in Transcription
  misc_feature: MA Experiment 20000347 PARAMETER Experiment Name: At_2mM_SA_Sub_P Parameter: Age (day) Value: 14
  misc_feature: MA Experiment 20000347 PARAMETER Experiment Name: At_2mM_SA_Sub_P Parameter: Organism Value: A. thaliana
  misc_feature: MA Experiment 20000347 PARAMETER Experiment Name: At_2mM_SA_Sub_P Parameter: Plant Line Value: WS
  misc_feature: MA Experiment 20000347 PARAMETER Experiment Name: At_2mM_SA_Sub_P Parameter: Timepoint (hr) Value: 6
  misc_feature: MA Experiment 20000347 PARAMETER Experiment Name: At_2mM_SA_Sub_P Parameter: Tissue Value: Aerial
  misc_feature: MA Experiment 20000347 PARAMETER Experiment Name: At_2mM_SA_Sub_P Parameter: Treatment Value: 2mM SA vs. No Treatment
  misc_feature: MA Experiment ID: 20000355 Result: Down-regulated in Transcription
  misc_feature: MA Experiment 20000355 PARAMETER Experiment Name: At_Siliques_Sub_P Parameter: Age (day) Value: 21
  misc_feature: MA Experiment 20000355 PARAMETER Experiment Name: At_Siliques_Sub_P Parameter: Organism Value: A. thaliana
  misc_feature: MA Experiment 20000355 PARAMETER Experiment Name: At_Siliques_Sub_P Parameter: Plant Line Value: WS
  misc_feature: MA Experiment 20000355 PARAMETER Experiment Name: At_Siliques_Sub_P Parameter: Tissue Value: Less Than 5mm Siliques vs. Whole Plant
  misc_feature: MA Experiment ID: 20000440 Result: Down-regulated in Transcription
  misc_feature: MA Experiment 20000440 PARAMETER Experiment Name: At_Closed-Flower__Sub_P Parameter: Tissue Value: Closed Flower vs. Whole Plant
aaagtttggatatttattgaaccgagtggtttctttcgttgactcgcccaccatggaagctgaaagtacccaagatatcatcatcgtcggagctggaatctccggccttgccactgcacttgggctccacaggcttgggatcagaagcatagtgctggaatcttctgagcagctgagagcaacaggatttgcactttcattatattttaatgcttggaaggccatggaagctctcggtatttctcagcatattcgcagtctcggtgatcgctttcaaggatgggtggtcagacccatttctgcaggagatcctcctaaagaaatgttatttccagaatctgaagaatatgaggttcgatgcgtacagaggaagctcttgttagacgctctagcgggcgaattgcctcaagggaccatacggttctcatctaagcttgttcacatcgaattgtccggacactacaagatggttcatctctccgacgggactatacttaaaaccaaggttttggtagggtgtgatggagtgaagtcagtggttggtaagtggctaggcttcaagaatccggttaaaacttcccgtgtagcaatccgcgggatcgctcatttccagacaggccacgaattagggagaaggttctttcagttttatggcaacggtgttcgttccggtttcatctcatgtgaccaaaacactgtctactggttcctaacccacacctctactgatttagataagaaaaatcatcagaagatcaaacagtttgtgctgaccaagatcaaagacttgcctgacaacatcaagagtatcctggagaccactgatcttgatagtttggtgatgaatccactcatgtatcgacctccctgggaacttctttgggcaaacattgcaaaagacaacgtatgtgttgcaggggatgcacttcacccaatgactcctgatattggacaaggtggttgctcggcgatggaggacggagttatcctcgctcgttgtctcggtgaagcaatgaaagctaagaatatgaaaggtgaaacagaagatgagaacgagagttataggcggattgaagatggtttgaagaagtatgcaggatcgaggaaatggagaagcattgatcttataactacatcatatacagtaggtttcatacagcagagcagaggcaagtggatgaccctgtttagagacaagttcatgtcctctttcctttcttggttgcgtgtgaaaaagtctcatttcaactgtggaagacttagccatgaatgattctcaatgagcaagcacaatgttag

SEQ ID NO: 105195 - protein, 423 aa, Arabidopsis thaliana
  peptide (1)..(423): Ceres Seq. ID no. 13616685
  misc_feature (166)..(380): Pfam Name: Monooxygenase Pfam Description: Monooxygenase
  misc_feature (18)..(423): Homolog of NCBI NO: 15239070 NR Description: monooxygenase 2 (MO2), putative [Arabidopsis >gi|10176744|dbj|BAB09975.1| monooxygenase [Arabidopsis thaliana]
  misc_feature (18)..(409): Homolog of NCBI NO: 21537119 NR Description: monooxygenase [Arabidopsis thaliana]
  misc_feature (18)..(420): Homolog of NCBI NO: 15233923 NR Description: monooxygenase 2 (MO2) [Arabidopsis thaliana]
  misc_feature (71)..(421): Homolog of NCBI NO: 24745927 NR Description: monooxygenase [Solanum tuberosum]
  misc_feature (279)..(420): Homolog of NCBI NO: 14335042 NR Description: AT4g38540/F20M13_100 [Arabidopsis thaliana]
  misc_feature (93)..(417): Homolog of NCBI NO: 25408403 NR Description: probable monooxygenase [imported] - Arabidopsis
  misc_feature (10)..(99): Homolog of NCBI NO: 25408403 NR Description: probable monooxygenase [imported] - Arabidopsis
  misc_feature (10)..(417): Homolog of NCBI NO: 4164576 NR Description: CTF2A [Arabidopsis thaliana]
  misc_feature (10)..(417): Homolog of NCBI NO: 25453534 NR Description: CTF2A protein [imported] - Arabidopsis thaliana
  misc_feature (10)..(417): Homolog of NCBI NO: 18403916 NR Description: monooxygenase family [Arabidopsis thaliana]
KFGYLLNRVVSFVDSPTMEAESTQDIIIVGAGISGLATALGLHRLGIRSIVLESSEQLRATGFALSLYFNAWKAMEALGISQHIRSLGDRFQGWVVRPISAGDPPKEMLFPESEEYEVRCVQRKLLLDALAGELPQGTIRFSSKLVHIELSGHYKMVHLSDGTILKTKVLVGCDGVKSVVGKWLGFKNPVKTSRVAIRGIAHFQTGHELGRRFFQFYGNGVRSGFISCDQNTVYWFLTHTSTDLDKKNHQKIKQFVLTKIKDLPDNIKSILETTDLDSLVMNPLMYRPPWELLWANIAKDNVCVAGDALHPMTPDIGQGGCSAMEDGVILARCLGEAMKAKNMKGETEDENESYRRIEDGLKKYAGSRKWRSIDLITTSYTVGFIQQSRGKWMTLFRDKFMSSFLSWLRVKKSHFNCGRLSHE

SEQ ID NO: 105196 - protein, 406 aa, Arabidopsis thaliana
  peptide (1)..(406): Ceres Seq. ID no. 13616686
  misc_feature (149)..(363): Pfam Name: Monooxygenase Pfam Description: Monooxygenase
  misc_feature (1)..(406): Homolog of NCBI NO: 15239070 NR Description: monooxygenase 2 (MO2), putative [Arabidopsis >gi|10176744|dbj|BAB09975.1| monooxygenase [Arabidopsis thaliana]
  misc_feature (1)..(392): Homolog of NCBI NO: 21537119 NR Description: monooxygenase [Arabidopsis thaliana]
  misc_feature (1)..(403): Homolog of NCBI NO: 15233923 NR Description: monooxygenase 2 (MO2) [Arabidopsis thaliana]
  misc_feature (54)..(404): Homolog of NCBI NO: 24745927 NR Description: monooxygenase [Solanum tuberosum]
  misc_feature (262)..(403): Homolog of NCBI NO: 14335042 NR Description: AT4g38540/F20M13_100 [Arabidopsis thaliana]
  misc_feature (76)..(400): Homolog of NCBI NO: 25408403 NR Description: probable monooxygenase [imported] - Arabidopsis
  misc_feature (1)..(82): Homolog of NCBI NO: 25408403 NR Description: probable monooxygenase [imported] - Arabidopsis
  misc_feature (1)..(400): Homolog of NCBI NO: 4164576 NR Description: CTF2A [Arabidopsis thaliana]
  misc_feature (1)..(400): Homolog of NCBI NO: 25453534 NR Description: CTF2A protein [imported] - Arabidopsis thaliana
  misc_feature (1)..(400): Homolog of NCBI NO: 18403916 NR Description: monooxygenase family [Arabidopsis thaliana]
MEAESTQDIIIVGAGISGLATALGLHRLGIRSIVLESSEQLRATGFALSLYFNAWKAMEALGISQHIRSLGDRFQGWVVRPISAGDPPKEMLFPESEEYEVRCVQRKLLLDALAGELPQGTIRFSSKLVHIELSGHYKMVHLSDGTILKTKVLVGCDGVKSVVGKWLGFKNPVKTSRVAIRGIAHFQTGHELGRRFFQFYGNGVRSGFISCDQNTVYWFLTHTSTDLDKKNHQKIKQFVLTKIKDLPDNIKSILETTDLDSLVMNPLMYRPPWELLWANIAKDNVCVAGDALHPMTPDIGQGGCSAMEDGVILARCLGEAMKAKNMKGETEDENESYRRIEDGLKKYAGSRKWRSIDLITTSYTVGFIQQSRGKWMTLFRDKFMSSFLSWLRVKKSHFNCGRLSHE

SEQ ID NO: 105197 - protein, 349 aa, Arabidopsis thaliana
  peptide (1)..(349): Ceres Seq. ID no. 13616687
  misc_feature (92)..(306): Pfam Name: Monooxygenase Pfam Description: Monooxygenase
  misc_feature (1)..(349): Homolog of NCBI NO: 15239070 NR Description: monooxygenase 2 (MO2), putative [Arabidopsis >gi|10176744|dbj|BAB09975.1| monooxygenase [Arabidopsis thaliana]
  misc_feature (1)..(335): Homolog of NCBI NO: 21537119 NR Description: monooxygenase [Arabidopsis thaliana]
  misc_feature (1)..(346): Homolog of NCBI NO: 15233923 NR Description: monooxygenase 2 (MO2) [Arabidopsis thaliana]
  misc_feature (1)..(347): Homolog of NCBI NO: 24745927 NR Description: monooxygenase [Solanum tuberosum]
  misc_feature (205)..(346): Homolog of NCBI NO: 14335042 NR Description: AT4g38540/F20M13_100 [Arabidopsis thaliana]
  misc_feature (19)..(343): Homolog of NCBI NO: 25408403 NR Description: probable monooxygenase [imported] - Arabidopsis
  misc_feature (1)..(25): Homolog of NCBI NO: 25408403 NR Description: probable monooxygenase [imported] - Arabidopsis
  misc_feature (1)..(343): Homolog of NCBI NO: 4164576 NR Description: CTF2A [Arabidopsis thaliana]
  misc_feature (1)..(343): Homolog of NCBI NO: 25453534 NR Description: CTF2A protein [imported] - Arabidopsis thaliana
  misc_feature (1)..(343): Homolog of NCBI NO: 18403916 NR Description: monooxygenase family [Arabidopsis thaliana]
MEALGISQHIRSLGDRFQGWVVRPISAGDPPKEMLFPESEEYEVRCVQRKLLLDALAGELPQGTIRFSSKLVHIELSGHYKMVHLSDGTILKTKVLVGCDGVKSVVGKWLGFKNPVKTSRVAIRGIAHFQTGHELGRRFFQFYGNGVRSGFISCDQNTVYWFLTHTSTDLDKKNHQKIKQFVLTKIKDLPDNIKSILETTDLDSLVMNPLMYRPPWELLWANIAKDNVCVAGDALHPMTPDIGQGGCSAMEDGVILARCLGEAMKAKNMKGETEDENESYRRIEDGLKKYAGSRKWRSIDLITTSYTVGFIQQSRGKWMTLFRDKFMSSFLSWLRVKKSHFNCGRLSHE

SEQ ID NO: 105198 - DNA, 2010 bp, Arabidopsis thaliana
  misc_feature (1)..(2010): Ceres Seq. ID no. 13616688
  misc_feature: MA Experiment ID: 108461 Result: Down-regulated in Transcription
  misc_feature: MA Experiment 108461 PARAMETER Experiment Name: At_Germinating_Seeds_cDNA_P Parameter: Age (day) Value: 1 vs. 0
  misc_feature: MA Experiment 108461 PARAMETER Experiment Name: At_Germinating_Seeds_cDNA_P Parameter: Tissue Value: Germinating Seeds
  misc_feature: MA Experiment ID: 108462 Result: Down-regulated in Transcription
  misc_feature: MA Experiment 108462 PARAMETER Experiment Name: At_Germinating_Seeds_cDNA_P Parameter: Age (day) Value: 2 vs. 0
  misc_feature: MA Experiment 108462 PARAMETER Experiment Name: At_Germinating_Seeds_cDNA_P Parameter: Tissue Value: Germinating Seeds
  misc_feature: MA Experiment ID: 108463 Result: Down-regulated in Transcription
  misc_feature: MA Experiment 108463 PARAMETER Experiment Name: At_Germinating_Seeds_cDNA_P Parameter: Age (day) Value: 3 vs. 0
  misc_feature: MA Experiment 108463 PARAMETER Experiment Name: At_Germinating_Seeds_cDNA_P Parameter: Tissue Value: Germinating Seeds
  misc_feature: MA Experiment ID: 108464 Result: Down-regulated in Transcription
  misc_feature: MA Experiment 108464 PARAMETER Experiment Name: At_Germinating_Seeds_cDNA_P Parameter: Age (day) Value: 4 vs. 0
  misc_feature: MA Experiment 108464 PARAMETER Experiment Name: At_Germinating_Seeds_cDNA_P Parameter: Tissue Value: Germinating Seeds
  misc_feature: MA Experiment ID: 108594 Result: Up-regulated in Transcription
  misc_feature: MA Experiment 108594 PARAMETER Experiment Name: At_Ler-rhl_Root_cDNA_P Parameter: Plant Line Value: null
  misc_feature: MA Experiment ID: 20000111 Result: Up-regulated in Transcription
  misc_feature: MA Experiment 20000111 PARAMETER Experiment Name: At_42deg_Heat_cDNA_P Parameter: Temperature (deg C) Value: 42 vs. 22
  misc_feature: MA Experiment 20000111 PARAMETER Experiment Name: At_42deg_Heat_cDNA_P Parameter: Timepoint (hr) Value: 6
  misc_feature: MA Experiment 20000111 PARAMETER Experiment Name: At_42deg_Heat_cDNA_P Parameter: Tissue Value: Aerial
  misc_feature: MA Experiment ID: 20000227 Result: Up-regulated in Transcription
  misc_feature: MA Experiment 20000227 PARAMETER Experiment Name: At_Root-Tips-vs-Tops_P Parameter: Tissue Value: Root Tips vs. Root Tops
  misc_feature: MA Experiment ID: 20000495 Result: Up-regulated in Transcription
  misc_feature: MA Experiment 20000495 PARAMETER Experiment Name: At_Guard_Cells_P Parameter: Harvest Date Value: 8/2/2002
  misc_feature: MA Experiment 20000495 PARAMETER Experiment Name: At_Guard_Cells_P Parameter: Organism Value: A. thaliana
  misc_feature: MA Experiment 20000495 PARAMETER Experiment Name: At_Guard_Cells_P Parameter: Tissue Value: Guard Cells vs. Leaves
  misc_feature: MA Experiment ID: 20001451 Result: Up-regulated in Transcription
  misc_feature: MA Experiment 20001451 PARAMETER Experiment Name: At_Far-red-induction_P Parameter: Age (day) Value: 7
  misc_feature: MA Experiment 20001451 PARAMETER Experiment Name: At_Far-red-induction_P Parameter: Light Value: Far-red vs. White
  misc_feature: MA Experiment 20001451 PARAMETER Experiment Name: At_Far-red-induction_P Parameter: Organism Value: A. thaliana
  misc_feature: MA Experiment 20001451 PARAMETER Experiment Name: At_Far-red-induction_P Parameter: Plant Line Value: Columbia
  misc_feature: MA Experiment 20001451 PARAMETER Experiment Name: At_Far-red-induction_P Parameter: Timepoint (hr) Value: 24
  misc_feature: MA Experiment 20001451 PARAMETER Experiment Name: At_Far-red-induction_P Parameter: Tissue Value: Whole Plant
atgccgtcattgcaaggttactgcaaggttaaagcgggaagtgagcaacgagaggcagcggcggccgtcatggattcatcggcgaacataaacaaagctctaacggagacgcgtttctccgacctcgaacctccactctccggagatatcattgaggctcttaatcagtctgatttcgagttctgcactccggttcaagccgcgacgatccctttactctgtagttacaaggatgttgccgtcgacgctgccactggttctggaaaaaccctagctttcgtcgttcccctcgtagaaatcctccgtcgatccacctcattccctccgaagcctcaccaggtcatgggggtgattatatcgccaacgagagagctatcaacgcagatatataatgtcgcacaaccatttgtttcgactttggcaaatgtgaactctgtgttgcttgttggaggccgagaggtgaaagctgacatgaagattattgaagaagaaggatgcaatgtcttgattggtacacctggaagactttctgatattatggaacgaatggagattctggattttcgaaatcttgagattcttattctagatgaggcagataggcttttggagatggggttccaaaggcaggtgaattacattatctcacgcttgccaaagcagaggaggactggcctcttttcagctacacaaacagagggcgttgaagagctcgccaaggctgggcttaggaaccctgtgagagttgaagttcgagctaagtcgaagtcggaatcatcccagcaattgacaaactcgaaaaccccttctggtcttcatcttgagtatatggaatgcgaagcagataaaaaatcatcacaactagttgatctcctcatcaagaacagtgataaaaagcttatagtattcttcatgacctgtgcttctgttgactactggggactcgtactttcaaaaattcctgccctgaagtccatatctttaattcctatccatggggatatgaagcagaatgcaagagacaaggcattagcttcgtttactaaagcatcaagtggtgcccttctgtgcacagacgttgctgcacgtggacttgatattccaggcattgattatgttgttcagtatgatcccccacaagacccaaatatgttcaaccacagggccggcagaactgcaagattaggaagacaagggagggccattgtgtttttactgcccaaggaagaagcctatgtagagtttatgcgcataagaagagtccctttggaagagagaaaatgctctgaggacgcatccgatgtcatcccgattatacgttcagctgccatgaaggaccgagcagtgatggagaagggattaaaggcatttgtttcctttgtccgtgcttataaggagcatcactgctctttcattttcagatggaaagaccttgagattggaaagttagccatgggatatggcctcttgtatcttccttcaatgtctgaagttaaacaacacagactttccagtgagggtttcacaccagttgaaggtgtcaagtttgaagaaataaaattcaaggacaaatatcgggagaaacaaagacagcaaaacttacaagtaaggaaagagaaacggcaagaagagaaaaaagagaaaggcaagagaaaaagggttgatgcttctgctagtaatgatcctaagaaagcgtcgagaaagttaacggggaaacaaagacaaactattcaaactgctgaagatgaagaagtgatggatcgagattataagttgatgataaaagtaaagaaagggttaattaaagaagatgaatatgaaagacttacaggagatgatgatttattctgatgagaagaaacaaaacctgcatgctgagattggactaagcttagtgtctttctactctcatatcatatgtgattctgttaatttttttttttttttttgggtgagaattaatatcggatcatgttatgtcctttttcgttctacgagtctcacttttat

SEQ ID NO: 105199 - protein, 616 aa, Arabidopsis thaliana
  peptide (1)..(616): Ceres Seq. ID no. 13616689
  misc_feature (52)..(275): Pfam Name: DEAD/DEAH box helicase Pfam Description: DEAD/DEAH box helicase
  misc_feature (24)..(616): Homolog of NCBI NO: 15239115 NR Description: DEAD/DEAH box helicase, putative [Arabidopsis
  misc_feature (24)..(587): Homolog of NCBI NO: 15217442 NR Description: DEAD/DEAH box helicase, putative [Arabidopsis
  misc_feature (24)..(587): Homolog of NCBI NO: 26451630 NR Description: putative ATP-dependent RNA helicase [Arabidopsis
  misc_feature (19)..(614): Homolog of NCBI NO: 34896098 NR Description: putative RNA helicase [Oryza sativa (japonica group)] >gi|15528747|dbj|BAB64789.1| putative RNA helicase [Oryza
  misc_feature (257)..(616): Homolog of NCBI NO: 11358800 NR Description: RNA helicase RH18 [imported] - Arabidopsis (fragment) >gi|3776011|emb|CAA09208.1| RNA helicase [Arabidopsis
  misc_feature (34)..(608): Homolog of NCBI NO: 20987604 NR Description: Similar to RIKEN cDNA 2810021H22 gene [Homo
  misc_feature (34)..(608): Homolog of NCBI NO: 26329441 NR Description: unnamed protein product [Mus musculus]
  misc_feature (34)..(608): Homolog of NCBI NO: 37543870 NR Description: similar to CG9630-PA [Homo sapiens]
  misc_feature (34)..(608): Homolog of NCBI NO: 28175486 NR Description: similar to RIKEN cDNA 2810021H22 gene [Mus
  misc_feature (34)..(563): Homolog of NCBI NO: 12849752 NR Description: unnamed protein product [Mus musculus]
MPSLQGYCKVKAGSEQREAAAAVMDSSANINKALTETRFSDLEPPLSGDIIEALNQSDFEFCTPVQAATIPLLCSYKDVAVDAATGSGKTLAFVVPLVEILRRSTSFPPKPHQVMGVIISPTRELSTQIYNVAQPFVSTLANVNSVLLVGGREVKADMKIIEEEGCNVLIGTPGRLSDIMERMEILDFRNLEILILDEADRLLEMGFQRQVNYIISRLPKQRRTGLFSATQTEGVEELAKAGLRNPVRVEVRAKSKSESSQQLTNSKTPSGLHLEYMECEADKKSSQLVDLLIKNSDKKLIVFFMTCASVDYWGLVLSKIPALKSISLIPIHGDMKQNARDKALASFTKASSGALLCTDVAARGLDIPGIDYVVQYDPPQDPNMFNHRAGRTARLGRQGRAIVFLLPKEEAYVEFMRIRRVPLEERKCSEDASDVIPIIRSAAMKDRAVMEKGLKAFVSFVRAYKEHHCSFIFRWKDLEIGKLAMGYGLLYLPSMSEVKQHRLSSEGFTPVEGVKFEEIKFKDKYREKQRQQNLQVRKEKRQEEKKEKGKRKRVDASASNDPKKASRKLTGKQRQTIQTAEDEEVMDRDYKLMIKVKKGLIKEDEYERLTGDDDLF

SEQ ID NO: 105200 - protein, 593 aa, Arabidopsis thaliana; identical to SEQ ID NO: 40741
  peptide (1)..(593): Ceres Seq. ID no. 13616690
  misc_feature (29)..(252): Pfam Name: DEAD/DEAH box helicase Pfam Description: DEAD/DEAH box helicase
  misc_feature (1)..(593): Homolog of NCBI NO: 15239115 NR Description: DEAD/DEAH box helicase, putative [Arabidopsis
  misc_feature (1)..(564): Homolog of NCBI NO: 15217442 NR Description: DEAD/DEAH box helicase, putative [Arabidopsis
  misc_feature (1)..(564): Homolog of NCBI NO: 26451630 NR Description: putative ATP-dependent RNA helicase [Arabidopsis
  misc_feature (1)..(591): Homolog of NCBI NO: 34896098 NR Description: putative RNA helicase [Oryza sativa (japonica group)] >gi|15528747|dbj|BAB64789.1| putative RNA helicase [Oryza
  misc_feature (234)..(593): Homolog of NCBI NO: 11358800 NR Description: RNA helicase RH18 [imported] - Arabidopsis (fragment) >gi|3776011|emb|CAA09208.1| RNA helicase [Arabidopsis
  misc_feature (11)..(585): Homolog of NCBI NO: 20987604 NR Description: Similar to RIKEN cDNA 2810021H22 gene [Homo
  misc_feature (11)..(585): Homolog of NCBI NO: 26329441 NR Description: unnamed protein product [Mus musculus]
  misc_feature (11)..(585): Homolog of NCBI NO: 37543870 NR Description: similar to CG9630-PA [Homo sapiens]
  misc_feature (11)..(585): Homolog of NCBI NO: 28175486 NR Description: similar to RIKEN cDNA 2810021H22 gene [Mus
  misc_feature (11)..(540): Homolog of NCBI NO: 12849752 NR Description: unnamed protein product [Mus musculus]

SEQ ID NO: 105201 - protein, 502 aa, Arabidopsis thaliana; identical to SEQ ID NO: 40742
  peptide (1)..(502): Ceres Seq. ID no. 13616691
  misc_feature (1)..(161): Pfam Name: DEAD/DEAH box helicase Pfam Description: DEAD/DEAH box helicase
  misc_feature (1)..(502): Homolog of NCBI NO: 15239115 NR Description: DEAD/DEAH box helicase, putative [Arabidopsis
  misc_feature (1)..(473): Homolog of NCBI NO: 15217442 NR Description: DEAD/DEAH box helicase, putative [Arabidopsis
  misc_feature (1)..(473): Homolog of NCBI NO: 26451630 NR Description: putative ATP-dependent RNA helicase [Arabidopsis
  misc_feature (1)..(500): Homolog of NCBI NO: 34896098 NR Description: putative RNA helicase [Oryza sativa (japonica group)] >gi|15528747|dbj|BAB64789.1| putative RNA helicase [Oryza
  misc_feature (143)..(502): Homolog of NCBI NO: 11358800 NR Description: RNA helicase RH18 [imported] - Arabidopsis (fragment) >gi|3776011|emb|CAA09208.1| RNA helicase [Arabidopsis
  misc_feature (1)..(494): Homolog of NCBI NO: 20987604 NR Description: Similar to RIKEN cDNA 2810021H22 gene [Homo
  misc_feature (1)..(494): Homolog of NCBI NO: 26329441 NR Description: unnamed protein product [Mus musculus]
  misc_feature (1)..(494): Homolog of NCBI NO: 37543870 NR Description: similar to CG9630-PA [Homo sapiens]
  misc_feature (1)..(494): Homolog of NCBI NO: 28175486 NR Description: similar to RIKEN cDNA 2810021H22 gene [Mus
  misc_feature (1)..(449): Homolog of NCBI NO: 12849752 NR Description: unnamed protein product [Mus musculus]

SEQ ID NO: 105202 - DNA, 1384 bp, Arabidopsis thaliana
  misc_feature (1)..(1384): Ceres Seq. ID no. 13616696
  misc_feature: MA Experiment ID: 108607 Result: Up-regulated in Transcription
  misc_feature: MA Experiment 108607 PARAMETER Experiment Name: At_100uM_ABA_cDNA_P Parameter: Timepoint (hr) Value: 4
  misc_feature: MA Experiment 108607 PARAMETER Experiment Name: At_100uM_ABA_cDNA_P Parameter: Tissue Value: Aerial
  misc_feature: MA Experiment 108607 PARAMETER Experiment Name: At_100uM_ABA_cDNA_P Parameter: Treatment Value: 100uM ABA vs. No Treatment
  misc_feature: MA Experiment ID: 20000069 Result: Up-regulated in Transcription
  misc_feature: MA Experiment 20000069 PARAMETER Experiment Name: At_100uM_ABA_Mutants_cDNA_P Parameter: Plant Line Value: CS23
  misc_feature: MA Experiment 20000069 PARAMETER Experiment Name: At_100uM_ABA_Mutants_cDNA_P Parameter: Timepoint (hr) Value: 6
  misc_feature: MA Experiment 20000069 PARAMETER Experiment Name: At_100uM_ABA_Mutants_cDNA_P Parameter: Tissue Value: Aerial
  misc_feature: MA Experiment 20000069 PARAMETER Experiment Name: At_100uM_ABA_Mutants_cDNA_P Parameter: Treatment Value: 100uM ABA vs. No Treatment
  misc_feature: MA Experiment ID: 20000070 Result: Up-regulated in Transcription
  misc_feature: MA Experiment 20000070 PARAMETER Experiment Name: At_100uM_ABA_Mutants_cDNA_P Parameter: Plant Line Value: CS24
  misc_feature: MA Experiment 20000070 PARAMETER Experiment Name: At_100uM_ABA_Mutants_cDNA_P Parameter: Timepoint (hr) Value: 6
  misc_feature: MA Experiment 20000070 PARAMETER Experiment Name: At_100uM_ABA_Mutants_cDNA_P Parameter: Tissue Value: Aerial
  misc_feature: MA Experiment 20000070 PARAMETER Experiment Name: At_100uM_ABA_Mutants_cDNA_P Parameter: Treatment Value: 100uM ABA vs. No Treatment
  misc_feature: MA Experiment ID: 20000071 Result: Up-regulated in Transcription
  misc_feature: MA Experiment 20000071 PARAMETER Experiment Name: At_100uM_ABA_Mutants_cDNA_P Parameter: Plant Line Value: CS8104
  misc_feature: MA Experiment 20000071 PARAMETER Experiment Name: At_100uM_ABA_Mutants_cDNA_P Parameter: Timepoint (hr) Value: 6
  misc_feature: MA Experiment 20000071 PARAMETER Experiment Name: At_100uM_ABA_Mutants_cDNA_P Parameter: Tissue Value: Aerial
  misc_feature: MA Experiment 20000071 PARAMETER Experiment Name: At_100uM_ABA_Mutants_cDNA_P Parameter: Treatment Value: 100uM ABA vs. No Treatment
  misc_feature: MA Experiment ID: 20000182 Result: Up-regulated in Transcription
  misc_feature: MA Experiment 20000182 PARAMETER Experiment Name: At_2mM_SA_P Parameter: Age (day) Value: 14
  misc_feature: MA Experiment 20000182 PARAMETER Experiment Name: At_2mM_SA_P Parameter: Organism Value: A. thaliana
  misc_feature: MA Experiment 20000182 PARAMETER Experiment Name: At_2mM_SA_P Parameter: Plant Line Value: WS
  misc_feature: MA Experiment 20000182 PARAMETER Experiment Name: At_2mM_SA_P Parameter: Timepoint (hr) Value: 6
  misc_feature: MA Experiment 20000182 PARAMETER Experiment Name: At_2mM_SA_P Parameter: Tissue Value: Aerial
  misc_feature: MA Experiment 20000182 PARAMETER Experiment Name: At_2mM_SA_P Parameter: Treatment Value: 2mM SA vs. No Treatment
  misc_feature: MA Experiment ID: 20000184 Result: Down-regulated in Transcription
  misc_feature: MA Experiment 20000184 PARAMETER Experiment Name: At_Shoots__P Parameter: Age (day) Value: 7
  misc_feature: MA Experiment 20000184 PARAMETER Experiment Name: At_Shoots__P Parameter: Tissue Value: Shoots vs. Whole Plant
  misc_feature: MA Experiment ID: 20000211 Result: Up-regulated in Transcription
  misc_feature: MA Experiment 20000211 PARAMETER Experiment Name: At_0.001percent_MeJA__P Parameter: Age (day) Value: 14
  misc_feature: MA Experiment 20000211 PARAMETER Experiment Name: At_0.001percent_MeJA__P Parameter: Organism Value: A. thaliana
  misc_feature: MA Experiment 20000211 PARAMETER Experiment Name: At_0.001percent_MeJA__P Parameter: Plant Line Value: WS
  misc_feature: MA Experiment 20000211 PARAMETER Experiment Name: At_0.001percent_MeJA__P Parameter: Timepoint (hr) Value: 1
  misc_feature: MA Experiment 20000211 PARAMETER Experiment Name: At_0.001percent_MeJA__P Parameter: Tissue Value: Aerial
  misc_feature: MA Experiment 20000211 PARAMETER Experiment Name: At_0.001percent_MeJA__P Parameter: Treatment Value: 0.001percent MeJA vs. No Treatment
  misc_feature: MA Experiment ID: 20000234 Result: Down-regulated in Transcription
  misc_feature: MA Experiment 20000234 PARAMETER Experiment Name: At_Siliques_P Parameter: Age (day) Value: 21
  misc_feature: MA Experiment 20000234 PARAMETER Experiment Name: At_Siliques_P Parameter: Organism Value: A. thaliana
  misc_feature: MA Experiment 20000234 PARAMETER Experiment Name: At_Siliques_P Parameter: Plant Line Value: WS
  misc_feature: MA Experiment 20000234 PARAMETER Experiment Name: At_Siliques_P Parameter: Tissue Value: Less Than 5mm Siliques vs. Whole Plant
  misc_feature: MA Experiment ID: 20000438 Result: Down-regulated in Transcription
  misc_feature: MA Experiment 20000438 PARAMETER Experiment Name: At_Shoots__P Parameter: Age (day) Value: 14
  misc_feature: MA Experiment 20000438 PARAMETER Experiment Name: At_Shoots__P Parameter: Tissue Value: Shoots vs. Whole Plant
  misc_feature: MA Experiment ID: 20000453 Result: Up-regulated in Transcription
  misc_feature: MA Experiment 20000453 PARAMETER Experiment Name: At_100uM_ABA_P Parameter: Age (day) Value: 15
  misc_feature: MA Experiment 20000453 PARAMETER Experiment Name: At_100uM_ABA_P Parameter: Organism Value: A. thaliana
  misc_feature: MA Experiment 20000453 PARAMETER Experiment Name: At_100uM_ABA_P Parameter: Plant Line Value: WS
  misc_feature: MA Experiment 20000453 PARAMETER Experiment Name: At_100uM_ABA_P Parameter: Timepoint (hr) Value: 24
  misc_feature: MA Experiment 20000453 PARAMETER Experiment Name: At_100uM_ABA_P Parameter: Tissue Value: Aerial
  misc_feature: MA Experiment 20000453 PARAMETER Experiment Name: At_100uM_ABA_P Parameter: Treatment Value: 100uM ABA vs. No Treatment
  misc_feature: MA Experiment ID: 20000495 Result: Down-regulated in Transcription
  misc_feature: MA Experiment 20000495 PARAMETER Experiment Name: At_Guard_Cells_P Parameter: Harvest Date Value: 8/2/2002
  misc_feature: MA Experiment 20000495 PARAMETER Experiment Name: At_Guard_Cells_P Parameter: Organism Value: A. thaliana
  misc_feature: MA Experiment 20000495 PARAMETER Experiment Name: At_Guard_Cells_P Parameter: Tissue Value: Guard Cells vs. Leaves
  misc_feature: MA Experiment ID: 20000496 Result: Down-regulated in Transcription
  misc_feature: MA Experiment 20000496 PARAMETER Experiment Name: At_Guard_Cells_P Parameter: Harvest Date Value: 7/19/2002
  misc_feature: MA Experiment 20000496 PARAMETER Experiment Name: At_Guard_Cells_P Parameter: Organism Value: Canola
  misc_feature: MA Experiment 20000496 PARAMETER Experiment Name: At_Guard_Cells_P Parameter: Tissue Value: Guard Cells vs. Leaves
  misc_feature: MA Experiment ID: 20000506 Result: Up-regulated in Transcription
  misc_feature: MA Experiment 20000506 PARAMETER Experiment Name: At_Wounding_P Parameter: Organism Value: A. thaliana
  misc_feature: MA Experiment 20000506 PARAMETER Experiment Name: At_Wounding_P Parameter: Plant Line Value: WS
  misc_feature: MA Experiment 20000506 PARAMETER Experiment Name: At_Wounding_P Parameter: Timepoint (hr) Value: 6
  misc_feature: MA Experiment 20000506 PARAMETER Experiment Name: At_Wounding_P Parameter: Tissue Value: Aerial
  misc_feature: MA Experiment 20000506 PARAMETER Experiment Name: At_Wounding_P Parameter: Treatment Value: Wounding vs. No Wounding
  misc_feature: MA Experiment ID: 20000573 Result: Up-regulated in Transcription
  misc_feature: MA Experiment 20000573 PARAMETER Experiment Name: At_100uM_ABA_Mutants__P Parameter: Organism Value: A. thaliana
  misc_feature: MA Experiment 20000573 PARAMETER Experiment Name: At_100uM_ABA_Mutants__P Parameter: Plant Line Value: CS22 vs. Ler wt
  misc_feature: MA Experiment 20000573 PARAMETER Experiment Name: At_100uM_ABA_Mutants__P Parameter: Timepoint (hr) Value: N/A
  misc_feature: MA Experiment 20000573 PARAMETER Experiment Name: At_100uM_ABA_Mutants__P Parameter: Tissue Value: Whole Plant
  misc_feature: MA Experiment 20000573 PARAMETER Experiment Name: At_100uM_ABA_Mutants__P Parameter: Treatment Value: None
  misc_feature: MA Experiment ID: 20000574 Result: Up-regulated in Transcription
  misc_feature: MA Experiment 20000574 PARAMETER Experiment Name: At_100uM_ABA_Mutants__P Parameter: Organism Value: A. thaliana
  misc_feature: MA Experiment 20000574 PARAMETER Experiment Name: At_100uM_ABA_Mutants__P Parameter: Plant Line Value: CS23 vs. Ler wt
  misc_feature: MA Experiment 20000574 PARAMETER Experiment Name: At_100uM_ABA_Mutants__P Parameter: Timepoint (hr) Value: N/A
  misc_feature: MA Experiment 20000574 PARAMETER Experiment Name: At_100uM_ABA_Mutants__P Parameter: Tissue Value: Whole Plant
  misc_feature: MA Experiment 20000574 PARAMETER Experiment Name: At_100uM_ABA_Mutants__P Parameter: Treatment Value: None
  misc_feature: MA Experiment ID: 20000576 Result: Down-regulated in Transcription
  misc_feature: MA Experiment 20000576 PARAMETER Experiment Name: At_100uM_ABA_Mutants__P Parameter: Organism Value: A. thaliana
  misc_feature: MA Experiment 20000576 PARAMETER Experiment Name: At_100uM_ABA_Mutants__P Parameter: Plant Line Value: CS23
  misc_feature: MA Experiment 20000576 PARAMETER Experiment Name: At_100uM_ABA_Mutants__P Parameter: Timepoint (hr) Value: 6
  misc_feature: MA Experiment 20000576 PARAMETER Experiment Name: At_100uM_ABA_Mutants__P Parameter: Tissue Value: Whole Plant
  misc_feature: MA Experiment 20000576 PARAMETER Experiment Name: At_100uM_ABA_Mutants__P Parameter: Treatment Value: 1uM ABA vs. No Treatment
  misc_feature: MA Experiment ID: 20000606 Result: Up-regulated in Transcription
  misc_feature: MA Experiment 20000606 PARAMETER Experiment Name: At_CS8548_Mutant_P Parameter: Age (day) Value: 14
  misc_feature: MA Experiment 20000606 PARAMETER Experiment Name: At_CS8548_Mutant_P Parameter: Plant Line Value: CS8548 vs. wt
  misc_feature: MA Experiment 20000606 PARAMETER Experiment Name: At_CS8548_Mutant_P Parameter: Tissue Value: Whole Plant
  misc_feature: MA Experiment ID: 20000709 Result: Up-regulated in Transcription
  misc_feature: MA Experiment 20000709 PARAMETER Experiment Name: At_15mM_NH4NO3_L-to-H_P Parameter: Age (hr) Value: 14
  misc_feature: MA Experiment 20000709 PARAMETER Experiment Name: At_15mM_NH4NO3_L-to-H_P Parameter: Organism Value: A. thaliana
  misc_feature: MA Experiment 20000709 PARAMETER Experiment Name: At_15mM_NH4NO3_L-to-H_P Parameter: Plant Line Value: WS
  misc_feature: MA Experiment 20000709 PARAMETER Experiment Name: At_15mM_NH4NO3_L-to-H_P Parameter: Timepoint (hr) Value: 4
  misc_feature: MA Experiment 20000709 PARAMETER Experiment Name: At_15mM_NH4NO3_L-to-H_P Parameter: Tissue Value: Aerial
  misc_feature: MA Experiment 20000709 PARAMETER Experiment Name: At_15mM_NH4NO3_L-to-H_P Parameter: Treatment Value: 15mM NH4NO3 vs. 30mM Mannitol
  misc_feature: MA Experiment ID: 20001450 Result: Down-regulated in Transcription
  misc_feature: MA Experiment 20001450 PARAMETER Experiment Name: At_Far-red-induction_P Parameter: Age (day) Value: 7
  misc_feature: MA Experiment 20001450 PARAMETER Experiment Name: At_Far-red-induction_P Parameter: Light Value: Far-red vs. White
  misc_feature: MA Experiment 20001450 PARAMETER Experiment Name: At_Far-red-induction_P Parameter: Organism Value: A. thaliana
  misc_feature: MA Experiment 20001450 PARAMETER Experiment Name: At_Far-red-induction_P Parameter: Plant Line Value: Columbia
  misc_feature: MA Experiment 20001450 PARAMETER Experiment Name: At_Far-red-induction_P Parameter: Timepoint (hr) Value: 8
  misc_feature: MA Experiment 20001450 PARAMETER Experiment Name: At_Far-red-induction_P Parameter: Tissue Value: Whole Plant
  misc_feature: MA Experiment ID: 20001451 Result: Down-regulated in Transcription
  misc_feature: MA Experiment 20001451 PARAMETER Experiment Name: At_Far-red-induction_P Parameter: Age (day) Value: 7
  misc_feature: MA Experiment 20001451 PARAMETER Experiment Name: At_Far-red-induction_P Parameter: Light Value: Far-red vs. White
  misc_feature: MA Experiment 20001451 PARAMETER Experiment Name: At_Far-red-induction_P Parameter: Organism Value: A. thaliana
  misc_feature: MA Experiment 20001451 PARAMETER Experiment Name: At_Far-red-induction_P Parameter: Plant Line Value: Columbia
  misc_feature: MA Experiment 20001451 PARAMETER Experiment Name: At_Far-red-induction_P Parameter: Timepoint (hr) Value: 24
  misc_feature: MA Experiment 20001451 PARAMETER Experiment Name: At_Far-red-induction_P Parameter: Tissue Value: Whole Plant
agccgatttctagattctcctccaccaccattttacccttcttttaaattccttccttcaatcaaaattagaattatttctcaaacctcttctttatatactaaaacgtctcacatgaacaagaagaataaatagaaacaaagaagatgaacaagaacaagattgatgttaagatcgagacgaagaaaggatcgatggatgagtggcctgagccaatcgtccgagtccagtccttagccgagagcaacctctcctctctccccgaccgttacatcaaaccagcgtctctacgccccaccacgaccgaagacgctcctaccgcgaccaacatcccaatcatagaccttgaaggactcttctcggaagaagggttgtctgatgacgtcatcatggctcggatatcggaggcttgccgtgggtgggggttcttccaggtggtgaaccacggggtcaaaccggagctgatggacgcggctagggagaattggagagagtttttccatatgccggttaatgccaaagagacttactcaaactcaccaagaacctacgaaggctatggaagtagactaggtgttgagaaaggagcaagtcttgattggagtgattattactttctccatcttcttcctcatcatttgaaagacttcaacaagtggccttcttttcctcccaccataagagaagtgatcgatgaatacggcgaagagctagtgaagctaagtgggagaattatgagggtattatcgacaaacttgggactaaaagaggataagtttcaagaagcatttggaggtgaaaacattggggcgtgtttgagggttaattattacccaaaatgccctcgaccggagctggctcttggtctctctccacactccgatcctggcggtatgaccattctcttaccggacgatcaagtcttcggtctccaggttcgtaaagatgacacgtggatcaccgtcaagcctcatccccatgctttcatcgtcaatattggtgatcaaatacagatactaagcaactcaacatacaagagtgtggagcatagagtgatagtgaactcggacaaggagagagtttcacttgccttcttctacaatcctaaaagcgatattccgatccaaccattacaagaacttgtatcaactcataatcctcctttataccctcccatgacctttgatcagtatagactctttatcagaactcaaggtccacaaggcaaatcccatgttgaatctcatatttctcctcgttgattgtttttcttttatttcttcccttaaagaaaaattaatgttttgttatttttatgatattacgtctgacttgtatatgtgtacaatcatttatattttgaattttcaaaggatgatttgcc

SEQ ID NO: 105203 - protein, 371 aa, Arabidopsis thaliana; identical to SEQ ID NO: 29095
  peptide (1)..(371): Ceres Seq. ID no. 13616697
  misc_feature (220)..(320): Pfam Name: 2OG-Fe(II) oxygenase superfamily Pfam Description: 2OG-Fe(II) oxygenase superfamily
  misc_feature (1)..(371): Homolog of NCBI NO: 15239179 NR Description: oxidoreductase, 2OG-Fe(II) oxygenase family
  misc_feature (17)..(371): Homolog of NCBI NO: 21537324 NR Description: leucoanthocyanidin dioxygenase-like protein
  misc_feature (1)..(371): Homolog of NCBI NO: 15229694 NR Description: oxidoreductase, 2OG-Fe(II) oxygenase family thaliana] >gi|6016680|gb|AAF01507.1|AC009991_3 putative dioxygenase [Arabidopsis thaliana]
  misc_feature (19)..(371): Homolog of NCBI NO: 15228785 NR Description: oxidoreductase, 2OG-Fe(II) oxygenase family
  misc_feature (17)..(294): Homolog of NCBI NO: 34907994 NR Description: leucoanthocyanidin dioxygenase-like protein
  misc_feature (286)..(366): Homolog of NCBI NO: 34907994 NR Description: leucoanthocyanidin dioxygenase-like protein
  misc_feature (20)..(371): Homolog of NCBI NO: 15224472 NR Description: oxidoreductase, 2OG-Fe(II) oxygenase family
  misc_feature (20)..(371): Homolog of NCBI NO: 21554535 NR Description: putative anthocyanidin synthase [Arabidopsis
  misc_feature (27)..(365): Homolog of NCBI NO: 18402992 NR Description: oxidoreductase, 2OG-Fe(II) oxygenase family thaliana] >gi|9294689|dbj|BAB03055.1| gene_id:MHC9.10~similar to
  misc_feature (23)..(357): Homolog of NCBI NO: 2116599 NR Description: leucoanthocyanidin dioxygenase [Perilla

SEQ ID NO: 105204 - protein, 355 aa, Arabidopsis thaliana; identical to SEQ ID NO: 29096
  peptide (1)..(355): Ceres Seq. ID no. 13616698
  misc_feature (204)..(304): Pfam Name: 2OG-Fe(II) oxygenase superfamily Pfam Description: 2OG-Fe(II) oxygenase superfamily
  misc_feature (1)..(355): Homolog of NCBI NO: 15239179 NR Description: oxidoreductase, 2OG-Fe(II) oxygenase family
  misc_feature (1)..(355): Homolog of NCBI NO: 21537324 NR Description: leucoanthocyanidin dioxygenase-like protein
  misc_feature (1)..(355): Homolog of NCBI NO: 15229694 NR Description: oxidoreductase, 2OG-Fe(II) oxygenase family thaliana] >gi|6016680|gb|AAF01507.1|AC009991_3 putative dioxygenase [Arabidopsis thaliana]
  misc_feature (3)..(355): Homolog of NCBI NO: 15228785 NR Description: oxidoreductase, 2OG-Fe(II) oxygenase family
  misc_feature (1)..(278): Homolog of NCBI NO: 34907994 NR Description: leucoanthocyanidin dioxygenase-like protein
  misc_feature (270)..(350): Homolog of NCBI NO: 34907994 NR Description: leucoanthocyanidin dioxygenase-like protein
  misc_feature (4)..(355): Homolog of NCBI NO: 15224472 NR Description: oxidoreductase, 2OG-Fe(II) oxygenase family
  misc_feature (4)..(355): Homolog of NCBI NO: 21554535 NR Description: putative anthocyanidin synthase [Arabidopsis
  misc_feature (11)..(349): Homolog of NCBI NO: 18402992 NR Description: oxidoreductase, 2OG-Fe(II) oxygenase family thaliana] >gi|9294689|dbj|BAB03055.1| gene_id:MHC9.10~similar to
  misc_feature (7)..(341): Homolog of NCBI NO: 2116599 NR Description: leucoanthocyanidin dioxygenase [Perilla

SEQ ID NO: 105205 - protein, 290 aa, Arabidopsis thaliana; identical to SEQ ID NO: 29097
  peptide (1)..(290): Ceres Seq. ID no. 13616699
  misc_feature (139)..(239): Pfam Name: 2OG-Fe(II) oxygenase superfamily Pfam Description: 2OG-Fe(II) oxygenase superfamily
  misc_feature (1)..(290): Homolog of NCBI NO: 15239179 NR Description: oxidoreductase, 2OG-Fe(II) oxygenase family
  misc_feature (1)..(290): Homolog of NCBI NO: 21537324 NR Description: leucoanthocyanidin dioxygenase-like protein
  misc_feature (1)..(290): Homolog of NCBI NO: 15229694 NR Description: oxidoreductase, 2OG-Fe(II) oxygenase family thaliana] >gi|6016680|gb|AAF01507.1|AC009991_3 putative dioxygenase [Arabidopsis thaliana]
  misc_feature (1)..(290): Homolog of NCBI NO: 15228785 NR Description: oxidoreductase, 2OG-Fe(II) oxygenase family
  misc_feature (1)..(213): Homolog of NCBI NO: 34907994 NR Description: leucoanthocyanidin dioxygenase-like protein
  misc_feature (205)..(285): Homolog of NCBI NO: 34907994 NR Description: leucoanthocyanidin dioxygenase-like protein
  misc_feature (1)..(290): Homolog of NCBI NO: 15224472 NR Description: oxidoreductase, 2OG-Fe(II) oxygenase family
  misc_feature (1)..(290): Homolog of NCBI NO: 21554535 NR Description: putative anthocyanidin synthase [Arabidopsis
  misc_feature (1)..(284): Homolog of NCBI NO: 18402992 NR Description: oxidoreductase, 2OG-Fe(II) oxygenase family thaliana] >gi|9294689|dbj|BAB03055.1| gene_id:MHC9.10~similar to
  misc_feature (1)..(276): Homolog of NCBI NO: 2116599 NR Description: leucoanthocyanidin dioxygenase [Perilla

SEQ ID NO: 105206 - DNA, 1702 bp, Arabidopsis thaliana
  misc_feature (1)..(1702): Ceres Seq. ID no. 13616704
  misc_feature: MA Experiment ID: 108595 Result: Up-regulated in Transcription
  misc_feature: MA Experiment 108595 PARAMETER Experiment Name: At_Ler-pi_Ovule_cDNA_P Parameter: Plant Line Value: null
agaaaaaataaattagttaaaaaaggaaagagaagtgttgttgcagctttagcccaaagatctctcctttttgcagagcttcttcttcttcttctccaaaaatcccaactttcttctctttcccggtttcttcgtctccagcattttcgcgtgttgtaacctaatccaaatcttacccattgatggaataacatcatcacgacgcgtcaaaattctgtatcggaggaccgagagatctccatctcctgtccagattcgattcccaccaatcccaatttcgtgaaattcgttagggttttagtttgaatctcatctcatcagatcgagtcgacccaggattaggaagaagaaaagcgatgaagatggcgacgaatggccggtttttcacaatcgggctagtcgcgtcttggtactcatcgaacattggtgtattgttgctgaacaagtacttgcttagcaattacggattcaagtacccgatctttctcaccatgtgtcacatgacggcttgttcgttactcagctacgtcgccattgcttggttgaagatggttccgatgcagacgattcgatccagagttcagttctttaagatcgcagctctaagtctcgttttttgtgtgtcggtggtctttggtaacatctctctccgctttcttcctgtttcgtttaaccaagccattggtgctacgacgccgtttttcaccgccgtgtttgcttacctgatgacgcgtaagaaagaggcttggttgacttacttcactctcgtccctgtcgtcaccggagttgttattgctagtgggggtgagccaagctttcacctgtttggattccttatgtgcattgcagcaacagctgcgagagcacttaaatcagtgcttcaaggaattttgctttcttctgaaggggaaaagctgaactccatgaatctcctcctttacatggctccaatagctgtcgtgctccttctgcctgctactcttatcatggagaaaaatgttgtcggcattacaattgcacttgcaagagatgatttcagaatcgtttggtatcttctattcaattcagcgctcgcctatttagtcaacttgacaaatttcttagtcacaaaccacactagcgccctgactttacaggtgctaggaaacgccaaaggagcagtagcagtggtggtctctattctaatcttcaagaatccggtgtcagtgaccggaatgctgggttactccctcaccgtctgtggagttatcctgtacagcgaagccaagaaacgaaacaaaaattagaacactaaacacacacaaagcttttacttcttcttcatcattcccccctatatatatgttttatattttctcccctatggatatacaggcaagtagtctcttttgctgggccaaactgactcttgtcttaatgaaaagctgggccaaaaacatctcttttttttggcagaaacagagaagcaaagccacacaaagattgattaccaaaggcaagaatttagagaacttcctcctatgaataagtaacctttttgtttttcatttttgttctttcttctcggattctcttgcctttcctctgtaggttgtttgttgaattaggtttgtttcttcgattctttacattttagttttgtgatgtcaacattttacaacaacacggattgattcatttaatcgaaagagagaaagttcct

SEQ ID NO: 105207 - protein, 309 aa, Arabidopsis thaliana
  peptide (1)..(309): Ceres Seq. ID no. 13616705
  misc_feature (25)..(148): Pfam Name: Integral membrane protein DUF6 Pfam Description: Integral membrane protein DUF6
  misc_feature (1)..(309): Homolog of NCBI NO: 30681126 NR Description: phosphate translocator-related [Arabidopsis
  misc_feature (3)..(309): Homolog of NCBI NO: 9759107 NR Description: phosphate/phosphoenolpyruvate translocator
  misc_feature (6)..(308): Homolog of NCBI NO: 27476065 NR Description: Putative phosphate/phosphoenolpyruvate
  misc_feature (10)..(306): Homolog of NCBI NO: 15237644 NR Description: phosphate translocator-related [Arabidopsis
  misc_feature (10)..(306): Homolog of NCBI NO: 17064798 NR Description: phosphate/phosphoenolpyruvate translocator-like [Arabidopsis thaliana] >gi|20259810|gb|AAM13252.1|
  misc_feature (10)..(306): Homolog of NCBI NO: 15228248 NR Description: phosphate translocator-related [Arabidopsis >gi|6056196|gb|AAF02813.1|AC009400_9 unknown protein [Arabidopsis
  misc_feature (11)..(309): Homolog of NCBI NO: 15221371 NR Description: phosphate translocator-related [Arabidopsis >gi|8778643|gb|AAF79651.1|AC025416_25 F5O11.25 [Arabidopsis >gi|9502394|gb|AAF88101.1|AC025417_29 T12C24.5 [Arabidopsis
  misc_feature (151)..(308): Homolog of NCBI NO: 15229717 NR Description: phosphate translocator-related [Arabidopsis >gi|12321869|gb|AAG50965.1|AC073395_7 integral membrane protein,
  misc_feature (1)..(250): Homolog of NCBI NO: 15229717 NR Description: phosphate translocator-related [Arabidopsis >gi|12321869|gb|AAG50965.1|AC073395_7 integral membrane protein,
  misc_feature (15)..(300): Homolog of NCBI NO: 38567832 NR Description: OSJNBb0020J19.10 [Oryza sativa (japonica
MKMATNGRFFTIGLVASWYSSNIGVLLLNKYLLSNYGFKYPIFLTMCHMTACSLLSYVAIAWLKMVPMQTIRSRVQFFKIAALSLVFCVSVVFGNISLRFLPVSFNQAIGATTPFFTAVFAYLMTRKKEAWLTYFTLVPVVTGVVIASGGEPSFHLFGFLMCIAATAARALKSVLQGILLSSEGEKLNSMNLLLYMAPIAVVLLLPATLIMEKNVVGITIALARDDFRIVWYLLFNSALAYLVNLTNFLVTNHTSALTLQVLGNAKGAVAVVVSILIFKNPVSVTGMLGYSLTVCGVILYSEAKKRNKN

SEQ ID NO: 105208 - protein, 307 aa, Arabidopsis thaliana
  peptide (1)..(307): Ceres Seq. ID no. 13616706
  misc_feature (23)..(146): Pfam Name: Integral membrane protein DUF6 Pfam Description: Integral membrane protein DUF6
  misc_feature (1)..(307): Homolog of NCBI NO: 30681126 NR Description: phosphate translocator-related [Arabidopsis
  misc_feature (1)..(307): Homolog of NCBI NO: 9759107 NR Description: phosphate/phosphoenolpyruvate translocator
  misc_feature (4)..(306): Homolog of NCBI NO: 27476065 NR Description: Putative phosphate/phosphoenolpyruvate
  misc_feature (8)..(304): Homolog of NCBI NO: 15237644 NR Description: phosphate translocator-related [Arabidopsis
  misc_feature (8)..(304): Homolog of NCBI NO: 17064798 NR Description: phosphate/phosphoenolpyruvate translocator-like [Arabidopsis thaliana] >gi|20259810|gb|AAM13252.1|
  misc_feature (8)..(304): Homolog of NCBI NO: 15228248 NR Description: phosphate translocator-related [Arabidopsis >gi|6056196|gb|AAF02813.1|AC009400_9 unknown protein [Arabidopsis
  misc_feature (9)..(307): Homolog of NCBI NO: 15221371 NR Description: phosphate translocator-related [Arabidopsis >gi|8778643|gb|AAF79651.1|AC025416_25 F5O11.25 [Arabidopsis >gi|9502394|gb|AAF88101.1|AC025417_29 T12C24.5 [Arabidopsis
  misc_feature (149)..(306): Homolog of NCBI NO: 15229717 NR Description: phosphate translocator-related [Arabidopsis >gi|12321869|gb|AAG50965.1|AC073395_7 integral membrane protein,
  misc_feature (1)..(248): Homolog of NCBI NO: 15229717 NR Description: phosphate translocator-related [Arabidopsis >gi|12321869|gb|AAG50965.1|AC073395_7 integral membrane protein,
  misc_feature (13)..(298): Homolog of NCBI NO: 38567832 NR Description: OSJNBb0020J19.10 [Oryza sativa (japonica
MATNGRFFTIGLVASWYSSNIGVLLLNKYLLSNYGFKYPIFLTMCHMTACSLLSYVAIAWLKMVPMQTIRSRVQFFKIAALSLVFCVSVVFGNISLRFLPVSFNQAIGATTPFFTAVFAYLMTRKKEAWLTYFTLVPVVTGVVIASGGEPSFHLFGFLMCIAATAARALKSVLQGILLSSEGEKLNSMNLLLYMAPIAVVLLLPATLIMEKNVVGITIALARDDFRIVWYLLFNSALAYLVNLTNFLVTNHTSALTLQVLGNAKGAVAVVVSILIFKNPVSVTGMLGYSLTVCGVILYSEAKKRNKN

SEQ ID NO: 105209 - protein, 264 aa, Arabidopsis thaliana; identical to SEQ ID NO: 42381
  peptide (1)..(264): Ceres Seq. ID no. 13616707
  misc_feature (1)..(103): Pfam Name: Integral membrane protein DUF6 Pfam Description: Integral membrane protein DUF6
  misc_feature (1)..(264): Homolog of NCBI NO: 30681126 NR Description: phosphate translocator-related [Arabidopsis
  misc_feature (1)..(264): Homolog of NCBI NO: 9759107 NR Description: phosphate/phosphoenolpyruvate translocator
  misc_feature (1)..(263): Homolog of NCBI NO: 27476065 NR Description: Putative phosphate/phosphoenolpyruvate
  misc_feature (1)..(261): Homolog of NCBI NO: 15237644 NR Description: phosphate translocator-related [Arabidopsis
  misc_feature (1)..(261): Homolog of NCBI NO: 17064798 NR Description: phosphate/phosphoenolpyruvate translocator-like [Arabidopsis thaliana] >gi|20259810|gb|AAM13252.1|
  misc_feature (1)..(261): Homolog of NCBI NO: 15228248 NR Description: phosphate translocator-related [Arabidopsis >gi|6056196|gb|AAF02813.1|AC009400_9 unknown protein [Arabidopsis
  misc_feature (1)..(264): Homolog of NCBI NO: 15221371 NR Description: phosphate translocator-related [Arabidopsis >gi|8778643|gb|AAF79651.1|AC025416_25 F5O11.25 [Arabidopsis >gi|9502394|gb|AAF88101.1|AC025417_29 T12C24.5 [Arabidopsis
  misc_feature (106)..(263): Homolog of NCBI NO: 15229717 NR Description: phosphate translocator-related [Arabidopsis >gi|12321869|gb|AAG50965.1|AC073395_7 integral membrane protein,
  misc_feature (1)..(205): Homolog of NCBI NO: 15229717 NR Description: phosphate translocator-related [Arabidopsis >gi|12321869|gb|AAG50965.1|AC073395_7 integral membrane protein,
  misc_feature (1)..(255): Homolog of NCBI NO: 38567832 NR Description: OSJNBb0020J19.10 [Oryza sativa (japonica

SEQ ID NO: 105210 - DNA, 1518 bp, Arabidopsis thaliana
  misc_feature (1)..(1518): Ceres Seq. ID no. 13616712
  misc_feature: MA Experiment ID: 108434 Result: Up-regulated in Transcription
  misc_feature: MA Experiment 108434 PARAMETER Experiment Name: At_Root_Tips_cDNA_P Parameter: Tissue Value: Root Tips
  misc_feature: MA Experiment ID: 108464 Result: Down-regulated in Transcription
  misc_feature: MA Experiment 108464 PARAMETER Experiment Name: At_Germinating_Seeds_cDNA_P Parameter: Age (day) Value: 4 vs. 0
  misc_feature: MA Experiment 108464 PARAMETER Experiment Name: At_Germinating_Seeds_cDNA_P Parameter: Tissue Value: Germinating Seeds
  misc_feature: MA Experiment ID: 108579 Result: Down-regulated in Transcription
  misc_feature: MA Experiment 108579 PARAMETER Experiment Name: At_4deg_Cold_cDNA_P Parameter: Temperature (deg C) Value: 4 vs. 22
  misc_feature: MA Experiment 108579 PARAMETER Experiment Name: At_4deg_Cold_cDNA_P Parameter: Timepoint (hr) Value: 6
  misc_feature: MA Experiment 108579 PARAMETER Experiment Name: At_4deg_Cold_cDNA_P Parameter: Tissue Value: Aerial
actgaactttcttttcctttcaagtttcacctctaatgcgacgaacacagccacgggaactggccgtcactggtttatcggagaatctccaaggatgtgttttccgcacggtgaaacgagcagttctgatcggaaacggctgcgccggcgcggagaatcaatgcatcggtctccttcgatccttaggcctcttcgatcgccacctctattatagagtagctaaaccaagaggtggaatccttcaatggcttcctatctctctctacaaacgaattcatcgttttatcagcactatctgtgccggattatccattaacgctactggaatcacgaatgtgtttgaagtagatgatgcgaagcagattgctgctatggctcgtaaaacgtttgaaaagaatggcccgttgttagtcgtggcgtctggtagtgatactatttccgtcgcaagctcaataagacgactggctatggaaaatgtttttgttgttcaggtgcaacatccaaggtcgcatcttgagagatttgatctagtgatcacacctcaacacgattatttttctttaacacctgaagggaagaggcaaattcctttctttctcagaccatgggtaactccacgtgaacatccaggtagaaatgtgtttctcactactggagctcttcattacgccgacgcttctactctaagaaatgctacatcggaatggaaaaacgagtttgcttcgctgccaaagcctttggttgtagttaatattggaggacctacaaggaactgtttgtatggtgttgatcttgctaaacagttgtgtggtatgcttcagagtatcctctggagctgtggaagcctaagaatatctttctcaagaagaacaccaaagaaggttgtagaagtcataactggagaattgagctctaactctaaggtctacatttgggatggaaaagaccctaatccgcatttgggacatctagctttagccaatacttttatcataactgctgactctataagtatgttgagcgaggcatgtagtaccgggaaacccgtttatgttgtgggtgctgaacggtgtacatggaaattttctgacttccagaagactctccatggtagaggagctgttcgacctttgaccggcaaagaagatatgtgtgagaagtggagttactctcctcttaacgataatgtagaagctgcgaggcgtgtgattcaagatctggccaagcgtggctgggaaatcgaggcatgaccgttctttccctccacaagttttccagagtactactctcttttccctatatagtctacagttattattttcgtactgggaattatcctccatagaagttaaatgctctagtcgaactcagggtcatatacttagctcatcgtttgaactattagtctattaacgattggtttttgttagttctttggttttttccatttggtttgtagtctcatgtatcaagctcatcatctgtaaaggaacgaataaaagctgcgtgctctgacct

SEQ ID NO: 105211 - protein, 404 aa, Arabidopsis thaliana; identical to SEQ ID NO: 38696
  peptide (1)..(404): Ceres Seq. ID no. 13616713
  misc_feature (32)..(397): Pfam Name: Protein of unknown function (DUF1022) Pfam Description: Protein of unknown function (DUF1022)
  misc_feature (1)..(404): Homolog of NCBI NO: 18415120 NR Description: expressed protein [Arabidopsis thaliana]
  misc_feature (1)..(372): Homolog of NCBI NO: 9759316 NR Description: gene_id:MBL20.6~similar to unknown
  misc_feature (82)..(404): Homolog of NCBI NO: 18420465 NR Description: expressed protein [Arabidopsis thaliana] Unknown protein [Arabidopsis thaliana]
  misc_feature (6)..(80): Homolog of NCBI NO: 18420465 NR Description: expressed protein [Arabidopsis thaliana] Unknown protein [Arabidopsis thaliana]
  misc_feature (82)..(404): Homolog of NCBI NO: 9757815 NR Description: gene_id:MWD9.14~similar to unknown
  misc_feature (6)..(59): Homolog of NCBI NO: 9757815 NR Description: gene_id:MWD9.14~similar to unknown
  misc_feature (202)..(404): Homolog of NCBI NO: 38346329 NR Description: OJ000126_13.11 [Oryza sativa (japonica
  misc_feature (86)..(167): Homolog of NCBI NO: 38346329 NR Description: OJ000126_13.11 [Oryza sativa (japonica
  misc_feature (25)..(84): Homolog of NCBI NO: 38346329 NR Description: OJ000126_13.11 [Oryza sativa (japonica
  misc_feature (184)..(398): Homolog of NCBI NO: 22968024 NR Description: hypothetical protein [Rhodospirillum rubrum]

SEQ ID NO: 105212 - protein, 292 aa, Arabidopsis thaliana; identical to SEQ ID NO: 38697
  peptide (1)..(292): Ceres Seq. ID no. 13616714
  misc_feature (1)..(285): Pfam Name: Protein of unknown function (DUF1022) Pfam Description: Protein of unknown function (DUF1022)
  misc_feature (1)..(292): Homolog of NCBI NO: 18415120 NR Description: expressed protein [Arabidopsis thaliana]
  misc_feature (1)..(260): Homolog of NCBI NO: 9759316 NR Description: gene_id:MBL20.6~similar to unknown
  misc_feature (1)..(292): Homolog of NCBI NO: 18420465 NR Description: expressed protein [Arabidopsis thaliana] Unknown protein [Arabidopsis thaliana]
  misc_feature (1)..(292): Homolog of NCBI NO: 9757815 NR Description: gene_id:MWD9.14~similar to unknown
  misc_feature (90)..(292): Homolog of NCBI NO: 38346329 NR Description: OJ000126_13.11 [Oryza sativa (japonica
  misc_feature (1)..(55): Homolog of NCBI NO: 38346329 NR Description: OJ000126_13.11 [Oryza sativa (japonica
  misc_feature (72)..(286): Homolog of NCBI NO: 22968024 NR Description: hypothetical protein [Rhodospirillum rubrum]
  misc_feature (1)..(60): Homolog of NCBI NO: 22968024 NR Description: hypothetical protein [Rhodospirillum rubrum]
  misc_feature (71)..(290): Homolog of NCBI NO: 16127081 NR Description: conserved hypothetical protein [Caulobacter
  misc_feature (7)..(288): Homolog of NCBI NO: 15892085 NR Description: unknown [Rickettsia conorii]

SEQ ID NO: 105213 - protein, 260 aa, Arabidopsis thaliana; identical to SEQ ID NO: 38698
  peptide (1)..(260): Ceres Seq. ID no. 13616715
  misc_feature (1)..(253): Pfam Name: Protein of unknown function (DUF1022) Pfam Description: Protein of unknown function (DUF1022)
  misc_feature (1)..(260): Homolog of NCBI NO: 18415120 NR Description: expressed protein [Arabidopsis thaliana]
  misc_feature (1)..(228): Homolog of NCBI NO: 9759316 NR Description: gene_id:MBL20.6~similar to unknown
  misc_feature (1)..(260): Homolog of NCBI NO: 18420465 NR Description: expressed protein [Arabidopsis thaliana] Unknown protein [Arabidopsis thaliana]
  misc_feature (1)..(260): Homolog of NCBI NO: 9757815 NR Description: gene_id:MWD9.14~similar to unknown
  misc_feature (58)..(260): Homolog of NCBI NO: 38346329 NR Description: OJ000126_13.11 [Oryza sativa (japonica
  misc_feature (1)..(23): Homolog of NCBI NO: 38346329 NR Description: OJ000126_13.11 [Oryza sativa (japonica
  misc_feature (40)..(254): Homolog of NCBI NO: 22968024 NR Description: hypothetical protein [Rhodospirillum rubrum]
  misc_feature (1)..(28): Homolog of NCBI NO: 22968024 NR Description: hypothetical protein [Rhodospirillum rubrum]
  misc_feature (39)..(258): Homolog of NCBI NO: 16127081 NR Description: conserved hypothetical protein [Caulobacter
  misc_feature (1)..(256): Homolog of NCBI NO: 15892085 NR Description: unknown [Rickettsia conorii]

SEQ ID NO: 105214 - DNA, 1061 bp, Arabidopsis thaliana
  misc_feature (1)..(1061): Ceres Seq. ID no. 13616716
  misc_feature: MA Experiment ID: 20000180 Result: Down-regulated in Transcription
  misc_feature: MA Experiment 20000180 PARAMETER Experiment Name: At_Germinating_Seeds_P Parameter: Age (hr) Value: 24 vs. 0
  misc_feature: MA Experiment 20000180 PARAMETER Experiment Name: At_Germinating_Seeds_P Parameter: Tissue Value: Germinating Seeds
  misc_feature: MA Experiment ID: 20001557 Result: Up-regulated in Transcription
  misc_feature: MA Experiment 20001557 PARAMETER Experiment Name: At_Drought_Soil_Dry_P Parameter: Age (day) Value: 27
  misc_feature: MA Experiment 20001557 PARAMETER Experiment Name: At_Drought_Soil_Dry_P Parameter: Organism Value: A. thaliana
  misc_feature: MA Experiment 20001557 PARAMETER Experiment Name: At_Drought_Soil_Dry_P Parameter: Plant Line Value: WS
  misc_feature: MA Experiment 20001557 PARAMETER Experiment Name: At_Drought_Soil_Dry_P Parameter: Post Timepoint (hr) Value: 3
  misc_feature: MA Experiment 20001557 PARAMETER Experiment Name: At_Drought_Soil_Dry_P Parameter: Post-Treatment Value: Re-Water vs. No Drought
  misc_feature: MA Experiment 20001557 PARAMETER Experiment Name: At_Drought_Soil_Dry_P Parameter: Timepoint (day) Value: 13
  misc_feature: MA Experiment 20001557 PARAMETER Experiment Name: At_Drought_Soil_Dry_P Parameter: Treatment Value: Drought vs. No Drought
  misc_feature: MA Experiment ID: 20001558 Result: Up-regulated in Transcription
  misc_feature: MA Experiment 20001558 PARAMETER Experiment Name: At_Drought_Soil_Dry_P Parameter: Age (day) Value: 27
  misc_feature: MA Experiment 20001558 PARAMETER Experiment Name: At_Drought_Soil_Dry_P Parameter: Organism Value: A. thaliana
  misc_feature: MA Experiment 20001558 PARAMETER Experiment Name: At_Drought_Soil_Dry_P Parameter: Plant Line Value: WS
  misc_feature: MA Experiment 20001558 PARAMETER Experiment Name: At_Drought_Soil_Dry_P Parameter: Post Timepoint (hr) Value: 6
  misc_feature: MA Experiment 20001558 PARAMETER Experiment Name: At_Drought_Soil_Dry_P Parameter: Post-Treatment Value: Re-Water vs. No Drought
  misc_feature: MA Experiment 20001558 PARAMETER Experiment Name: At_Drought_Soil_Dry_P Parameter: Timepoint (day) Value: 13
  misc_feature: MA Experiment 20001558 PARAMETER Experiment Name: At_Drought_Soil_Dry_P Parameter: Treatment Value: Drought vs. No Drought
atctctctccgtccaatttccgtctctctctctttttatctcaccgtctgatcgcttagaagcaaccatgcctcagggagattacatagatttgcacaggaagaggaatggatatcgcctcgaccacttcgagagaaagcgcaagaaggaggcgcgtgaagttcacaagcactccaccatggctcaaaagtctctaggtatcaagggtaagatgattgctaagaaaaactatgctgagaaagctctcatgaagaaaacattgaaaatgcatgaagagtcatcatcaaggcgtaaggctgatgagaatgttcaggaaggagctgttcctgcttatcttcttgatcgtgaagacaccactcgtgccaaggttcttagcaacaccattaaacaaaagaggaaagagaaagctggcaaatgggaggtccctcttccaaaggtccgtccagttgctgaagatgaaatgtttagagtgatccgatctggaaaaaggaaaactaaacaatggaagcggatggttacaaaagctacatttgttggacctgctttcacaaggaagcctccaaagtacgagcgtttcatccgtccatctggtcttcgtttcaccaaggcccacgtcactcaccctgaactaaaatgcactttctgtctcgagatcatcgggattaagaagaatcctaacggtcccatgtatacatcactcggtgtgatgaccaggggaacaatcatcgaggtcaatgtgagtgagcttggtcttgttacaccagctggaaaggttgtctggggaaaatacgctcaagtgacaaacaatccagagaacgacggatgtataaatgctgttttacttgtgtaaccaaatgtccggcactgtcgtagaagtatggatagagacgagaggaaggcgagaatcatgttggctagttttattttgttttctcctgaaacaattttgtgttatttcaagtttttttatgaatgtgtggttggtcttctcttcacattaactagctgctatgttagctttataagtatcccacattatgaaatttgttgcttctaatgtt

SEQ ID NO: 105215 - protein, 282 aa, Arabidopsis thaliana; identical to SEQ ID NO: 37416
  peptide (1)..(282): Ceres Seq. ID no. 13616717
  misc_feature (23)..(259): Pfam Name: Ribosomal protein S8e Pfam Description: Ribosomal protein S8e
  misc_feature (23)..(282): Homolog of NCBI NO: 15240023 NR Description: expressed protein [Arabidopsis thaliana] gene_id:MHF15.12~ref|NP_055701.1~similar to unknown protein thaliana] >gi|16604561|gb|AAL24082.1| unknown protein
  misc_feature (23)..(282): Homolog of NCBI NO: 21553587 NR Description: unknown [Arabidopsis thaliana]
  misc_feature (23)..(282): Homolog of NCBI NO: 33146852 NR Description: putative TGF(transfoming growth factor) beta
  misc_feature (23)..(282): Homolog of NCBI NO: 7662677 NR Description: TGF beta-inducible nuclear protein 1; hairy cell protein 1 [Homo sapiens] >gi|3881976|emb|CAA10008.1| hypothetical [Homo sapiens] >gi|11999092|gb|AAG43048.1|AF077615_1 TGF beta
  misc_feature (23)..(282): Homolog of NCBI NO: 34925411 NR Description: TGF beta-inducible nuclear protein 1 (L-name LNR42) >gi|12849836|dbj|BAB28500.1| unnamed protein product [Mus >gi|12852013|dbj|BAB29237.1| unnamed protein product [Mus
  misc_feature (23)..(282): Homolog of NCBI NO: 28278483 NR Description: Similar to RIKEN cDNA 5730427N09 gene [Danio
  misc_feature (23)..(282): Homolog of NCBI NO: 34924868 NR Description: TGF beta-inducible nuclear protein 1 (CDK105
  misc_feature (23)..(282): Homolog of NCBI NO: 12856931 NR Description: unnamed protein product [Mus musculus]
  misc_feature (23)..(282): Homolog of NCBI NO: 9438133 NR Description: unknown [Ochlerotatus triseriatus]
  misc_feature (22)..(282): Homolog of NCBI NO: 31224644 NR Description: ENSANGP00000023534 [Anopheles gambiae]

SEQ ID NO: 105216 - protein, 260 aa, Arabidopsis thaliana; identical to SEQ ID NO: 29738
  peptide (1)..(260): Ceres Seq. ID no. 13616718
  misc_feature (1)..(237): Pfam Name: Ribosomal protein S8e Pfam Description: Ribosomal protein S8e
  misc_feature (1)..(260): Homolog of NCBI NO: 15240023 NR Description: expressed protein [Arabidopsis thaliana] gene_id:MHF15.12~ref|NP_055701.1~similar to unknown protein thaliana] >gi|16604561|gb|AAL24082.1| unknown protein
  misc_feature (1)..(260): Homolog of NCBI NO: 21553587 NR Description: unknown [Arabidopsis thaliana]
  misc_feature (1)..(260): Homolog of NCBI NO: 33146852 NR Description: putative TGF(transfoming growth factor) beta
  misc_feature (1)..(260): Homolog of NCBI NO: 7662677 NR Description: TGF beta-inducible nuclear protein 1; hairy cell protein 1 [Homo sapiens] >gi|3881976|emb|CAA10008.1| hypothetical [Homo sapiens] >gi|11999092|gb|AAG43048.1|AF077615_1 TGF beta
  misc_feature (1)..(260): Homolog of NCBI NO: 34925411 NR Description: TGF beta-inducible nuclear protein 1 (L-name LNR42) >gi|12849836|dbj|BAB28500.1| unnamed protein product [Mus >gi|12852013|dbj|BAB29237.1| unnamed protein product [Mus
  misc_feature (1)..(260): Homolog of NCBI NO: 28278483 NR Description: Similar to RIKEN cDNA 5730427N09 gene [Danio
  misc_feature (1)..(260): Homolog of NCBI NO: 34924868 NR Description: TGF beta-inducible nuclear protein 1 (CDK105
  misc_feature (1)..(260): Homolog of NCBI NO: 12856931 NR Description: unnamed protein product [Mus musculus]
  misc_feature (1)..(260): Homolog of NCBI NO: 9438133 NR Description: unknown [Ochlerotatus triseriatus]
  misc_feature (1)..(260): Homolog of NCBI NO: 31224644 NR Description: ENSANGP00000023534 [Anopheles gambiae]

SEQ ID NO: 105217 - protein, 223 aa, Arabidopsis thaliana; identical to SEQ ID NO: 29739
  peptide (1)..(223): Ceres Seq. ID no. 13616719
  misc_feature (1)..(200): Pfam Name: Ribosomal protein S8e Pfam Description: Ribosomal protein S8e
  misc_feature (1)..(223): Homolog of NCBI NO: 15240023 NR Description: expressed protein [Arabidopsis thaliana] gene_id:MHF15.12~ref|NP_055701.1~similar to unknown protein thaliana] >gi|16604561|gb|AAL24082.1| unknown protein
  misc_feature (1)..(223): Homolog of NCBI NO: 21553587 NR Description: unknown [Arabidopsis thaliana]
  misc_feature (1)..(223): Homolog of NCBI NO: 33146852 NR Description: putative TGF(transfoming growth factor) beta
  misc_feature (1)..(223): Homolog of NCBI NO: 7662677 NR Description: TGF beta-inducible nuclear protein 1; hairy cell protein 1 [Homo sapiens] >gi|3881976|emb|CAA10008.1| hypothetical [Homo sapiens] >gi|11999092|gb|AAG43048.1|AF077615_1 TGF beta
  misc_feature (1)..(223): Homolog of NCBI NO: 34925411 NR Description: TGF beta-inducible nuclear protein 1 (L-name LNR42) >gi|12849836|dbj|BAB28500.1| unnamed protein product [Mus >gi|12852013|dbj|BAB29237.1| unnamed protein product [Mus
  misc_feature (1)..(223): Homolog of NCBI NO: 28278483 NR Description: Similar to RIKEN cDNA 5730427N09 gene [Danio
  misc_feature (1)..(223): Homolog of NCBI NO: 34924868 NR Description: TGF beta-inducible nuclear protein 1 (CDK105
  misc_feature (1)..(223): Homolog of NCBI NO: 12856931 NR Description: unnamed protein product [Mus musculus]
  misc_feature (1)..(223): Homolog of NCBI NO: 9438133 NR Description: unknown [Ochlerotatus triseriatus]
  misc_feature (1)..(223): Homolog of NCBI NO: 31224644 NR Description: ENSANGP00000023534 [Anopheles gambiae]

SEQ ID NO: 105218 - DNA, 1081 bp, Arabidopsis thaliana
  misc_feature (1)..(1081): Ceres Seq. ID no. 13616720
  misc_feature: MA Experiment ID: 108434 Result: Down-regulated in Transcription
  misc_feature: MA Experiment 108434 PARAMETER Experiment Name: At_Root_Tips_cDNA_P Parameter: Tissue Value: Root Tips
  misc_feature: MA Experiment ID: 108435 Result: Down-regulated in Transcription
  misc_feature: MA Experiment 108435 PARAMETER Experiment Name: At_stm_Mutants_cDNA_P Parameter: Plant Line Value: wt Landsburg vs stm
  misc_feature: MA Experiment 108435 PARAMETER Experiment Name: At_stm_Mutants_cDNA_P Parameter: Tissue Value: Shoot Apical Meristem Region
  misc_feature: MA Experiment ID: 108461 Result: Up-regulated in Transcription
  misc_feature: MA Experiment 108461 PARAMETER Experiment Name: At_Germinating_Seeds_cDNA_P Parameter: Age (day) Value: 1 vs. 0
  misc_feature: MA Experiment 108461 PARAMETER Experiment Name: At_Germinating_Seeds_cDNA_P Parameter: Tissue Value: Germinating Seeds
  misc_feature: MA Experiment ID: 108462 Result: Up-regulated in Transcription
  misc_feature: MA Experiment 108462 PARAMETER Experiment Name: At_Germinating_Seeds_cDNA_P Parameter: Age (day) Value: 2 vs. 0
  misc_feature: MA Experiment 108462 PARAMETER Experiment Name: At_Germinating_Seeds_cDNA_P Parameter: Tissue Value: Germinating Seeds
  misc_feature: MA Experiment ID: 108463 Result: Up-regulated in Transcription
  misc_feature: MA Experiment 108463 PARAMETER Experiment Name: At_Germinating_Seeds_cDNA_P Parameter: Age (day) Value: 3 vs. 0
  misc_feature: MA Experiment 108463 PARAMETER Experiment Name: At_Germinating_Seeds_cDNA_P Parameter: Tissue Value: Germinating Seeds
  misc_feature: MA Experiment ID: 108488 Result: Down-regulated in Transcription
  misc_feature: MA Experiment ID: 108573 Result: Up-regulated in Transcription
  misc_feature: MA Experiment 108573 PARAMETER Experiment Name: At_Drought_cDNA_P Parameter: Timepoint (hr) Value: 6
  misc_feature: MA Experiment 108573 PARAMETER Experiment Name: At_Drought_cDNA_P Parameter: Tissue Value: Aerial
  misc_feature: MA Experiment 108573 PARAMETER Experiment Name: At_Drought_cDNA_P Parameter: Treatment Value: Drought vs. No Drought
  misc_feature: MA Experiment ID: 108579 Result: Down-regulated in Transcription
  misc_feature: MA Experiment 108579 PARAMETER Experiment Name: At_4deg_Cold_cDNA_P Parameter: Temperature (deg C) Value: 4 vs. 22
  misc_feature: MA Experiment 108579 PARAMETER Experiment Name: At_4deg_Cold_cDNA_P Parameter: Timepoint (hr) Value: 6
  misc_feature: MA Experiment 108579 PARAMETER Experiment Name: At_4deg_Cold_cDNA_P Parameter: Tissue Value: Aerial
  misc_feature: MA Experiment ID: 108585 Result: Up-regulated in Transcription
  misc_feature: MA Experiment 108585 PARAMETER Experiment Name: At_5mM_NaNP_cDNA_P Parameter: Timepoint (hr) Value: 6
  misc_feature: MA Experiment 108585 PARAMETER Experiment Name: At_5mM_NaNP_cDNA_P Parameter: Tissue Value: Aerial
  misc_feature: MA Experiment 108585 PARAMETER Experiment Name: At_5mM_NaNP_cDNA_P Parameter: Treatment Value: null
  misc_feature: MA Experiment ID: 20000111 Result: Up-regulated in Transcription
  misc_feature: MA Experiment 20000111 PARAMETER Experiment Name: At_42deg_Heat_cDNA_P Parameter: Temperature (deg C) Value: 42 vs. 22
  misc_feature: MA Experiment 20000111 PARAMETER Experiment Name: At_42deg_Heat_cDNA_P Parameter: Timepoint (hr) Value: 6
  misc_feature: MA Experiment 20000111 PARAMETER Experiment Name: At_42deg_Heat_cDNA_P Parameter: Tissue Value: Aerial
  misc_feature: MA Experiment ID: 20000112 Result: Up-regulated in Transcription
  misc_feature: MA Experiment 20000112 PARAMETER Experiment Name: At_42deg_Heat_cDNA_P Parameter: Temperature (deg C) Value: 42 vs. 22
  misc_feature: MA Experiment 20000112 PARAMETER Experiment Name: At_42deg_Heat_cDNA_P Parameter: Timepoint (hr) Value: 2
  misc_feature: MA Experiment 20000112 PARAMETER Experiment Name: At_42deg_Heat_cDNA_P Parameter: Tissue Value: Aerial
  misc_feature: MA Experiment ID: 20000113 Result: Up-regulated in Transcription
  misc_feature: MA Experiment 20000113 PARAMETER Experiment Name: At_42deg_Heat_cDNA_P Parameter: Temperature (deg C) Value: 42 vs. 22
  misc_feature: MA Experiment 20000113 PARAMETER Experiment Name: At_42deg_Heat_cDNA_P Parameter: Timepoint (hr) Value: 8
  misc_feature: MA Experiment 20000113 PARAMETER Experiment Name: At_42deg_Heat_cDNA_P Parameter: Tissue Value: Aerial
  misc_feature: MA Experiment ID: 20000173 Result: Up-regulated in Transcription
  misc_feature: MA Experiment 20000173 PARAMETER Experiment Name: At_42deg_Heat_P Parameter: Age (day) Value: 14
  misc_feature: MA Experiment 20000173 PARAMETER Experiment Name: At_42deg_Heat_P Parameter: Organism Value: A. thaliana
  misc_feature: MA Experiment 20000173 PARAMETER Experiment Name: At_42deg_Heat_P Parameter: Plant Line Value: WS
  misc_feature: MA Experiment 20000173 PARAMETER Experiment Name: At_42deg_Heat_P Parameter: Temperature (deg C) Value: 42 vs. 22
  misc_feature: MA Experiment 20000173 PARAMETER Experiment Name: At_42deg_Heat_P Parameter: Timepoint (hr) Value: 6
  misc_feature: MA Experiment 20000173 PARAMETER Experiment Name: At_42deg_Heat_P Parameter: Tissue Value: Aerial
  misc_feature: MA Experiment ID: 20000180 Result: Up-regulated in Transcription
  misc_feature: MA Experiment 20000180 PARAMETER Experiment Name: At_Germinating_Seeds_P Parameter: Age (hr) Value: 24 vs. 0
  misc_feature: MA Experiment 20000180 PARAMETER Experiment Name: At_Germinating_Seeds_P Parameter: Tissue Value: Germinating Seeds
  misc_feature: MA Experiment ID: 20000214 Result: Down-regulated in Transcription
  misc_feature: MA Experiment 20000214 PARAMETER Experiment Name: At_4deg_Cold_P Parameter: Timepoint (hr) Value: 6
  misc_feature: MA Experiment ID: 20000234 Result: Down-regulated in Transcription
  misc_feature: MA Experiment 20000234 PARAMETER Experiment Name: At_Siliques_P Parameter: Age (day) Value: 21
  misc_feature: MA Experiment 20000234 PARAMETER Experiment Name: At_Siliques_P Parameter: Organism Value: A. thaliana
  misc_feature: MA Experiment 20000234 PARAMETER Experiment Name: At_Siliques_P Parameter: Plant Line Value: WS
  misc_feature: MA Experiment 20000234 PARAMETER Experiment Name: At_Siliques_P Parameter: Tissue Value: Less Than 5mm Siliques vs. Whole Plant
  misc_feature: MA Experiment ID: 20000437 Result: Up-regulated in Transcription
  misc_feature: MA Experiment 20000437 PARAMETER Experiment Name: At_Drought_P Parameter: Age (day) Value: 8
  misc_feature: MA Experiment 20000437 PARAMETER Experiment Name: At_Drought_P Parameter: Organism Value: A. thaliana
  misc_feature: MA Experiment 20000437 PARAMETER Experiment Name: At_Drought_P Parameter: Plant Line Value: WS
  misc_feature: MA Experiment 20000437 PARAMETER Experiment Name: At_Drought_P Parameter: Timepoint (hr) Value: 24
  misc_feature: MA Experiment 20000437 PARAMETER Experiment Name: At_Drought_P Parameter: Tissue Value: Whole Plant
  misc_feature: MA Experiment 20000437 PARAMETER Experiment Name: At_Drought_P Parameter: Treatment Value: Drought vs. No Drought
  misc_feature: MA Experiment ID: 20001450 Result: Up-regulated in Transcription
  misc_feature: MA Experiment 20001450 PARAMETER Experiment Name: At_Far-red-induction_P Parameter: Age (day) Value: 7
  misc_feature: MA Experiment 20001450 PARAMETER Experiment Name: At_Far-red-induction_P Parameter: Light Value: Far-red vs. White
  misc_feature: MA Experiment 20001450 PARAMETER Experiment Name: At_Far-red-induction_P Parameter: Organism Value: A. thaliana
  misc_feature: MA Experiment 20001450 PARAMETER Experiment Name: At_Far-red-induction_P Parameter: Plant Line Value: Columbia
  misc_feature: MA Experiment 20001450 PARAMETER Experiment Name: At_Far-red-induction_P Parameter: Timepoint (hr) Value: 8
  misc_feature: MA Experiment 20001450 PARAMETER Experiment Name: At_Far-red-induction_P Parameter: Tissue Value: Whole Plant
  misc_feature: MA Experiment ID: 20001911 Result: Up-regulated in Transcription
  misc_feature: MA Experiment 20001911 PARAMETER Experiment Name: At_Drought_Reproduction_P Parameter: Age (day) Value: 40
  misc_feature: MA Experiment 20001911 PARAMETER Experiment Name: At_Drought_Reproduction_P Parameter: Organism Value: A. thaliana
  misc_feature: MA Experiment 20001911 PARAMETER Experiment Name: At_Drought_Reproduction_P Parameter: Plant Line Value: WS
  misc_feature: MA Experiment 20001911 PARAMETER Experiment Name: At_Drought_Reproduction_P Parameter: Timepoint (day) Value: 10
  misc_feature: MA Experiment 20001911 PARAMETER Experiment Name: At_Drought_Reproduction_P Parameter: Tissue Value: Flowers
  misc_feature: MA Experiment 20001911 PARAMETER Experiment Name: At_Drought_Reproduction_P Parameter: Treatment Value: Drought vs. No Drought
cttaacgacaaaggaaagaaagcatggagattgaaaacggaagccatttctagcaaaacaattctctcttttgtcttgaagataagtttcacaaaaaggtctgcttcgcctcttctacgacgttgcagaaactaagaagagatgggtcttctctccaacagaatcgatagatcgagtttgaaacctggagatcatatctactcctggaggactgcttacatctatgcccatcacggcatctatgttggagatgatagagtcatccatttcactagacgaggccaagaagttggaaccgggactgttctagatctcatactagtcagctcaggtccatcccgaaaccacacccactgtccaacctgtgttccacctaacgaaggtcacggtgttgtttcctcatgccttaactgtttcctagccggtggtgtcttgtaccggtttgagtactcagtcaacgctgctcacttcctcgtcaaagccagaggaggaacttgcacactcgctgtcgctgaccctaatgagattgttgttcaccgggccaaacacctccttcaaaacggatttggatgttatgacgttttcaagaacaactgtgaggatttcgctatatattgcaaaaccgcattgctggttcttgagggaaggacaatgggacagagcggtcaggcggtttcgattataggtgggccgattgctgcggttttgtccacgccaatgcggcttctgactacaaacgtgtatgggatggctgctacagcgattggtgtgtattgtgcgagtagatacgctactgatatcggaatgagagctgacgtcgcgaaagttgaagcagaggacctcacaagaaggctgtcttcaggacttttccaagtacttgatcctccattggcagccatagctttaccaagcacgagttgataagcttaagcttcaccagcttatcccactgttgtattttctatttgtcccttagcttctataaatgttctaataagaacactccttgcacaattgatctcggtgtgattcaaacttatataattatgtacaataataggtaaaaaagggtaccagttac

SEQ ID NO: 105219 - protein, 259 aa, Arabidopsis thaliana; identical to SEQ ID NO: 40915
  peptide (1)..(259): Ceres Seq. ID no. 13616721
  misc_feature (101)..(172): Pfam Name: NC domain Pfam Description: NC domain
  misc_feature (1)..(259): Homolog of NCBI NO: 18415178 NR Description: expressed protein [Arabidopsis thaliana] AT5g06370/MHF15_11 [Arabidopsis thaliana]
  misc_feature (32)..(259): Homolog of NCBI NO: 9758417 NR Description: gb|AAF32477.1~gene_id:MHF15.11~similar to unknown
  misc_feature (1)..(234): Homolog of NCBI NO: 18396282 NR Description: expressed protein [Arabidopsis thaliana] unknown protein [Arabidopsis thaliana] unknown protein [Arabidopsis thaliana]
  misc_feature (1)..(234): Homolog of NCBI NO: 21594170 NR Description: unknown [Arabidopsis thaliana]
  misc_feature (1)..(238): Homolog of NCBI NO: 18378812 NR Description: expressed protein [Arabidopsis thaliana]
  misc_feature (1)..(238): Homolog of NCBI NO: 22328196 NR Description: expressed protein [Arabidopsis thaliana]
  misc_feature (1)..(238): Homolog of NCBI NO: 21592684 NR Description: unknown [Arabidopsis thaliana]
  misc_feature (1)..(237): Homolog of NCBI NO: 15237327 NR Description: hypothetical protein [Arabidopsis thaliana] gb|AAF32477.1~gene_id:MQK4.5~similar to unknown protein
  misc_feature (1)..(189): Homolog of NCBI NO: 15237330 NR Description: expressed protein [Arabidopsis thaliana] gb|AAF32477.1~gene_id:MQK4.8~similar to unknown protein thaliana] >gi|27754415|gb|AAO22656.1| unknown protein

SEQ ID NO: 105220 - DNA, 991 bp, Arabidopsis thaliana
  misc_feature (1)..(991): Ceres Seq. ID no. 13616722
  misc_feature: MA Experiment ID: 108434 Result: Down-regulated in Transcription
  misc_feature: MA Experiment 108434 PARAMETER Experiment Name: At_Root_Tips_cDNA_P Parameter: Tissue Value: Root Tips
  misc_feature: MA Experiment ID: 108469 Result: Up-regulated in Transcription
  misc_feature: MA Experiment ID: 108595 Result: Down-regulated in Transcription
  misc_feature: MA Experiment 108595 PARAMETER Experiment Name: At_Ler-pi_Ovule_cDNA_P Parameter: Plant Line Value: null
  misc_feature: MA Experiment ID: 20000794 Result: Up-regulated in Transcription
  misc_feature: MA Experiment 20000794 PARAMETER Experiment Name: At_Petals_P Parameter: Age (day) Value: 23-25 days
  misc_feature: MA Experiment 20000794 PARAMETER Experiment Name: At_Petals_P Parameter: Plant Line Value: WS
  misc_feature: MA Experiment 20000794 PARAMETER Experiment Name: At_Petals_P Parameter: Tissue Value: Petals vs. Whole plant
atttccctcgccgcacgccggcggatggagggtagtttagtcttttaacctttttctctgtttttgtcccaaaagataaaacgaaaatgacttcttttgaaaaggagagaaggcatatatcgcgtggatttgaagacgaagaggaatcataaaaagcctaacgaagaagacgaagaagaagaggaacaaacaaccatgggtgaagtggttaaggatggaagagaagaagtgatccaggcatggtatatggatgatagcgaagaggatcagagacttcctcaccacaaggatcctaaggagtttctatctttggacaaacttgcagagctgggagtacttagctggagacttgatgctgataactatgaaaccgatgaggatttgaaaaagatccgcgaatctcgtggttactcttacatggacttttgtgaggtatgcccggaaaagcttccaaactatgaagtgaaagtgaagagctttttcgaagaacatttgcacactgatgaagagatccgttactgcgttgcaggaagcggttactttgatgtgagggatcgcaatgaagcttggattagagtatgggtaaagaagggaggtatgatagtcttacctgctggaatatatcatcgcttcaccgtagactcagacaactatatcaaggcaatgcggcttttcgttggtgaaccggtctggacaccatacaatcgcccacacgaccacctccctgcaaggaaagagtacatcgataatttcgtgaaggtgaatgaaggtggtgtcatagacgcgtcagcctagaggattctcagtcttatgcatcagatttctataaactaagcatacaataaagagagctttctgtctcatgttggatattatgtcatctacagatccacttgtgaagaaactttgattcgtgtggctttggcattatggttgtgttgtaactgtatttatagtttatactccagaaatcaaactgtgttacattatc

SEQ ID NO: 105221 - protein, 199 aa, Arabidopsis thaliana; identical to SEQ ID NO: 26430
  peptide (1)..(199): Ceres Seq. ID no. 13616723
  misc_feature (14)..(168): Pfam Name: ARD/ARD' family Pfam Description: ARD/ARD' family
  misc_feature (1)..(199): Homolog of NCBI NO: 18414289 NR Description: expressed protein [Arabidopsis thaliana] AT4g14710/dl3395c [Arabidopsis thaliana]
  misc_feature (1)..(187): Homolog of NCBI NO: 18414293 NR Description: expressed protein [Arabidopsis thaliana] unknown protein [Arabidopsis thaliana] At4g14716 [Arabidopsis thaliana] >gi|28973071|gb|AAO63860.1|
  misc_feature (69)..(179): Homolog of NCBI NO: 7485194 NR Description: hypothetical protein - Arabidopsis thaliana hypothetical protein [Arabidopsis thaliana]
  misc_feature (1)..(75): Homolog of NCBI NO: 7485194 NR Description: hypothetical protein - Arabidopsis thaliana hypothetical protein [Arabidopsis thaliana]
  misc_feature (1)..(199): Homolog of NCBI NO: 15225298 NR Description: hypothetical protein [Arabidopsis thaliana]
  misc_feature (6)..(193): Homolog of NCBI NO: 7489559 NR Description: probable submergence induced, nickel-binding
  misc_feature (6)..(193): Homolog of NCBI NO: 14522834 NR Description: iron-deficiency induced gene [Hordeum vulgare]
  misc_feature (5)..(193): Homolog of NCBI NO: 34902616 NR Description: Putative probable submergence induced,
  misc_feature (6)..(192): Homolog of NCBI NO: 7489558 NR Description: probable submergence induced protein 2 - rice
  misc_feature (7)..(192): Homolog of NCBI NO: 37534408 NR Description: putative zinc finger protein ID1 [Oryza sativa

SEQ ID NO: 105222 - protein, 182 aa, Arabidopsis thaliana; identical to SEQ ID NO: 26431
  peptide (1)..(182): Ceres Seq. ID no. 13616724
  misc_feature (1)..(151): Pfam Name: ARD/ARD' family Pfam Description: ARD/ARD' family
  misc_feature (1)..(182): Homolog of NCBI NO: 18414289 NR Description: expressed protein [Arabidopsis thaliana] AT4g14710/dl3395c [Arabidopsis thaliana]
  misc_feature (1)..(170): Homolog of NCBI NO: 18414293 NR Description: expressed protein [Arabidopsis thaliana] unknown protein [Arabidopsis thaliana] At4g14716 [Arabidopsis thaliana] >gi|28973071|gb|AAO63860.1|
  misc_feature (52)..(162): Homolog of NCBI NO: 7485194 NR Description: hypothetical protein - Arabidopsis thaliana hypothetical protein [Arabidopsis thaliana]
  misc_feature (1)..(58): Homolog of NCBI NO: 7485194 NR Description: hypothetical protein - Arabidopsis thaliana hypothetical protein [Arabidopsis thaliana]
  misc_feature (1)..(182): Homolog of NCBI NO: 15225298 NR Description: hypothetical protein [Arabidopsis thaliana]
  misc_feature (1)..(176): Homolog of NCBI NO: 7489559 NR Description: probable submergence induced, nickel-binding
  misc_feature (1)..(176): Homolog of NCBI NO: 14522834 NR Description: iron-deficiency induced gene [Hordeum vulgare]
  misc_feature (1)..(176): Homolog of NCBI NO: 34902616 NR Description: Putative probable submergence induced,
  misc_feature (1)..(175): Homolog of NCBI NO: 7489558 NR Description: probable submergence induced protein 2 - rice
  misc_feature (1)..(175): Homolog of NCBI NO: 37534408 NR Description: putative zinc finger protein ID1 [Oryza sativa

SEQ ID NO: 105223 - protein, 125 aa, Arabidopsis thaliana; identical to SEQ ID NO: 25190
  peptide (1)..(125): Ceres Seq. ID no. 13616725
  misc_feature (1)..(94): Pfam Name: ARD/ARD' family Pfam Description: ARD/ARD' family
  misc_feature (1)..(125): Homolog of NCBI NO: 18414289 NR Description: expressed protein [Arabidopsis thaliana] AT4g14710/dl3395c [Arabidopsis thaliana]
  misc_feature (1)..(113): Homolog of NCBI NO: 18414293 NR Description: expressed protein [Arabidopsis thaliana] unknown protein [Arabidopsis thaliana] At4g14716 [Arabidopsis thaliana] >gi|28973071|gb|AAO63860.1|
  misc_feature (1)..(105): Homolog of NCBI NO: 7485194 NR Description: hypothetical protein - Arabidopsis thaliana hypothetical protein [Arabidopsis thaliana]
  misc_feature (1)..(125): Homolog of NCBI NO: 15225298 NR Description: hypothetical protein [Arabidopsis thaliana]
  misc_feature (1)..(119): Homolog of NCBI NO: 7489559 NR Description: probable submergence induced, nickel-binding
  misc_feature (1)..(119): Homolog of NCBI NO: 14522834 NR Description: iron-deficiency induced gene [Hordeum vulgare]
  misc_feature (1)..(119): Homolog of NCBI NO: 34902616 NR Description: Putative probable submergence induced,
  misc_feature (1)..(118): Homolog of NCBI NO: 7489558 NR Description: probable submergence induced protein 2 - rice
  misc_feature (1)..(118): Homolog of NCBI NO: 37534408 NR Description: putative zinc finger protein ID1 [Oryza sativa
  misc_feature (1)..(109): Homolog of NCBI NO: 10177955 NR Description: gene_id:MQD19.21~pir||T02918~similar to unknown

SEQ ID NO: 105224 - DNA, 927 bp, Arabidopsis thaliana
  misc_feature (1)..(927): Ceres Seq. ID no. 13616726
  misc_feature: MA Experiment ID: 108434 Result: Down-regulated in Transcription
  misc_feature: MA Experiment 108434 PARAMETER Experiment Name: At_Root_Tips_cDNA_P Parameter: Tissue Value: Root Tips
  misc_feature: MA Experiment ID: 108595 Result: Down-regulated in Transcription
  misc_feature: MA Experiment 108595 PARAMETER Experiment Name: At_Ler-pi_Ovule_cDNA_P Parameter: Plant Line Value: null
  misc_feature: MA Experiment ID: 20000070 Result: Up-regulated in Transcription
  misc_feature: MA Experiment 20000070 PARAMETER Experiment Name: At_100uM_ABA_Mutants_cDNA_P Parameter: Plant Line Value: CS24
  misc_feature: MA Experiment 20000070 PARAMETER Experiment Name: At_100uM_ABA_Mutants_cDNA_P Parameter: Timepoint (hr) Value: 6
  misc_feature: MA Experiment 20000070 PARAMETER Experiment Name: At_100uM_ABA_Mutants_cDNA_P Parameter: Tissue Value: Aerial
  misc_feature: MA Experiment 20000070 PARAMETER Experiment Name: At_100uM_ABA_Mutants_cDNA_P Parameter: Treatment Value: 100uM ABA vs. No Treatment
  misc_feature: MA Experiment ID: 20000071 Result: Up-regulated in Transcription
  misc_feature: MA Experiment 20000071 PARAMETER Experiment Name: At_100uM_ABA_Mutants_cDNA_P Parameter: Plant Line Value: CS8104
  misc_feature: MA Experiment 20000071 PARAMETER Experiment Name: At_100uM_ABA_Mutants_cDNA_P Parameter: Timepoint (hr) Value: 6
  misc_feature: MA Experiment 20000071 PARAMETER Experiment Name: At_100uM_ABA_Mutants_cDNA_P Parameter: Tissue Value: Aerial
  misc_feature: MA Experiment 20000071 PARAMETER Experiment Name: At_100uM_ABA_Mutants_cDNA_P Parameter: Treatment Value: 100uM ABA vs. No Treatment
  misc_feature: MA Experiment ID: 20000072 Result: Up-regulated in Transcription
  misc_feature: MA Experiment 20000072 PARAMETER Experiment Name: At_100uM_ABA_Mutants_cDNA_P Parameter: Plant Line Value: CS8105
  misc_feature: MA Experiment 20000072 PARAMETER Experiment Name: At_100uM_ABA_Mutants_cDNA_P Parameter: Timepoint (hr) Value: 6
  misc_feature: MA Experiment 20000072 PARAMETER Experiment Name: At_100uM_ABA_Mutants_cDNA_P Parameter: Tissue Value: Aerial
  misc_feature: MA Experiment 20000072 PARAMETER Experiment Name: At_100uM_ABA_Mutants_cDNA_P Parameter: Treatment Value: 100uM ABA vs. No Treatment
  misc_feature: MA Experiment ID: 20000086 Result: Up-regulated in Transcription
  misc_feature: MA Experiment 20000086 PARAMETER Experiment Name: At_100uM_ABA_Mutants_cDNA_P Parameter: Plant Line Value: CS22
  misc_feature: MA Experiment 20000086 PARAMETER Experiment Name: At_100uM_ABA_Mutants_cDNA_P Parameter: Timepoint (hr) Value: 6
  misc_feature: MA Experiment 20000086 PARAMETER Experiment Name: At_100uM_ABA_Mutants_cDNA_P Parameter: Tissue Value: Aerial
  misc_feature: MA Experiment 20000086 PARAMETER Experiment Name: At_100uM_ABA_Mutants_cDNA_P Parameter: Treatment Value: 100uM ABA vs. No Treatment
  misc_feature: MA Experiment ID: 20000087 Result: Up-regulated in Transcription
  misc_feature: MA Experiment 20000087 PARAMETER Experiment Name: At_100uM_ABA_Mutants_cDNA_P Parameter: Plant Line Value: WS
  misc_feature: MA Experiment 20000087 PARAMETER Experiment Name: At_100uM_ABA_Mutants_cDNA_P Parameter: Timepoint (hr) Value: 6
  misc_feature: MA Experiment 20000087 PARAMETER Experiment Name: At_100uM_ABA_Mutants_cDNA_P Parameter: Tissue Value: Aerial
  misc_feature: MA Experiment 20000087 PARAMETER Experiment Name: At_100uM_ABA_Mutants_cDNA_P Parameter: Treatment Value: 100uM ABA vs. No Treatment
  misc_feature: MA Experiment ID: 20000088 Result: Up-regulated in Transcription
  misc_feature: MA Experiment 20000088 PARAMETER Experiment Name: At_100uM_ABA_Mutants_cDNA_P Parameter: Plant Line Value: Landsberg
  misc_feature: MA Experiment 20000088 PARAMETER Experiment Name: At_100uM_ABA_Mutants_cDNA_P Parameter: Timepoint (hr) Value: 6
  misc_feature: MA Experiment 20000088 PARAMETER Experiment Name: At_100uM_ABA_Mutants_cDNA_P Parameter: Tissue Value: Aerial
  misc_feature: MA Experiment 20000088 PARAMETER Experiment Name: At_100uM_ABA_Mutants_cDNA_P Parameter: Treatment Value: 100uM ABA vs. No Treatment
  misc_feature: MA Experiment ID: 20000089 Result: Up-regulated in Transcription
  misc_feature: MA Experiment ID: 20000117 Result: Up-regulated in Transcription
  misc_feature: MA Experiment 20000117 PARAMETER Experiment Name: At_100uM_ABA_Mutants_cDNA_P Parameter: Plant Line Value: Columbia
  misc_feature: MA Experiment 20000117 PARAMETER Experiment Name: At_100uM_ABA_Mutants_cDNA_P Parameter: Timepoint (hr) Value: 6
  misc_feature: MA Experiment 20000117 PARAMETER Experiment Name: At_100uM_ABA_Mutants_cDNA_P Parameter: Tissue Value: Aerial
  misc_feature: MA Experiment 20000117 PARAMETER Experiment Name: At_100uM_ABA_Mutants_cDNA_P Parameter: Treatment Value: 100uM ABA vs. No Treatment
  misc_feature: MA Experiment ID: 20000184 Result: Down-regulated in Transcription
  misc_feature: MA Experiment 20000184 PARAMETER Experiment Name: At_Shoots__P Parameter: Age (day) Value: 7
  misc_feature: MA Experiment 20000184 PARAMETER Experiment Name: At_Shoots__P Parameter: Tissue Value: Shoots vs. Whole Plant
  misc_feature: MA Experiment ID: 20001247 Result: Down-regulated in Transcription
  misc_feature: MA Experiment 20001247 PARAMETER Experiment Name: At_Far-red-induction_P Parameter: Age (day) Value: 7
  misc_feature: MA Experiment 20001247 PARAMETER Experiment Name: At_Far-red-induction_P Parameter: Light Value: Far-red vs. White
  misc_feature: MA Experiment 20001247 PARAMETER Experiment Name: At_Far-red-induction_P Parameter: Organism Value: A. thaliana
  misc_feature: MA Experiment 20001247 PARAMETER Experiment Name: At_Far-red-induction_P Parameter: Plant Line Value: Columbia
  misc_feature: MA Experiment 20001247 PARAMETER Experiment Name: At_Far-red-induction_P Parameter: Timepoint (hr) Value: 1
  misc_feature: MA Experiment 20001247 PARAMETER Experiment Name: At_Far-red-induction_P Parameter: Tissue Value: Whole Plant
  misc_feature: MA Experiment ID: 20001451 Result: Down-regulated in Transcription
  misc_feature: MA Experiment 20001451 PARAMETER Experiment Name: At_Far-red-induction_P Parameter: Age (day) Value: 7
  misc_feature: MA Experiment 20001451 PARAMETER Experiment Name: At_Far-red-induction_P Parameter: Light Value: Far-red vs. White
  misc_feature: MA Experiment 20001451 PARAMETER Experiment Name: At_Far-red-induction_P Parameter: Organism Value: A. thaliana
  misc_feature: MA Experiment 20001451 PARAMETER Experiment Name: At_Far-red-induction_P Parameter: Plant Line Value: Columbia
  misc_feature: MA Experiment 20001451 PARAMETER Experiment Name: At_Far-red-induction_P Parameter: Timepoint (hr) Value: 24
  misc_feature: MA Experiment 20001451 PARAMETER Experiment Name: At_Far-red-induction_P Parameter: Tissue Value: Whole Plant
  misc_feature: MA Experiment ID: 20001558 Result: Down-regulated in Transcription
  misc_feature: MA Experiment 20001558 PARAMETER Experiment Name: At_Drought_Soil_Dry_P Parameter: Age (day) Value: 27
  misc_feature: MA Experiment 20001558 PARAMETER Experiment Name: At_Drought_Soil_Dry_P Parameter: Organism Value: A. thaliana
  misc_feature: MA Experiment 20001558 PARAMETER Experiment Name: At_Drought_Soil_Dry_P Parameter: Plant Line Value: WS
  misc_feature: MA Experiment 20001558 PARAMETER Experiment Name: At_Drought_Soil_Dry_P Parameter: Post Timepoint (hr) Value: 6
  misc_feature: MA Experiment 20001558 PARAMETER Experiment Name: At_Drought_Soil_Dry_P Parameter: Post-Treatment Value: Re-Water vs. No Drought
  misc_feature: MA Experiment 20001558 PARAMETER Experiment Name: At_Drought_Soil_Dry_P Parameter: Timepoint (day) Value: 13
  misc_feature: MA Experiment 20001558 PARAMETER Experiment Name: At_Drought_Soil_Dry_P Parameter: Treatment Value: Drought vs. No Drought
tccctgttttaaaaagaagaatcgagtaatcgggtggttttgaagacgaagaaggactaagacatcacgaggaacacgatgggtgaagcggtcaaggatgggagagaagaagtgattcaagcttggtatatggatgatagtgaagaggatcagagacttcctcaccacaaggatcctaaagagtttgtatcgttggacaaacttgcagagctgggagtacttagctggagacttgatgctgataactatgaaaccgatgaggatttgaaaaagatccgtgaatctcgtggttactcttacatggacttttgtgaggtatgcccggaaaagcttccaaactatgaagtgaaagtgaagagctttttcgaagaacatttacacactgatgaggagatccgttactgcgttgcaggaactggttactttgatgtgagagatcgtaatgaagcttggattagggtattggtaaagaagggaggtatgatagtcttacctgctgggatctatcatcgcttcactgtggactctgacaactatatcaaggcaatgcggctattcgtgggtgaaccggtatggacaccatacaatcgcccacacgaccatcttcctgcaaggaaagaatatgtcgataacttcatgatcaatgcctcggcttagagagcttcctctctctatatctggctttctgaaacaaggatctataaacaaggcctacaataaagaaagctttcctgtcaagtattggatatttatatgtattcctgtgtagaatgatggcttttggtatgcttgagttgttgtaaacttagttacactctctgatatgtctctctttaccatctttgtcgtatcccatatacgaaaagattacattgggattcatattgtcttacgttcgttcctatgtgcaatatgttgagtttttac

SEQ ID NO: 105225 - protein, 192 aa, Arabidopsis thaliana
  peptide (1)..(192): Ceres Seq. ID no. 13616727
  misc_feature (14)..(168): Pfam Name: ARD/ARD' family Pfam Description: ARD/ARD' family
  misc_feature (1)..(192): Homolog of NCBI NO: 18414293 NR Description: expressed protein [Arabidopsis thaliana] unknown protein [Arabidopsis thaliana] At4g14716 [Arabidopsis thaliana] >gi|28973071|gb|AAO63860.1|
  misc_feature (1)..(187): Homolog of NCBI NO: 18414289 NR Description: expressed protein [Arabidopsis thaliana] AT4g14710/dl3395c [Arabidopsis thaliana]
  misc_feature (69)..(179): Homolog of NCBI NO: 7485194 NR Description: hypothetical protein - Arabidopsis thaliana hypothetical protein [Arabidopsis thaliana]
  misc_feature (1)..(75): Homolog of NCBI NO: 7485194 NR Description: hypothetical protein - Arabidopsis thaliana hypothetical protein [Arabidopsis thaliana]
  misc_feature (1)..(187): Homolog of NCBI NO: 15225298 NR Description: hypothetical protein [Arabidopsis thaliana]
  misc_feature (1)..(189): Homolog of NCBI NO: 7489559 NR Description: probable submergence induced, nickel-binding
  misc_feature (1)..(189): Homolog of NCBI NO: 14522834 NR Description: iron-deficiency induced gene [Hordeum vulgare]
  misc_feature (5)..(189): Homolog of NCBI NO: 34902616 NR Description: Putative probable submergence induced,
  misc_feature (1)..(183): Homolog of NCBI NO: 7489558 NR Description: probable submergence induced protein 2 - rice
  misc_feature (7)..(183): Homolog of NCBI NO: 37534408 NR Description: putative zinc finger protein ID1 [Oryza sativa
MGEAVKDGREEVIQAWYMDDSEEDQRLPHHKDPKEFVSLDKLAELGVLSWRLDADNYETDEDLKKIRESRGYSYMDFCEVCPEKLPNYEVKVKSFFEEHLHTDEEIRYCVAGTGYFDVRDRNEAWIRVLVKKGGMIVLPAGIYHRFTVDSDNYIKAMRLFVGEPVWTPYNRPHDHLPARKEYVDNFMINASA

SEQ ID NO: 105226 - protein, 175 aa, Arabidopsis thaliana
  peptide (1)..(175): Ceres Seq. ID no. 13616728
  misc_feature (1)..(151): Pfam Name: ARD/ARD' family Pfam Description: ARD/ARD' family
  misc_feature (1)..(175): Homolog of NCBI NO: 18414293 NR Description: expressed protein [Arabidopsis thaliana] unknown protein [Arabidopsis thaliana] At4g14716 [Arabidopsis thaliana] >gi|28973071|gb|AAO63860.1|
  misc_feature (1)..(170): Homolog of NCBI NO: 18414289 NR Description: expressed protein [Arabidopsis thaliana] AT4g14710/dl3395c [Arabidopsis thaliana]
  misc_feature (52)..(162): Homolog of NCBI NO: 7485194 NR Description: hypothetical protein - Arabidopsis thaliana hypothetical protein [Arabidopsis thaliana]
  misc_feature (1)..(58): Homolog of NCBI NO: 7485194 NR Description: hypothetical protein - Arabidopsis thaliana hypothetical protein [Arabidopsis thaliana]
  misc_feature (1)..(170): Homolog of NCBI NO: 15225298 NR Description: hypothetical protein [Arabidopsis thaliana]
  misc_feature (1)..(172): Homolog of NCBI NO: 7489559 NR Description: probable submergence induced, nickel-binding
  misc_feature (1)..(172): Homolog of NCBI NO: 14522834 NR Description: iron-deficiency induced gene [Hordeum vulgare]
  misc_feature (1)..(172): Homolog of NCBI NO: 34902616 NR Description: Putative probable submergence induced,
  misc_feature (1)..(166): Homolog of NCBI NO: 7489558 NR Description: probable submergence induced protein 2 - rice
  misc_feature (1)..(166): Homolog of NCBI NO: 37534408 NR Description: putative zinc finger protein ID1 [Oryza sativa
MDDSEEDQRLPHHKDPKEFVSLDKLAELGVLSWRLDADNYETDEDLKKIRESRGYSYMDFCEVCPEKLPNYEVKVKSFFEEHLHTDEEIRYCVAGTGYFDVRDRNEAWIRVLVKKGGMIVLPAGIYHRFTVDSDNYIKAMRLFVGEPVWTPYNRPHDHLPARKEYVDNFMINASA

SEQ ID NO: 105227 - protein, 118 aa, Arabidopsis thaliana
  peptide (1)..(118): Ceres Seq. ID no. 13616729
  misc_feature (1)..(94): Pfam Name: ARD/ARD' family Pfam Description: ARD/ARD' family
  misc_feature (1)..(118): Homolog of NCBI NO: 18414293 NR Description: expressed protein [Arabidopsis thaliana] unknown protein [Arabidopsis thaliana] At4g14716 [Arabidopsis thaliana] >gi|28973071|gb|AAO63860.1|
  misc_feature (1)..(113): Homolog of NCBI NO: 18414289 NR Description: expressed protein [Arabidopsis thaliana] AT4g14710/dl3395c [Arabidopsis thaliana]
  misc_feature (1)..(105): Homolog of NCBI NO: 7485194 NR Description: hypothetical protein - Arabidopsis thaliana hypothetical protein [Arabidopsis thaliana]
  misc_feature (1)..(113): Homolog of NCBI NO: 15225298 NR Description: hypothetical protein [Arabidopsis thaliana]
  misc_feature (1)..(115): Homolog of NCBI NO: 7489559 NR Description: probable submergence induced, nickel-binding
  misc_feature (1)..(115): Homolog of NCBI NO: 14522834 NR Description: iron-deficiency induced gene [Hordeum vulgare]
  misc_feature (1)..(115): Homolog of NCBI NO: 34902616 NR Description: Putative probable submergence induced,
  misc_feature (1)..(109): Homolog of NCBI NO: 7489558 NR Description: probable submergence induced protein 2 - rice
  misc_feature (1)..(109): Homolog of NCBI NO: 37534408 NR Description: putative zinc finger protein ID1 [Oryza sativa
  misc_feature (1)..(109): Homolog of NCBI NO: 10177955 NR Description: gene_id:MQD19.21~pir||T02918~similar to unknown
MDFCEVCPEKLPNYEVKVKSFFEEHLHTDEEIRYCVAGTGYFDVRDRNEAWIRVLVKKGGMIVLPAGIYHRFTVDSDNYIKAMRLFVGEPVWTPYNRPHDHLPARKEYVDNFMINASA

SEQ ID NO: 105228 - DNA, 729 bp, Arabidopsis thaliana
  misc_feature (1)..(729): Ceres Seq. ID no. 13616730
  misc_feature: MA Experiment ID: 108473 Result: Down-regulated in Transcription
  misc_feature: MA Experiment 108473 PARAMETER Experiment Name: At_Drought_Flowers_cDNA_P Parameter: Timepoint (hr) Value: 7 d
  misc_feature: MA Experiment 108473 PARAMETER Experiment Name: At_Drought_Flowers_cDNA_P Parameter: Tissue Value: Flower
  misc_feature: MA Experiment 108473 PARAMETER Experiment Name: At_Drought_Flowers_cDNA_P Parameter: Treatment Value: Drought vs. No Drought
  misc_feature: MA Experiment ID: 108501 Result: Down-regulated in Transcription
  misc_feature: MA Experiment 108501 PARAMETER Experiment Name: At_ap2_floral_buds_cDNA_P Parameter: Plant Line Value: ap2 (Ler.)
  misc_feature: MA Experiment 108501 PARAMETER Experiment Name: At_ap2_floral_buds_cDNA_P Parameter: Tissue Value: Closed Flower
  misc_feature: MA Experiment ID: 108595 Result: Up-regulated in Transcription
  misc_feature: MA Experiment 108595 PARAMETER Experiment Name: At_Ler-pi_Ovule_cDNA_P Parameter: Plant Line Value: null
  misc_feature: MA Experiment ID: 108607 Result: Up-regulated in Transcription
  misc_feature: MA Experiment 108607 PARAMETER Experiment Name: At_100uM_ABA_cDNA_P Parameter: Timepoint (hr) Value: 4
  misc_feature: MA Experiment 108607 PARAMETER Experiment Name: At_100uM_ABA_cDNA_P Parameter: Tissue Value: Aerial
  misc_feature: MA Experiment 108607 PARAMETER Experiment Name: At_100uM_ABA_cDNA_P Parameter: Treatment Value: 100uM ABA vs. No Treatment
  misc_feature: MA Experiment ID: 20000087 Result: Up-regulated in Transcription
  misc_feature: MA Experiment 20000087 PARAMETER Experiment Name: At_100uM_ABA_Mutants_cDNA_P Parameter: Plant Line Value: WS
  misc_feature: MA Experiment 20000087 PARAMETER Experiment Name: At_100uM_ABA_Mutants_cDNA_P Parameter: Timepoint (hr) Value: 6
  misc_feature: MA Experiment 20000087 PARAMETER Experiment Name: At_100uM_ABA_Mutants_cDNA_P Parameter: Tissue Value: Aerial
  misc_feature: MA Experiment 20000087 PARAMETER Experiment Name: At_100uM_ABA_Mutants_cDNA_P Parameter: Treatment Value: 100uM ABA vs. No Treatment
  misc_feature: MA Experiment ID: 20000169 Result: Up-regulated in Transcription
  misc_feature: MA Experiment 20000169 PARAMETER Experiment Name: At_100uM_ABA_P Parameter: Age (day) Value: 14
  misc_feature: MA Experiment 20000169 PARAMETER Experiment Name: At_100uM_ABA_P Parameter: Organism Value: A. thaliana
  misc_feature: MA Experiment 20000169 PARAMETER Experiment Name: At_100uM_ABA_P Parameter: Plant Line Value: WS
  misc_feature: MA Experiment 20000169 PARAMETER Experiment Name: At_100uM_ABA_P Parameter: Timepoint (hr) Value: 6
  misc_feature: MA Experiment 20000169 PARAMETER Experiment Name: At_100uM_ABA_P Parameter: Tissue Value: Aerial
  misc_feature: MA Experiment 20000169 PARAMETER Experiment Name: At_100uM_ABA_P Parameter: Treatment Value: 100uM ABA vs. No Treatment
  misc_feature: MA Experiment ID: 20000182 Result: Up-regulated in Transcription
  misc_feature: MA Experiment 20000182 PARAMETER Experiment Name: At_2mM_SA_P Parameter: Age (day) Value: 14
  misc_feature: MA Experiment 20000182 PARAMETER Experiment Name: At_2mM_SA_P Parameter: Organism Value: A. thaliana
  misc_feature: MA Experiment 20000182 PARAMETER Experiment Name: At_2mM_SA_P Parameter: Plant Line Value: WS
  misc_feature: MA Experiment 20000182 PARAMETER Experiment Name: At_2mM_SA_P Parameter: Timepoint (hr) Value: 6
  misc_feature: MA Experiment 20000182 PARAMETER Experiment Name: At_2mM_SA_P Parameter: Tissue Value: Aerial
  misc_feature: MA Experiment 20000182 PARAMETER Experiment Name: At_2mM_SA_P Parameter: Treatment Value: 2mM SA vs. No Treatment
  misc_feature: MA Experiment ID: 20000235 Result: Down-regulated in Transcription
  misc_feature: MA Experiment 20000235 PARAMETER Experiment Name: At_Siliques_P Parameter: Age (day) Value: 21
  misc_feature: MA Experiment 20000235 PARAMETER Experiment Name: At_Siliques_P Parameter: Organism Value: A. thaliana
  misc_feature: MA Experiment 20000235 PARAMETER Experiment Name: At_Siliques_P Parameter: Plant Line Value: WS
  misc_feature: MA Experiment 20000235 PARAMETER Experiment Name: At_Siliques_P Parameter: Tissue Value: 5-10mm Siliques vs. Whole Plant
  misc_feature: MA Experiment ID: 20000265 Result: Up-regulated in Transcription
  misc_feature: MA Experiment 20000265 PARAMETER Experiment Name: At_Open_Flower_P Parameter: Age (day) Value: 21
  misc_feature: MA Experiment 20000265 PARAMETER Experiment Name: At_Open_Flower_P Parameter: Plant Line Value: WS
  misc_feature: MA Experiment 20000265 PARAMETER Experiment Name: At_Open_Flower_P Parameter: Tissue Value: Closed Flower vs. Whole Plant
  misc_feature: MA Experiment ID: 20000267 Result: Up-regulated in Transcription
  misc_feature: MA Experiment 20000267 PARAMETER Experiment Name: At_Drought_P Parameter: Age (day) Value: 7
  misc_feature: MA Experiment 20000267 PARAMETER Experiment Name: At_Drought_P Parameter: Organism Value: A. thaliana
  misc_feature: MA Experiment 20000267 PARAMETER Experiment Name: At_Drought_P Parameter: Plant Line Value: WS
  misc_feature: MA Experiment 20000267 PARAMETER Experiment Name: At_Drought_P Parameter: Timepoint (hr) Value: 6
  misc_feature: MA Experiment 20000267 PARAMETER Experiment Name: At_Drought_P Parameter: Tissue Value: Whole Plant
  misc_feature: MA Experiment 20000267 PARAMETER Experiment Name: At_Drought_P Parameter: Treatment Value: Drought vs. No Drought
  misc_feature: MA Experiment ID: 20000286 Result: Up-regulated in Transcription
  misc_feature: MA Experiment 20000286 PARAMETER Experiment Name: At_Open_Flower_P Parameter: Age (day) Value: 21
  misc_feature: MA Experiment 20000286 PARAMETER Experiment Name: At_Open_Flower_P Parameter: Plant Line Value: WS
  misc_feature: MA Experiment 20000286 PARAMETER Experiment Name: At_Open_Flower_P Parameter: Tissue Value: Half Open vs. Whole Plant
  misc_feature: MA Experiment ID: 20000436 Result: Up-regulated in Transcription
  misc_feature: MA Experiment 20000436 PARAMETER Experiment Name: At_Drought_P Parameter: Age (day) Value: 7
  misc_feature: MA Experiment 20000436 PARAMETER Experiment Name: At_Drought_P Parameter: Organism Value: A. thaliana
  misc_feature: MA Experiment 20000436 PARAMETER Experiment Name: At_Drought_P Parameter: Plant Line Value: WS
  misc_feature: MA Experiment 20000436 PARAMETER Experiment Name: At_Drought_P Parameter: Timepoint (hr) Value: 12
  misc_feature: MA Experiment 20000436 PARAMETER Experiment Name: At_Drought_P Parameter: Tissue Value: Whole Plant
  misc_feature: MA Experiment 20000436 PARAMETER Experiment Name: At_Drought_P Parameter: Treatment Value: Drought vs. No Drought
  misc_feature: MA Experiment ID: 20000437 Result: Up-regulated in Transcription
  misc_feature: MA Experiment 20000437 PARAMETER Experiment Name: At_Drought_P Parameter: Age (day) Value: 8
  misc_feature: MA Experiment 20000437 PARAMETER Experiment Name: At_Drought_P Parameter: Organism Value: A. thaliana
  misc_feature: MA Experiment 20000437 PARAMETER Experiment Name: At_Drought_P Parameter: Plant Line Value: WS
  misc_feature: MA Experiment 20000437 PARAMETER Experiment Name: At_Drought_P Parameter: Timepoint (hr) Value: 24
  misc_feature: MA Experiment 20000437 PARAMETER Experiment Name: At_Drought_P Parameter: Tissue Value: Whole Plant
  misc_feature: MA Experiment 20000437 PARAMETER Experiment Name: At_Drought_P Parameter: Treatment Value: Drought vs. No Drought
  misc_feature: MA Experiment ID: 20001904 Result: Up-regulated in Transcription
  misc_feature: MA Experiment 20001904 PARAMETER Experiment Name: At_Drought_Reproduction_P Parameter: Age (day) Value: 37
  misc_feature: MA Experiment 20001904 PARAMETER Experiment Name: At_Drought_Reproduction_P Parameter: Organism Value: A. thaliana
  misc_feature: MA Experiment 20001904 PARAMETER Experiment Name: At_Drought_Reproduction_P Parameter: Plant Line Value: WS
  misc_feature: MA Experiment 20001904 PARAMETER Experiment Name: At_Drought_Reproduction_P Parameter: Timepoint (day) Value: 7
  misc_feature: MA Experiment 20001904 PARAMETER Experiment Name: At_Drought_Reproduction_P Parameter: Tissue Value: Rosettes
  misc_feature: MA Experiment 20001904 PARAMETER Experiment Name: At_Drought_Reproduction_P Parameter: Treatment Value: Drought vs. No Drought
  misc_feature: MA Experiment ID: 20001910 Result: Down-regulated in Transcription
  misc_feature: MA Experiment 20001910 PARAMETER Experiment Name: At_Drought_Reproduction_P Parameter: Age (day) Value: 37
  misc_feature: MA Experiment 20001910 PARAMETER Experiment Name: At_Drought_Reproduction_P Parameter: Organism Value: A. thaliana
  misc_feature: MA Experiment 20001910 PARAMETER Experiment Name: At_Drought_Reproduction_P Parameter: Plant Line Value: WS
  misc_feature: MA Experiment 20001910 PARAMETER Experiment Name: At_Drought_Reproduction_P Parameter: Timepoint (day) Value: 7
  misc_feature: MA Experiment 20001910 PARAMETER Experiment Name: At_Drought_Reproduction_P Parameter: Tissue Value: Flowers
  misc_feature: MA Experiment 20001910 PARAMETER Experiment Name: At_Drought_Reproduction_P Parameter: Treatment Value: Drought vs. No Drought
acaaaccattaagcgatcaaacaactaaattaaaaaaaaatcttgagagattcttggaacacaagaaaaacatgaaacctagaatgtgtttaatcttgtttattgctttaatgagagtaatgtcgattgtttctgctcagtcgagttgcacaaatgttctaatcagcatggcgccgtgtctcagcttcatcactcaaaacacttctctcccgtctcaacaatgttgtaaccagttggctcatgttgtccggtattcttctgagtgtttgtgtcaggttctcgatggtggaggttctcagcttgggatcaatgttaatgagacacaagctcttgctttgcctaaagcttgtcatgttgaaactcctcctgctagtcgctgccatagtggttcttcggttaattcacattcagaacatggaaatggatcaaaaacagtcccaagagaaaagtcatcatctgatggttctattaagttctcattccctcttctcgccatcctattcacagcttcttacattacattaatctacgcaaaatactgacttattttaccaataaagcttttggcctctttgaagaacatattcatttttagtctctattaaatcgcggtgtattgtgctgaagtattttgtgctctaaatccctactttctaggtgatattggtttgtagtccaaagagtgtgattgtatatctttgatttatgcaataaacattattttctagc

SEQ ID NO: 105229 - protein, 179 aa, Arabidopsis thaliana
  peptide (1)..(179): Ceres Seq. ID no. 13616731
  misc_feature (49)..(126): Pfam Name: Protease inhibitor/seed storage/LTP family Pfam Description: Protease inhibitor/seed storage/LTP family
  misc_feature (24)..(179): Homolog of NCBI NO: 18414320 NR Description: protease inhibitor/seed storage/lipid transfer
  misc_feature (24)..(179): Homolog of NCBI NO: 21592722 NR Description: unknown [Arabidopsis thaliana]
  misc_feature (24)..(174): Homolog of NCBI NO: 18403453 NR Description: protease inhibitor/seed storage/lipid transfer (LTP) family [Arabidopsis thaliana] >gi|11994292|dbj|BAB01475.1| to unknown protein [Arabidopsis thaliana]
  misc_feature (28)..(174): Homolog of NCBI NO: 21554014 NR Description: unknown [Arabidopsis thaliana]
  misc_feature (28)..(174): Homolog of NCBI NO: 24417478 NR Description: unknown [Arabidopsis thaliana]
  misc_feature (31)..(177): Homolog of NCBI NO: 25553595 NR Description: OJ1656_E11.26 [Oryza sativa (japonica
  misc_feature (44)..(146): Homolog of NCBI NO: 25553602 NR Description: OJ1656_E11.34 [Oryza sativa (japonica
  misc_feature (27)..(130): Homolog of NCBI NO: 18407534 NR Description: protease inhibitor/seed storage/lipid transfer (LTP) family [Arabidopsis thaliana] >gi|25409096|pir||G84923
  misc_feature (27)..(130): Homolog of NCBI NO: 21592774 NR Description: unknown [Arabidopsis thaliana]
  misc_feature (29)..(128): Homolog of NCBI NO: 28269454 NR Description: putative protease inhibitor [Oryza sativa
KPLSDQTTKLKKNLERFLEHKKNMKPRMCLILFIALMRVMSIVSAQSSCTNVLISMAPCLSFITQNTSLPSQQCCNQLAHVVRYSSECLCQVLDGGGSQLGINVNETQALALPKACHVETPPASRCHSGSSVNSHSEHGNGSKTVPREKSSSDGSIKFSFPLLAILFTASYITLIYAKY

SEQ ID NO: 105230 - protein, 156 aa, Arabidopsis thaliana
  peptide (1)..(156): Ceres Seq. ID no. 13616732
  misc_feature (26)..(103): Pfam Name: Protease inhibitor/seed storage/LTP family Pfam Description: Protease inhibitor/seed storage/LTP family
  misc_feature (1)..(156): Homolog of NCBI NO: 18414320 NR Description: protease inhibitor/seed storage/lipid transfer
  misc_feature (1)..(156): Homolog of NCBI NO: 21592722 NR Description: unknown [Arabidopsis thaliana]
  misc_feature (1)..(151): Homolog of NCBI NO: 18403453 NR Description: protease inhibitor/seed storage/lipid transfer (LTP) family [Arabidopsis thaliana] >gi|11994292|dbj|BAB01475.1| to unknown protein [Arabidopsis thaliana]
  misc_feature (5)..(151): Homolog of NCBI NO: 21554014 NR Description: unknown [Arabidopsis thaliana]
  misc_feature (5)..(151): Homolog of NCBI NO: 24417478 NR Description: unknown [Arabidopsis thaliana]
  misc_feature (8)..(154): Homolog of NCBI NO: 25553595 NR Description: OJ1656_E11.26 [Oryza sativa (japonica
  misc_feature (21)..(123): Homolog of NCBI NO: 25553602 NR Description: OJ1656_E11.34 [Oryza sativa (japonica
  misc_feature (4)..(107): Homolog of NCBI NO: 18407534 NR Description: protease inhibitor/seed storage/lipid transfer (LTP) family [Arabidopsis thaliana] >gi|25409096|pir||G84923
  misc_feature (4)..(107): Homolog of NCBI NO: 21592774 NR Description: unknown [Arabidopsis thaliana]
  misc_feature (6)..(105): Homolog of NCBI NO: 28269454 NR Description: putative protease inhibitor [Oryza sativa
MKPRMCLILFIALMRVMSIVSAQSSCTNVLISMAPCLSFITQNTSLPSQQCCNQLAHVVRYSSECLCQVLDGGGSQLGINVNETQALALPKACHVETPPASRCHSGSSVNSHSEHGNGSKTVPREKSSSDGSIKFSFPLLAILFTASYITLIYAKY

SEQ ID NO: 105231 - protein, 152 aa, Arabidopsis thaliana
  peptide (1)..(152): Ceres Seq. ID no. 13616733
  misc_feature (22)..(99): Pfam Name: Protease inhibitor/seed storage/LTP family Pfam Description: Protease inhibitor/seed storage/LTP family
  misc_feature (1)..(152): Homolog of NCBI NO: 18414320 NR Description: protease inhibitor/seed storage/lipid transfer
  misc_feature (1)..(152): Homolog of NCBI NO: 21592722 NR Description: unknown [Arabidopsis thaliana]
  misc_feature (1)..(147): Homolog of NCBI NO: 18403453 NR Description: protease inhibitor/seed storage/lipid transfer (LTP) family [Arabidopsis thaliana] >gi|11994292|dbj|BAB01475.1| to unknown protein [Arabidopsis thaliana]
  misc_feature (1)..(147): Homolog of NCBI NO: 21554014 NR Description: unknown [Arabidopsis thaliana]
  misc_feature (1)..(147): Homolog of NCBI NO: 24417478 NR Description: unknown [Arabidopsis thaliana]
  misc_feature (4)..(150): Homolog of NCBI NO: 25553595 NR Description: OJ1656_E11.26 [Oryza sativa (japonica
  misc_feature (17)..(119): Homolog of NCBI NO: 25553602 NR Description: OJ1656_E11.34 [Oryza sativa (japonica
  misc_feature (1)..(103): Homolog of NCBI NO: 18407534 NR Description: protease inhibitor/seed storage/lipid transfer (LTP) family [Arabidopsis thaliana] >gi|25409096|pir||G84923
  misc_feature (1)..(103): Homolog of NCBI NO: 21592774 NR Description: unknown [Arabidopsis thaliana]
  misc_feature (2)..(101): Homolog of NCBI NO: 28269454 NR Description: putative protease inhibitor [Oryza sativa
MCLILFIALMRVMSIVSAQSSCTNVLISMAPCLSFITQNTSLPSQQCCNQLAHVVRYSSECLCQVLDGGGSQLGINVNETQALALPKACHVETPPASRCHSGSSVNSHSEHGNGSKTVPREKSSSDGSIKFSFPLLAILFTASYITLIYAKY

SEQ ID NO: 105232 - DNA, 1650 bp, Arabidopsis thaliana
  misc_feature (1)..(1650): Ceres Seq. ID no. 13616757
  misc_feature: MA Experiment ID: 20000314 Result: Down-regulated in Transcription
  misc_feature: MA Experiment 20000314 PARAMETER Experiment Name: At_14day_Shoots-Roots_Sub_P Parameter: Age (day) Value: 14
  misc_feature: MA Experiment 20000314 PARAMETER Experiment Name: At_14day_Shoots-Roots_Sub_P Parameter: Organism Value: A. thaliana
  misc_feature: MA Experiment 20000314 PARAMETER Experiment Name: At_14day_Shoots-Roots_Sub_P Parameter: Plant Line Value: WS
  misc_feature: MA Experiment 20000314 PARAMETER Experiment Name: At_14day_Shoots-Roots_Sub_P Parameter: Tissue Value: Roots vs. Whole Plant
  misc_feature: MA Experiment ID: 20000315 Result: Down-regulated in Transcription
  misc_feature: MA Experiment 20000315 PARAMETER Experiment Name: At_14day_Shoots-Roots_Sub_P Parameter: Age (day) Value: 14
  misc_feature: MA Experiment 20000315 PARAMETER Experiment Name: At_14day_Shoots-Roots_Sub_P Parameter: Organism Value: A. thaliana
  misc_feature: MA Experiment 20000315 PARAMETER Experiment Name: At_14day_Shoots-Roots_Sub_P Parameter: Plant Line Value: WS
  misc_feature: MA Experiment 20000315 PARAMETER Experiment Name: At_14day_Shoots-Roots_Sub_P Parameter: Tissue Value: Shoots vs. Whole Plant
  misc_feature: MA Experiment ID: 20000328 Result: Down-regulated in Transcription
  misc_feature: MA Experiment 20000328 PARAMETER Experiment Name: At_42deg_Heat_Sub_P Parameter: Age (day) Value: 14
  misc_feature: MA Experiment 20000328 PARAMETER Experiment Name: At_42deg_Heat_Sub_P Parameter: Organism Value: A. thaliana
  misc_feature: MA Experiment 20000328 PARAMETER Experiment Name: At_42deg_Heat_Sub_P Parameter: Plant Line Value: WS
  misc_feature: MA Experiment 20000328 PARAMETER Experiment Name: At_42deg_Heat_Sub_P Parameter: Temperature (deg C) Value: 42 vs. 22
  misc_feature: MA Experiment 20000328 PARAMETER Experiment Name: At_42deg_Heat_Sub_P Parameter: Timepoint (hr) Value: 6
  misc_feature: MA Experiment 20000328 PARAMETER Experiment Name: At_42deg_Heat_Sub_P Parameter: Tissue Value: Aerial
  misc_feature: MA Experiment ID: 20000355 Result: Down-regulated in Transcription
  misc_feature: MA Experiment 20000355 PARAMETER Experiment Name: At_Siliques_Sub_P Parameter: Age (day) Value: 21
  misc_feature: MA Experiment 20000355 PARAMETER Experiment Name: At_Siliques_Sub_P Parameter: Organism Value: A. thaliana
  misc_feature: MA Experiment 20000355 PARAMETER Experiment Name: At_Siliques_Sub_P Parameter: Plant Line Value: WS
  misc_feature: MA Experiment 20000355 PARAMETER Experiment Name: At_Siliques_Sub_P Parameter: Tissue Value: Less Than 5mm Siliques vs. Whole Plant
  misc_feature: MA Experiment ID: 20000440 Result: Down-regulated in Transcription
  misc_feature: MA Experiment 20000440 PARAMETER Experiment Name: At_Closed-Flower__Sub_P Parameter: Tissue Value: Closed Flower vs. Whole Plant
aacgaaaagtccaaaaacgtaaaaacagaaatgaagaagattgagctcgtgttcataccttcgccgggaatcggccatctccggccaaccgtgaagctagcaaagcaactcatcggaagcgaagaacattttttcaatcaccgtaatcatcatcccttctagaaacgacgccggtgatgcaaccgcctatatcgcatccctcgttgcagagtctcaagatcgcctccgctacgaacccatctccgtcgaaaaacaaccaccaaccgcaaatcttgagccgtctcaagtctacatcgagaaacaaaaaccacaagtgagagacaccgtctccagaatcatcaatccaacaagaaaactcgccggattcgtggtggacatgttctgttcttcaatgatcgatatagctaacgaatttggagttccttgttatatgatctacacatcaaacgctacgtttttgggaatcacacttcacgttcaagaaatgtacgacgacaaaaagtatgacgtcagcgatttggatgagtcagtcaacgaattggagtttccttgtttgactcgtccttatccagtgaagtgccttcctcatatccttagttcaaaagattggttacctttttttgcagctcaaggtaggtctttccggaagatgaaaggtattttggtaaatacagttgctgagcttgagcctcacgctttgaagatgtttaacaatgttgatcttcctcaagcttatcctgttggaccagtgttgcatcttgataacggcgatgacgacgatgaaaagagattggaggttttgcggtggcttgatgatcaaccgcctaaatctgttttgtttctctgttttggaagtatgggaggtttcactgaggaacaaactagagaggtagctgtggcgttaaaccgaagtggtcaccggtttctttggtctctccgtcgtgcatcgccgaatataatgatggaacgtcccggagattataagaatcttgaggaggttttaccggacgggttcttggaacggactttggatagagggaaagtgattggatgggctccacaagtggcggtgttagagaagccggcgataggagggtttgttactcattgtgggtggaactctatgttagagagcttgtggtttggtgttccgatggtgacgtggccgctttacgcggagcagaaggttaacgcgtttgagatggtggaggagctgggattggcggtggagatacgtaagtgcattagtggagatttgttgttgatcggagagatggagatagtgacggcggaggatatagagagagctataaggtgtgtgatggagcaggatagtgatgtaaggagtcgagtgaaggagatggcggagaagtgtcacgtggcgttgatggacggtggatcttccaagacggctttgcaaaagtttattcaagacgtgatagagaatgttgcttaaattggatagagagactcgcatggaattccagactcgcatgttgagagttcactatgagatcgatgactcaggtccatgtgttattatgtatgttatgtcgttttcgtttttctttttttgttggaatttgtatacgttgtgtacttgtgtttgtgtgtctttttaaaatgtttacgtaataaaatgtgatacag

SEQ ID NO: 105233 - protein, 359 aa, Arabidopsis thaliana; identical to SEQ ID NO: 49769
  peptide (1)..(359): Ceres Seq. ID no. 13616758
  misc_feature (1)..(358): Pfam Name: UDP-glucoronosyl and UDP-glucosyl transferase Pfam Description: UDP-glucoronosyl and UDP-glucosyl transferase
  misc_feature (1)..(359): Homolog of NCBI NO: 7488111 NR Description: probable glucosyltransferase - Arabidopsis >gi|2244884|emb|CAB10305.1| glucosyltransferase [Arabidopsis >gi|7268273|emb|CAB78568.1| glucosyltransferase [Arabidopsis
  misc_feature (1)..(358): Homolog of NCBI NO: 15233761 NR Description: UDP-glycosyltransferase family [Arabidopsis
  misc_feature (1)..(359): Homolog of NCBI NO: 30683191 NR Description: UDP-glycosyltransferase family [Arabidopsis >gi|26450578|dbj|BAC42401.1| putative glucosyltransferase
  misc_feature (1)..(358): Homolog of NCBI NO: 11994646 NR Description: UTP-glucose glucosyltransferase [Arabidopsis
  misc_feature (1)..(358): Homolog of NCBI NO: 15233157 NR Description: glycosyltransferase family [Arabidopsis thaliana]
  misc_feature (1)..(359): Homolog of NCBI NO: 11994645 NR Description: UTP-glucose glucosyltransferase [Arabidopsis
  misc_feature (1)..(359): Homolog of NCBI NO: 15233151 NR Description: glycosyltransferase family [Arabidopsis thaliana]
  misc_feature (1)..(359): Homolog of NCBI NO: 15233158 NR Description: glycosyltransferase family [Arabidopsis thaliana]
  misc_feature (1)..(359): Homolog of NCBI NO: 15233155 NR Description: UDP-glycosyltransferase family [Arabidopsis
  misc_feature (1)..(358): Homolog of NCBI NO: 15233149 NR Description: UDP-glycosyltransferase family [Arabidopsis

SEQ ID NO: 105234 - protein, 354 aa, Arabidopsis thaliana; identical to SEQ ID NO: 49770
  peptide (1)..(354): Ceres Seq. ID no. 13616759
  misc_feature (1)..(353): Pfam Name: UDP-glucoronosyl and UDP-glucosyl transferase Pfam Description: UDP-glucoronosyl and UDP-glucosyl transferase
  misc_feature (1)..(354): Homolog of NCBI NO: 7488111 NR Description: probable glucosyltransferase - Arabidopsis >gi|2244884|emb|CAB10305.1| glucosyltransferase [Arabidopsis >gi|7268273|emb|CAB78568.1| glucosyltransferase [Arabidopsis
  misc_feature (1)..(353): Homolog of NCBI NO: 15233761 NR Description: UDP-glycosyltransferase family [Arabidopsis
  misc_feature (1)..(354): Homolog of NCBI NO: 30683191 NR Description: UDP-glycosyltransferase family [Arabidopsis >gi|26450578|dbj|BAC42401.1| putative glucosyltransferase
  misc_feature (1)..(353): Homolog of NCBI NO: 11994646 NR Description: UTP-glucose glucosyltransferase [Arabidopsis
  misc_feature (1)..(353): Homolog of NCBI NO: 15233157 NR Description: glycosyltransferase family [Arabidopsis thaliana]
  misc_feature (1)..(354): Homolog of NCBI NO: 11994645 NR Description: UTP-glucose glucosyltransferase [Arabidopsis
  misc_feature (1)..(354): Homolog of NCBI NO: 15233151 NR Description: glycosyltransferase family [Arabidopsis thaliana]
  misc_feature (1)..(354): Homolog of NCBI NO: 15233158 NR Description: glycosyltransferase family [Arabidopsis thaliana]
  misc_feature (1)..(354): Homolog of NCBI NO: 15233155 NR Description: UDP-glycosyltransferase family [Arabidopsis
  misc_feature (1)..(353): Homolog of NCBI NO: 15233149 NR Description: UDP-glycosyltransferase family [Arabidopsis

SEQ ID NO: 105235 - protein, 341 aa, Arabidopsis thaliana
  peptide (1)..(341): Ceres Seq. ID no. 13616760
  misc_feature (1)..(340): Pfam Name: UDP-glucoronosyl and UDP-glucosyl transferase Pfam Description: UDP-glucoronosyl and UDP-glucosyl transferase
  misc_feature (1)..(341): Homolog of NCBI NO: 7488111 NR Description: probable glucosyltransferase - Arabidopsis >gi|2244884|emb|CAB10305.1| glucosyltransferase [Arabidopsis >gi|7268273|emb|CAB78568.1| glucosyltransferase [Arabidopsis
  misc_feature (1)..(340): Homolog of NCBI NO: 15233761 NR Description: UDP-glycosyltransferase family [Arabidopsis
  misc_feature (1)..(341): Homolog of NCBI NO: 30683191 NR Description: UDP-glycosyltransferase family [Arabidopsis >gi|26450578|dbj|BAC42401.1| putative glucosyltransferase
  misc_feature (1)..(340): Homolog of NCBI NO: 11994646 NR Description: UTP-glucose glucosyltransferase [Arabidopsis
  misc_feature (1)..(340): Homolog of NCBI NO: 15233157 NR Description: glycosyltransferase family [Arabidopsis thaliana]
  misc_feature (1)..(341): Homolog of NCBI NO: 11994645 NR Description: UTP-glucose glucosyltransferase [Arabidopsis
  misc_feature (1)..(341): Homolog of NCBI NO: 15233151 NR Description: glycosyltransferase family [Arabidopsis thaliana]
  misc_feature (1)..(341): Homolog of NCBI NO: 15233158 NR Description: glycosyltransferase family [Arabidopsis thaliana]
  misc_feature (1)..(341): Homolog of NCBI NO: 15233155 NR Description: UDP-glycosyltransferase family [Arabidopsis
  misc_feature (1)..(340): Homolog of NCBI NO: 15233149 NR Description: UDP-glycosyltransferase family [Arabidopsis
MIYTSNATFLGITLHVQEMYDDKKYDVSDLDESVNELEFPCLTRPYPVKCLPHILSSKDWLPFFAAQGRSFRKMKGILVNTVAELEPHALKMFNNVDLPQAYPVGPVLHLDNGDDDDEKRLEVLRWLDDQPPKSVLFLCFGSMGGFTEEQTREVAVALNRSGHRFLWSLRRASPNIMMERPGDYKNLEEVLPDGFLERTLDRGKVIGWAPQVAVLEKPAIGGFVTHCGWNSMLESLWFGVPMVTWPLYAEQKVNAFEMVEELGLAVEIRKCISGDLLLIGEMEIVTAEDIERAIRCVMEQDSDVRSRVKEMAEKCHVALMDGGSSKTALQKFIQDVIENVA

SEQ ID NO: 105236 - DNA, 1015 bp, Arabidopsis thaliana
  misc_feature (1)..(1015): Ceres Seq. ID no. 13616769
  misc_feature: MA Experiment ID: 108434 Result: Down-regulated in Transcription
  misc_feature: MA Experiment 108434 PARAMETER Experiment Name: At_Root_Tips_cDNA_P Parameter: Tissue Value: Root Tips
  misc_feature: MA Experiment ID: 108573 Result: Up-regulated in Transcription
  misc_feature: MA Experiment 108573 PARAMETER Experiment Name: At_Drought_cDNA_P Parameter: Timepoint (hr) Value: 6
  misc_feature: MA Experiment 108573 PARAMETER Experiment Name: At_Drought_cDNA_P Parameter: Tissue Value: Aerial
  misc_feature: MA Experiment 108573 PARAMETER Experiment Name: At_Drought_cDNA_P Parameter: Treatment Value: Drought vs. No Drought
  misc_feature: MA Experiment ID: 108585 Result: Up-regulated in Transcription
  misc_feature: MA Experiment 108585 PARAMETER Experiment Name: At_5mM_NaNP_cDNA_P Parameter: Timepoint (hr) Value: 6
  misc_feature: MA Experiment 108585 PARAMETER Experiment Name: At_5mM_NaNP_cDNA_P Parameter: Tissue Value: Aerial
  misc_feature: MA Experiment 108585 PARAMETER Experiment Name: At_5mM_NaNP_cDNA_P Parameter: Treatment Value: null
  misc_feature: MA Experiment ID: 108668 Result: Up-regulated in Transcription
  misc_feature: MA Experiment 108668 PARAMETER Experiment Name: At_2mM_SA_cDNA_P Parameter: Plant Line Value: WS
  misc_feature: MA Experiment 108668 PARAMETER Experiment Name: At_2mM_SA_cDNA_P Parameter: Timepoint (hr) Value: 6
  misc_feature: MA Experiment 108668 PARAMETER Experiment Name: At_2mM_SA_cDNA_P Parameter: Treatment Value: 2mM SA vs. No Treatment
  misc_feature: MA Experiment ID: 20000224 Result: Down-regulated in Transcription
attttttcccagaatcaaccagatctgctttcgaagacgaatctagctattagccatggacaaaccgtacggatacgcgagcgtgagcatgagcggcatagatcgttccgccggaaaggatattgatcttgagatgggagtcggagaagcgacgctttatcctgggctaagttacggcgagaatcagctccgatggggatttattcgtaaggtctatgggattctctcagctcagcttcttcttacgacgcttatctccgccgtcgttgttcttaatcctcctgttaacgatctcttgaccggatctcctgggattcttctcttcctctgcatcgttcccttcatcttaatctggcctctgcacatttaccaccagaagcatcctgttaacctgatcctccttgccctcttcactgtttcattgagtttcactgttggtgtcagttgtgctatgacagaaggacgaattgtgctacaagccttgatattgactctgtctgtggtcggatctctaaccgcatacactttctgggctgcaaagaagggaaaagacttcagcttccttggacccattctcttcaccagcctcatcattcttgtagtgaccagcttcatccagatgttcttccctcttggcccgacttctgttgccgtatacggaggattcagtgccttggtattctgcggatacatagtctatgataccgacaacctcatcaagcgtttcacatatgacgaatacatcctagcatcagtagctctctacttggacatcctcaatctcttcttgaccatattgcgtatactgaggcaaggcgacaactgaaaggcataaaacgatgcttcagtgatgtgatccagtttataactataagagaatccaaaagcctttatgtgtgtatatctgatttctgtttggagaattaagtatatgatgctatgtggttaaacgattgatataaacaaaatcaagcaatgtcgattttcaacttcaaataaatttgttaattttggc

SEQ ID NO: 105237 - protein, 256 aa, Arabidopsis thaliana; identical to SEQ ID NO: 29776
  peptide (1)..(256): Ceres Seq. ID no. 13616770
  misc_feature (42)..(255): Pfam Name: Uncharacterised protein family UPF0005 Pfam Description: Uncharacterised protein family UPF0005
  misc_feature (1)..(256): Homolog of NCBI NO: 18414455 NR Description: expressed protein [Arabidopsis thaliana] AT4g15470/dl3775w [Arabidopsis thaliana]
  misc_feature (1)..(216): Homolog of NCBI NO: 15810201 NR Description: AT4g15470/dl3775w [Arabidopsis thaliana]
  misc_feature (1)..(99): Homolog of NCBI NO: 7485070 NR Description: hypothetical protein - Arabidopsis thaliana hypothetical protein [Arabidopsis thaliana]
  misc_feature (118)..(207): Homolog of NCBI NO: 7485070 NR Description: hypothetical protein - Arabidopsis thaliana hypothetical protein [Arabidopsis thaliana]
  misc_feature (20)..(255): Homolog of NCBI NO: 34393841 NR Description: putative z-protein [Oryza sativa (japonica
  misc_feature (96)..(209): Homolog of NCBI NO: 7485070 NR Description: hypothetical protein - Arabidopsis thaliana hypothetical protein [Arabidopsis thaliana]
  misc_feature (34)..(256): Homolog of NCBI NO: 14626300 NR Description: putative receptor-associated protein [Oryza
  misc_feature (21)..(255): Homolog of NCBI NO: 15218701 NR Description: hypothetical protein [Arabidopsis thaliana]
  misc_feature (24)..(256): Homolog of NCBI NO: 15229411 NR Description: hypothetical protein [Arabidopsis thaliana]
  misc_feature (21)..(252): Homolog of NCBI NO: 15235466 NR Description: hypothetical protein [Arabidopsis thaliana]

SEQ ID NO: 105238 - protein, 245 aa, Arabidopsis thaliana; identical to SEQ ID NO: 29777
  peptide (1)..(245): Ceres Seq. ID no. 13616771
  misc_feature (31)..(244): Pfam Name: Uncharacterised protein family UPF0005 Pfam Description: Uncharacterised protein family UPF0005
  misc_feature (1)..(245): Homolog of NCBI NO: 18414455 NR Description: expressed protein [Arabidopsis thaliana] AT4g15470/dl3775w [Arabidopsis thaliana]
  misc_feature (1)..(205): Homolog of NCBI NO: 15810201 NR Description: AT4g15470/dl3775w [Arabidopsis thaliana]
  misc_feature (1)..(88): Homolog of NCBI NO: 7485070 NR Description: hypothetical protein - Arabidopsis thaliana hypothetical protein [Arabidopsis thaliana]
  misc_feature (107)..(196): Homolog of NCBI NO: 7485070 NR Description: hypothetical protein - Arabidopsis thaliana hypothetical protein [Arabidopsis thaliana]
  misc_feature (9)..(244): Homolog of NCBI NO: 34393841 NR Description: putative z-protein [Oryza sativa (japonica
  misc_feature (85)..(198): Homolog of NCBI NO: 7485070 NR Description: hypothetical protein - Arabidopsis thaliana hypothetical protein [Arabidopsis thaliana]
  misc_feature (23)..(245): Homolog of NCBI NO: 14626300 NR Description: putative receptor-associated protein [Oryza
  misc_feature (10)..(244): Homolog of NCBI NO: 15218701 NR Description: hypothetical protein [Arabidopsis thaliana]
  misc_feature (13)..(245): Homolog of NCBI NO: 15229411 NR Description: hypothetical protein [Arabidopsis thaliana]
  misc_feature (10)..(241): Homolog of NCBI NO: 15235466 NR Description: hypothetical protein [Arabidopsis thaliana]

SEQ ID NO: 105239 - protein, 230 aa, Arabidopsis thaliana; identical to SEQ ID NO: 29778
  peptide (1)..(230): Ceres Seq. ID no. 13616772
  misc_feature (16)..(229): Pfam Name: Uncharacterised protein family UPF0005 Pfam Description: Uncharacterised protein family UPF0005
  misc_feature (1)..(230): Homolog of NCBI NO: 18414455 NR Description: expressed protein [Arabidopsis thaliana] AT4g15470/dl3775w [Arabidopsis thaliana]
  misc_feature (1)..(190): Homolog of NCBI NO: 15810201 NR Description: AT4g15470/dl3775w [Arabidopsis thaliana]
  misc_feature (1)..(73): Homolog of NCBI NO: 7485070 NR Description: hypothetical protein - Arabidopsis thaliana hypothetical protein [Arabidopsis thaliana]
  misc_feature (92)..(181): Homolog of NCBI NO: 7485070 NR Description: hypothetical protein - Arabidopsis thaliana hypothetical protein [Arabidopsis thaliana]
  misc_feature (1)..(229): Homolog of NCBI NO: 34393841 NR Description: putative z-protein [Oryza sativa (japonica
  misc_feature (70)..(183): Homolog of NCBI NO: 7485070 NR Description: hypothetical protein - Arabidopsis thaliana hypothetical protein [Arabidopsis thaliana]
  misc_feature (8)..(230): Homolog of NCBI NO: 14626300 NR Description: putative receptor-associated protein [Oryza
  misc_feature (1)..(229): Homolog of NCBI NO: 15218701 NR Description: hypothetical protein [Arabidopsis thaliana]
  misc_feature (1)..(230): Homolog of NCBI NO: 15229411 NR Description: hypothetical protein [Arabidopsis thaliana]
  misc_feature (1)..(226): Homolog of NCBI NO: 15235466 NR Description: hypothetical protein [Arabidopsis thaliana]

SEQ ID NO: 105240 - DNA, 2012 bp, Arabidopsis thaliana
  misc_feature (1)..(2012): Ceres Seq. ID no. 13616773
  misc_feature: MA Experiment ID: 108573 Result: Up-regulated in Transcription
  misc_feature: MA Experiment 108573 PARAMETER Experiment Name: At_Drought_cDNA_P Parameter: Timepoint (hr) Value: 6
  misc_feature: MA Experiment 108573 PARAMETER Experiment Name: At_Drought_cDNA_P Parameter: Tissue Value: Aerial
  misc_feature: MA Experiment 108573 PARAMETER Experiment Name: At_Drought_cDNA_P Parameter: Treatment Value: Drought vs. No Drought
  misc_feature: MA Experiment ID: 108595 Result: Down-regulated in Transcription
  misc_feature: MA Experiment 108595 PARAMETER Experiment Name: At_Ler-pi_Ovule_cDNA_P Parameter: Plant Line Value: null
  misc_feature: MA Experiment ID: 20000087 Result: Down-regulated in Transcription
  misc_feature: MA Experiment 20000087 PARAMETER Experiment Name: At_100uM_ABA_Mutants_cDNA_P Parameter: Plant Line Value: WS
  misc_feature: MA Experiment 20000087 PARAMETER Experiment Name: At_100uM_ABA_Mutants_cDNA_P Parameter: Timepoint (hr) Value: 6
  misc_feature: MA Experiment 20000087 PARAMETER Experiment Name: At_100uM_ABA_Mutants_cDNA_P Parameter: Tissue Value: Aerial
  misc_feature: MA Experiment 20000087 PARAMETER Experiment Name: At_100uM_ABA_Mutants_cDNA_P Parameter: Treatment Value: 100uM ABA vs. No Treatment
  misc_feature: MA Experiment ID: 20000224 Result: Down-regulated in Transcription
atccgccattacagacgaagaagaatttcaactgcaatctctctctgaaccatgagaggtcacgatcggattaacaattgtttgccggaggaacttatcctcgagatattccggcgacttgaatcgaaaccgaatcgcgacgcatgctccctcgtctgcaagcgatggttatctctcgagcgatttagccgcaccacgcttcgtatcggcgcttcgttttctcccgacgacttcatctccctcctatctcgtcgctttctctatattacctctatccatgtcgacgaacgtatctccgtctcccttccttccctctctccttccccaaaaagaaaacgtgggagggacagttcgtcgccatcgtcgagtaagcggaagaaattgactgataagacacattctggagctgagaacgtcgagtcttccagcttgactgatacgggcttgactgctctagcgaatggatttccaagaatagaaaacttgagcttgatatggtgccctaacgtttcaagtgtgggtttgtgttcccttgctcagaaatgcacttcacttaaatctcttgatttacagggttgctatgttggagatcaaggcttagcagctgttggaaagttttgtaagcaacttgaagaactaaatttgcgcttttgcgaaggcttaactgatgttggagttattgatcttgttgttggttgttccaagtctttaaagtctatcggtgttgctgcgtcagcaaaaataacagatttatctctggaagcagttggttctcactgtaaattactagaagttttgtatttggattctgaatacatccatgataaaggattgatagcggtggctcagggatgccaccgtttgaaaaatctgaagcttcaatgtgttagtgtgacggatgtggcttttgctgcagtgggagagttgtgtacttcgttggagcgattggcattgtatagctttcagcattttactgacaagggcatgcgagccatcggtaaagggtctaagaagttgaaagatcttactttaagtgattgttactttgtgagttgcaaaggtttagaagctattgctcatggttgtaaggaacttgagcgtgtggaaattaacggatgccacaacattggtacacgtggaatagaggcaattggaaaatcttgcccgcgcctcaaagagttagctttgttgtattgccaaaggattggtaattcggctcttcaagaaattggaaaaggctgtaaatccctagaaatacttcacttagtagactgctctggcattggagacatcgctatgtgcagtattgctaaaggctgtcgcaacctcaagaaacttcatatccgcagatgctatgagataggaaacaaaggaattatatctattggaaagcattgcaaatcactaaccgagcttagtctccggttttgcgataaagttggaaataaagcattaatcgccattggaaaaggttgctccttacaacaactaaacgtaagtggttgtaatcaaatcagcgatgctggaataacagcaatcgccagaggctgtcctcaactcactcacctcgacattagtgttcttcagaacattggagacatgccgttggctgagcttggagaaggatgtccaatgctgaaagacttggtcttgtctcattgccaccatataacagacaatggtctgaaccatcttgtacagaagtgcaaacttctggagacttgtcacatggtttactgcccagggatcacttccgctggagtggctacagtcgtctcgagctgtccacacatcaaaaaggtgttgatagagaaatggaaagtgactgagaggacgacaaggagagctggatcggttatctcttatctatgcatggatctctagatcgtaatttcaaggtcagtttctaagatttatgtttatgttttcttaataaaagtaataacttatagtccaaacttatggtgagtcatggttgtttattgtatgtttatgtgaactggttgtacatg

SEQ ID NO: 105241 - protein, 610 aa, Arabidopsis thaliana; identical to SEQ ID NO: 38740
  peptide (1)..(610): Ceres Seq. ID no. 13616774
  misc_feature (93)..(475): Homolog of NCBI NO: 7485070 NR Description: hypothetical protein - Arabidopsis thaliana hypothetical protein [Arabidopsis thaliana]
  misc_feature (7)..(596): Homolog of NCBI NO: 37531066 NR Description: putative leucine-rich repeats containing protein
  misc_feature (228)..(610): Homolog of NCBI NO: 7485070 NR Description: hypothetical protein - Arabidopsis thaliana hypothetical protein [Arabidopsis thaliana]
  misc_feature (127)..(588): Homolog of NCBI NO: 30679379 NR Description: F-box protein family (FBL3) [Arabidopsis thaliana]
  misc_feature (11)..(555): Homolog of NCBI NO: 18400846 NR Description: F-box protein family, AtFBL6 [Arabidopsis >gi|25412324|pir||A84649 probable glucose regulated repressor
  misc_feature (11)..(526): Homolog of NCBI NO: 15239399 NR Description: F-box protein family [Arabidopsis thaliana]
  misc_feature (142)..(578): Homolog of NCBI NO: 18421172 NR Description: F-box protein family [Arabidopsis thaliana] unknown protein [Arabidopsis thaliana]
  misc_feature (126)..(584): Homolog of NCBI NO: 18421172 NR Description: F-box protein family [Arabidopsis thaliana] unknown protein [Arabidopsis thaliana]

SEQ ID NO: 105242 - DNA, 1690 bp, Arabidopsis thaliana
  misc_feature (1)..(1690): Ceres Seq. ID no. 13616775
  misc_feature: MA Experiment ID: 108435 Result: Down-regulated in Transcription
  misc_feature: MA Experiment 108435 PARAMETER Experiment Name: At_stm_Mutants_cDNA_P Parameter: Plant Line Value: wt Landsburg vs stm
  misc_feature: MA Experiment 108435 PARAMETER Experiment Name: At_stm_Mutants_cDNA_P Parameter: Tissue Value: Shoot Apical Meristem Region
  misc_feature: MA Experiment ID: 108462 Result: Up-regulated in Transcription
  misc_feature: MA Experiment 108462 PARAMETER Experiment Name: At_Germinating_Seeds_cDNA_P Parameter: Age (day) Value: 2 vs. 0
  misc_feature: MA Experiment 108462 PARAMETER Experiment Name: At_Germinating_Seeds_cDNA_P Parameter: Tissue Value: Germinating Seeds
  misc_feature: MA Experiment ID: 108463 Result: Up-regulated in Transcription
  misc_feature: MA Experiment 108463 PARAMETER Experiment Name: At_Germinating_Seeds_cDNA_P Parameter: Age (day) Value: 3 vs. 0
  misc_feature: MA Experiment 108463 PARAMETER Experiment Name: At_Germinating_Seeds_cDNA_P Parameter: Tissue Value: Germinating Seeds
  misc_feature: MA Experiment ID: 108464 Result: Up-regulated in Transcription
  misc_feature: MA Experiment 108464 PARAMETER Experiment Name: At_Germinating_Seeds_cDNA_P Parameter: Age (day) Value: 4 vs. 0
  misc_feature: MA Experiment 108464 PARAMETER Experiment Name: At_Germinating_Seeds_cDNA_P Parameter: Tissue Value: Germinating Seeds
  misc_feature: MA Experiment ID: 108561 Result: Up-regulated in Transcription
  misc_feature: MA Experiment 108561 PARAMETER Experiment Name: At_100uM_ABA_cDNA_P Parameter: Timepoint (hr) Value: 6
  misc_feature: MA Experiment 108561 PARAMETER Experiment Name: At_100uM_ABA_cDNA_P Parameter: Tissue Value: Aerial
  misc_feature: MA Experiment 108561 PARAMETER Experiment Name: At_100uM_ABA_cDNA_P Parameter: Treatment Value: 100uM ABA vs. No Treatment
  misc_feature: MA Experiment ID: 108573 Result: Up-regulated in Transcription
  misc_feature: MA Experiment 108573 PARAMETER Experiment Name: At_Drought_cDNA_P Parameter: Timepoint (hr) Value: 6
  misc_feature: MA Experiment 108573 PARAMETER Experiment Name: At_Drought_cDNA_P Parameter: Tissue Value: Aerial
  misc_feature: MA Experiment 108573 PARAMETER Experiment Name: At_Drought_cDNA_P Parameter: Treatment Value: Drought vs. No Drought
  misc_feature: MA Experiment ID: 108585 Result: Up-regulated in Transcription
  misc_feature: MA Experiment 108585 PARAMETER Experiment Name: At_5mM_NaNP_cDNA_P Parameter: Timepoint (hr) Value: 6
  misc_feature: MA Experiment 108585 PARAMETER Experiment Name: At_5mM_NaNP_cDNA_P Parameter: Tissue Value: Aerial
  misc_feature: MA Experiment 108585 PARAMETER Experiment Name: At_5mM_NaNP_cDNA_P Parameter: Treatment Value: null
  misc_feature: MA Experiment ID: 108594 Result: Down-regulated in Transcription
  misc_feature: MA Experiment 108594 PARAMETER Experiment Name: At_Ler-rhl_Root_cDNA_P Parameter: Plant Line Value: null
  misc_feature: MA Experiment ID: 108605 Result: Up-regulated in Transcription
  misc_feature: MA Experiment 108605 PARAMETER Experiment Name: At_100uM_ABA_cDNA_P Parameter: Timepoint (hr) Value: 6
  misc_feature: MA Experiment 108605 PARAMETER Experiment Name: At_100uM_ABA_cDNA_P Parameter: Tissue Value: Aerial
  misc_feature: MA Experiment 108605 PARAMETER Experiment Name: At_100uM_ABA_cDNA_P Parameter: Treatment Value: 100uM ABA vs. No Treatment
  misc_feature: MA Experiment ID: 108607 Result: Up-regulated in Transcription
  misc_feature: MA Experiment 108607 PARAMETER Experiment Name: At_100uM_ABA_cDNA_P Parameter: Timepoint (hr) Value: 4
  misc_feature: MA Experiment 108607 PARAMETER Experiment Name: At_100uM_ABA_cDNA_P Parameter: Tissue Value: Aerial
  misc_feature: MA Experiment 108607 PARAMETER Experiment Name: At_100uM_ABA_cDNA_P Parameter: Treatment Value: 100uM ABA vs. No Treatment
  misc_feature: MA Experiment ID: 20000069 Result: Up-regulated in Transcription
  misc_feature: MA Experiment 20000069 PARAMETER Experiment Name: At_100uM_ABA_Mutants_cDNA_P Parameter: Plant Line Value: CS23
  misc_feature: MA Experiment 20000069 PARAMETER Experiment Name: At_100uM_ABA_Mutants_cDNA_P Parameter: Timepoint (hr) Value: 6
  misc_feature: MA Experiment 20000069 PARAMETER Experiment Name: At_100uM_ABA_Mutants_cDNA_P Parameter: Tissue Value: Aerial
  misc_feature: MA Experiment 20000069 PARAMETER Experiment Name: At_100uM_ABA_Mutants_cDNA_P Parameter: Treatment Value: 100uM ABA vs. No Treatment
  misc_feature: MA Experiment ID: 20000070 Result: Up-regulated in Transcription
  misc_feature: MA Experiment 20000070 PARAMETER Experiment Name: At_100uM_ABA_Mutants_cDNA_P Parameter: Plant Line Value: CS24
  misc_feature: MA Experiment 20000070 PARAMETER Experiment Name: At_100uM_ABA_Mutants_cDNA_P Parameter: Timepoint (hr) Value: 6
  misc_feature: MA Experiment 20000070 PARAMETER Experiment Name: At_100uM_ABA_Mutants_cDNA_P Parameter: Tissue Value: Aerial
  misc_feature: MA Experiment 20000070 PARAMETER Experiment Name: At_100uM_ABA_Mutants_cDNA_P Parameter: Treatment Value: 100uM ABA vs. No Treatment
  misc_feature: MA Experiment ID: 20000071 Result: Up-regulated in Transcription
  misc_feature: MA Experiment 20000071 PARAMETER Experiment Name: At_100uM_ABA_Mutants_cDNA_P Parameter: Plant Line Value: CS8104
  misc_feature: MA Experiment 20000071 PARAMETER Experiment Name: At_100uM_ABA_Mutants_cDNA_P Parameter: Timepoint (hr) Value: 6
  misc_feature: MA Experiment 20000071 PARAMETER Experiment Name: At_100uM_ABA_Mutants_cDNA_P Parameter: Tissue Value: Aerial
  misc_feature: MA Experiment 20000071 PARAMETER Experiment Name: At_100uM_ABA_Mutants_cDNA_P Parameter: Treatment Value: 100uM ABA vs. No Treatment
  misc_feature: MA Experiment ID: 20000072 Result: Up-regulated in Transcription
  misc_feature: MA Experiment 20000072 PARAMETER Experiment Name: At_100uM_ABA_Mutants_cDNA_P Parameter: Plant Line Value: CS8105
  misc_feature: MA Experiment 20000072 PARAMETER Experiment Name: At_100uM_ABA_Mutants_cDNA_P Parameter: Timepoint (hr) Value: 6
  misc_feature: MA Experiment 20000072 PARAMETER Experiment Name: At_100uM_ABA_Mutants_cDNA_P Parameter: Tissue Value: Aerial
  misc_feature: MA Experiment 20000072 PARAMETER Experiment Name: At_100uM_ABA_Mutants_cDNA_P Parameter: Treatment Value: 100uM ABA vs. No Treatment
  misc_feature: MA Experiment ID: 20000086 Result: Up-regulated in Transcription
  misc_feature: MA Experiment 20000086 PARAMETER Experiment Name: At_100uM_ABA_Mutants_cDNA_P Parameter: Plant Line Value: CS22
  misc_feature: MA Experiment 20000086 PARAMETER Experiment Name: At_100uM_ABA_Mutants_cDNA_P Parameter: Timepoint (hr) Value: 6
  misc_feature: MA Experiment 20000086 PARAMETER Experiment Name: At_100uM_ABA_Mutants_cDNA_P Parameter: Tissue Value: Aerial
  misc_feature: MA Experiment 20000086 PARAMETER Experiment Name: At_100uM_ABA_Mutants_cDNA_P Parameter: Treatment Value: 100uM ABA vs. No Treatment
  misc_feature: MA Experiment ID: 20000087 Result: Up-regulated in Transcription
  misc_feature: MA Experiment 20000087 PARAMETER Experiment Name: At_100uM_ABA_Mutants_cDNA_P Parameter: Plant Line Value: WS
  misc_feature: MA Experiment 20000087 PARAMETER Experiment Name: At_100uM_ABA_Mutants_cDNA_P Parameter: Timepoint (hr) Value: 6
  misc_feature: MA Experiment 20000087 PARAMETER Experiment Name: At_100uM_ABA_Mutants_cDNA_P Parameter: Tissue Value: Aerial
  misc_feature: MA Experiment 20000087 PARAMETER Experiment Name: At_100uM_ABA_Mutants_cDNA_P Parameter: Treatment Value: 100uM ABA vs. No Treatment
  misc_feature: MA Experiment ID: 20000089 Result: Up-regulated in Transcription
  misc_feature: MA Experiment ID: 20000117 Result: Up-regulated in Transcription
  misc_feature: MA Experiment 20000117 PARAMETER Experiment Name: At_100uM_ABA_Mutants_cDNA_P Parameter: Plant Line Value: Columbia
  misc_feature: MA Experiment 20000117 PARAMETER Experiment Name: At_100uM_ABA_Mutants_cDNA_P Parameter: Timepoint (hr) Value: 6
  misc_feature: MA Experiment 20000117 PARAMETER Experiment Name: At_100uM_ABA_Mutants_cDNA_P Parameter: Tissue Value: Aerial
  misc_feature: MA Experiment 20000117 PARAMETER Experiment Name: At_100uM_ABA_Mutants_cDNA_P Parameter: Treatment Value: 100uM ABA vs. No Treatment
  misc_feature: MA Experiment ID: 20000179 Result: Down-regulated in Transcription
  misc_feature: MA Experiment 20000179 PARAMETER Experiment Name: At_Germinating_Seeds_P Parameter: Age (hr) Value: 6 vs. 0
  misc_feature: MA Experiment 20000179 PARAMETER Experiment Name: At_Germinating_Seeds_P Parameter: Tissue Value: Germinating Seeds
  misc_feature: MA Experiment ID: 20000185 Result: Down-regulated in Transcription
  misc_feature: MA Experiment 20000185 PARAMETER Experiment Name: At_Roots__P Parameter: Age (day) Value: 7 vs. 21
  misc_feature: MA Experiment 20000185 PARAMETER Experiment Name: At_Roots__P Parameter: Organism Value: A. thaliana
  misc_feature: MA Experiment 20000185 PARAMETER Experiment Name: At_Roots__P Parameter: Tissue Value: Roots vs. Whole Plant
  misc_feature: MA Experiment ID: 20000224 Result: Down-regulated in Transcription
  misc_feature: MA Experiment ID: 20000234 Result: Down-regulated in Transcription
  misc_feature: MA Experiment 20000234 PARAMETER Experiment Name: At_Siliques_P Parameter: Age (day) Value: 21
  misc_feature: MA Experiment 20000234 PARAMETER Experiment Name: At_Siliques_P Parameter: Organism Value: A. thaliana
  misc_feature: MA Experiment 20000234 PARAMETER Experiment Name: At_Siliques_P Parameter: Plant Line Value: WS
  misc_feature: MA Experiment 20000234 PARAMETER Experiment Name: At_Siliques_P Parameter: Tissue Value: Less Than 5mm Siliques vs. Whole Plant
  misc_feature: MA Experiment ID: 20000439 Result: Down-regulated in Transcription
  misc_feature: MA Experiment 20000439 PARAMETER Experiment Name: At_Roots__P Parameter: Age (day) Value: 14 vs. 21
  misc_feature: MA Experiment 20000439 PARAMETER Experiment Name: At_Roots__P Parameter: Organism Value: A. thaliana
  misc_feature: MA Experiment 20000439 PARAMETER Experiment Name: At_Roots__P Parameter: Tissue Value: Roots vs. Whole Plant
  misc_feature: MA Experiment ID: 20000451 Result: Up-regulated in Transcription
  misc_feature: MA Experiment 20000451 PARAMETER Experiment Name: At_CS6879_Shoots-Roots_P Parameter: Age (day) Value: 14
  misc_feature: MA Experiment 20000451 PARAMETER Experiment Name: At_CS6879_Shoots-Roots_P Parameter: Organism Value: A. thaliana
  misc_feature: MA Experiment 20000451 PARAMETER Experiment Name: At_CS6879_Shoots-Roots_P Parameter: Plant Line Value: CS6879 vs. WS
  misc_feature: MA Experiment 20000451 PARAMETER Experiment Name: At_CS6879_Shoots-Roots_P Parameter: Tissue Value: Roots
  misc_feature: MA Experiment ID: 20001247 Result: Down-regulated in Transcription
  misc_feature: MA Experiment 20001247 PARAMETER Experiment Name: At_Far-red-induction_P Parameter: Age (day) Value: 7
  misc_feature: MA Experiment 20001247 PARAMETER Experiment Name: At_Far-red-induction_P Parameter: Light Value: Far-red vs. White
  misc_feature: MA Experiment 20001247 PARAMETER Experiment Name: At_Far-red-induction_P Parameter: Organism Value: A. thaliana
  misc_feature: MA Experiment 20001247 PARAMETER Experiment Name: At_Far-red-induction_P Parameter: Plant Line Value: Columbia
  misc_feature: MA Experiment 20001247 PARAMETER Experiment Name: At_Far-red-induction_P Parameter: Timepoint (hr) Value: 1
  misc_feature: MA Experiment 20001247 PARAMETER Experiment Name: At_Far-red-induction_P Parameter: Tissue Value: Whole Plant
  misc_feature: MA Experiment ID: 20001911 Result: Up-regulated in Transcription
  misc_feature: MA Experiment 20001911 PARAMETER Experiment Name: At_Drought_Reproduction_P Parameter: Age (day) Value: 40
  misc_feature: MA Experiment 20001911 PARAMETER Experiment Name: At_Drought_Reproduction_P Parameter: Organism Value: A. thaliana
  misc_feature: MA Experiment 20001911 PARAMETER Experiment Name: At_Drought_Reproduction_P Parameter: Plant Line Value: WS
  misc_feature: MA Experiment 20001911 PARAMETER Experiment Name: At_Drought_Reproduction_P Parameter: Timepoint (day) Value: 10
  misc_feature: MA Experiment 20001911 PARAMETER Experiment Name: At_Drought_Reproduction_P Parameter: Tissue Value: Flowers
  misc_feature: MA Experiment 20001911 PARAMETER Experiment Name: At_Drought_Reproduction_P Parameter: Treatment Value: Drought vs. No Drought
atattttgttttaggtgttcacataaatttgatagtgtaaagaaaacaaaaccactttctagttcttaaagaaactagaaatccatggacccgtctcgtcatactcatgtgatgctcgtatctttccccggccaaggtcacgtaaaccctctacttcgtctcggaaagctcatagcctctaaaggcttactcgtcacctttgtcaccacagagaagccatggggcaagaagatgcgtcaagccaacaagattcaagacggtgtgctcaaaccggtcggtctaggtttcatccggtttgagttcttctctgacggcttcgccgacgacgatgaaaaaagattcgacttcgatgccttccgaccacaccttgaagctgtcggaaaacaagagatcaagaatctcgttaagagatataacaaggagccggtgacgtgtctcataaacaacgcttttgtcccatgggtatgtgatgtcgccgaggagcttcacatcccttcggctgttctatgggtccagtcttgtgcttgtctcacggcttattactattaccaccaccggttagttaagttcccgaccaaaaccgagccggacatcagcgttgaaatcccttgcttgccattgttaaagcatgacgagatcccaagctttcttcacccttcgtctccgtatacagcttttggagatatcattttagaccagttaaagagattcgaaaaccacaagtctttctatcttttcatcgacacttttcgcgaactagaaaaagacatcatggaccacatgtcacaactttgtcctcaagccatcatcagtcctgtcggtccgctcttcaagatggctcaaaccttgagttctgacgttaagggagatatatccgagccagcgagtgactgcatggaatggcttgactcaagagaaccatcctcagtcgtttacatctcctttgggactatagccaacttgaagcaagagcagatggaggagatcgctcatggcgttttgagctctggcttgtcggtcttatgggtggttcggcctcccatggaagggacatttgtagaaccacatgttttgcctcgagagctcgaagaaaagggtaaaatcgtggaatggtgtccccaagagagagtcttggctcatcctgcgattgcttgtttcttaagtcactgcggatggaactcgacaatggaggctttaactgccggagtccccgttgtttgttttccgcaatggggagatcaagtgactgatgcggtgtacttggctgatgttttcaagacaggagtgagactaggccgcggagccgctgaggagatgattgtttcgagggaggttgtagcagagaagctgcttgaggccacagttggggaaaaggcggtggagctgagagaaaacgctcggaggtggaaggcggaggccgaggccgccgtggcggacggtggatcatctgatatgaactttaaagagtttgtggacaagttggttacgaaacatgtgacgagagaagacaacggagaacactagtgataatgatgtctcgaaaatatccgactatttgttgtaccgcaaaaaccttaaccactacaaccttttcttttttcttgtcaataaatcgtatcaatctcatttcatttttcgaaagtgttttttctcacttctgaaatcaataattacgtattgtcttcttatc

SEQ ID NO: 105243 - protein, 479 aa, Arabidopsis thaliana; identical to SEQ ID NO: 23079
  peptide (1)..(479): Ceres Seq. ID no. 13616776
  misc_feature (18)..(470): Pfam Name: UDP-glucoronosyl and UDP-glucosyl transferase Pfam Description: UDP-glucoronosyl and UDP-glucosyl transferase
  misc_feature (1)..(479): Homolog of NCBI NO: 15234616 NR Description: UDP-glycosyltransferase, putative [Arabidopsis
  misc_feature (1)..(479): Homolog of NCBI NO: 21593030 NR Description: indole-3-acetate beta-glucosyltransferase like
  misc_feature (8)..(476): Homolog of NCBI NO: 15234619 NR Description: glycosyltransferase family [Arabidopsis thaliana]
  misc_feature (3)..(479): Homolog of NCBI NO: 15233091 NR Description: UDP-glucosyltransferase, putative [Arabidopsis
  misc_feature (3)..(479): Homolog of NCBI NO: 20259348 NR Description: putative UDP-glucose:indole-3-acetate beta-D-
  misc_feature (8)..(477): Homolog of NCBI NO: 25082972 NR Description: indole-3-acetate beta-glucosyltransferase like
  misc_feature (8)..(477): Homolog of NCBI NO: 7433899 NR Description: probable indole-3-acetate
  misc_feature (8)..(477): Homolog of NCBI NO: 30683281 NR Description: UDP-glycosyltransferase family [Arabidopsis
  misc_feature (8)..(477): Homolog of NCBI NO: 9794913 NR Description: UDP-glucose:sinapate glucosyltransferase
  misc_feature (8)..(466): Homolog of NCBI NO: 13431605 NR Description: Limonoid UDP-glucosyltransferase (Limonoid

SEQ ID NO: 105244 - protein, 470 aa, Arabidopsis thaliana; identical to SEQ ID NO: 23080
  peptide (1)..(470): Ceres Seq. ID no. 13616777
  misc_feature (9)..(461): Pfam Name: UDP-glucoronosyl and UDP-glucosyl transferase Pfam Description: UDP-glucoronosyl and UDP-glucosyl transferase
  misc_feature (1)..(470): Homolog of NCBI NO: 15234616 NR Description: UDP-glycosyltransferase, putative [Arabidopsis
  misc_feature (1)..(470): Homolog of NCBI NO: 21593030 NR Description: indole-3-acetate beta-glucosyltransferase like
  misc_feature (1)..(467): Homolog of NCBI NO: 15234619 NR Description: glycosyltransferase family [Arabidopsis thaliana]
  misc_feature (1)..(470): Homolog of NCBI NO: 15233091 NR Description: UDP-glucosyltransferase, putative [Arabidopsis
  misc_feature (1)..(470): Homolog of NCBI NO: 20259348 NR Description: putative UDP-glucose:indole-3-acetate beta-D-
  misc_feature (1)..(468): Homolog of NCBI NO: 25082972 NR Description: indole-3-acetate beta-glucosyltransferase like
  misc_feature (1)..(468): Homolog of NCBI NO: 7433899 NR Description: probable indole-3-acetate
  misc_feature (1)..(468): Homolog of NCBI NO: 30683281 NR Description: UDP-glycosyltransferase family [Arabidopsis
  misc_feature (1)..(468): Homolog of NCBI NO: 9794913 NR Description: UDP-glucose:sinapate glucosyltransferase
  misc_feature (1)..(457): Homolog of NCBI NO: 13431605 NR Description: Limonoid UDP-glucosyltransferase (Limonoid

SEQ ID NO: 105245 - protein, 430 aa, Arabidopsis thaliana; identical to SEQ ID NO: 23081
  peptide (1)..(430): Ceres Seq. ID no. 13616778
  misc_feature (1)..(421): Pfam Name: UDP-glucoronosyl and UDP-glucosyl transferase Pfam Description: UDP-glucoronosyl and UDP-glucosyl transferase
  misc_feature (1)..(430): Homolog of NCBI NO: 15234616 NR Description: UDP-glycosyltransferase, putative [Arabidopsis
  misc_feature (1)..(430): Homolog of NCBI NO: 21593030 NR Description: indole-3-acetate beta-glucosyltransferase like
  misc_feature (1)..(427): Homolog of NCBI NO: 15234619 NR Description: glycosyltransferase family [Arabidopsis thaliana]
  misc_feature (1)..(430): Homolog of NCBI NO: 15233091 NR Description: UDP-glucosyltransferase, putative [Arabidopsis
  misc_feature (1)..(430): Homolog of NCBI NO: 20259348 NR Description: putative UDP-glucose:indole-3-acetate beta-D-
  misc_feature (1)..(428): Homolog of NCBI NO: 25082972 NR Description: indole-3-acetate beta-glucosyltransferase like
  misc_feature (1)..(428): Homolog of NCBI NO: 7433899 NR Description: probable indole-3-acetate
  misc_feature (1)..(428): Homolog of NCBI NO: 30683281 NR Description: UDP-glycosyltransferase family [Arabidopsis
  misc_feature (1)..(428): Homolog of NCBI NO: 9794913 NR Description: UDP-glucose:sinapate glucosyltransferase
  misc_feature (1)..(417): Homolog of NCBI NO: 13431605 NR Description: Limonoid UDP-glucosyltransferase (Limonoid

SEQ ID NO: 105246 - DNA, 726 bp, Arabidopsis thaliana
  misc_feature (1)..(726): Ceres Seq. ID no. 13616787
  misc_feature: MA Experiment ID: 108434 Result: Up-regulated in Transcription
  misc_feature: MA Experiment 108434 PARAMETER Experiment Name: At_Root_Tips_cDNA_P Parameter: Tissue Value: Root Tips
  misc_feature: MA Experiment ID: 108573 Result: Down-regulated in Transcription
  misc_feature: MA Experiment 108573 PARAMETER Experiment Name: At_Drought_cDNA_P Parameter: Timepoint (hr) Value: 6
  misc_feature: MA Experiment 108573 PARAMETER Experiment Name: At_Drought_cDNA_P Parameter: Tissue Value: Aerial
  misc_feature: MA Experiment 108573 PARAMETER Experiment Name: At_Drought_cDNA_P Parameter: Treatment Value: Drought vs. No Drought
  misc_feature: MA Experiment ID: 108577 Result: Down-regulated in Transcription
  misc_feature: MA Experiment 108577 PARAMETER Experiment Name: At_42deg_Heat_cDNA_P Parameter: Temperature (deg C) Value: 42 vs. 22
  misc_feature: MA Experiment 108577 PARAMETER Experiment Name: At_42deg_Heat_cDNA_P Parameter: Timepoint (hr) Value: 6
  misc_feature: MA Experiment 108577 PARAMETER Experiment Name: At_42deg_Heat_cDNA_P Parameter: Tissue Value: Aerial
  misc_feature: MA Experiment ID: 108579 Result: Up-regulated in Transcription
  misc_feature: MA Experiment 108579 PARAMETER Experiment Name: At_4deg_Cold_cDNA_P Parameter: Temperature (deg C) Value: 4 vs. 22
  misc_feature: MA Experiment 108579 PARAMETER Experiment Name: At_4deg_Cold_cDNA_P Parameter: Timepoint (hr) Value: 6
  misc_feature: MA Experiment 108579 PARAMETER Experiment Name: At_4deg_Cold_cDNA_P Parameter: Tissue Value: Aerial
  misc_feature: MA Experiment ID: 20000072 Result: Down-regulated in Transcription
  misc_feature: MA Experiment 20000072 PARAMETER Experiment Name: At_100uM_ABA_Mutants_cDNA_P Parameter: Plant Line Value: CS8105
  misc_feature: MA Experiment 20000072 PARAMETER Experiment Name: At_100uM_ABA_Mutants_cDNA_P Parameter: Timepoint (hr) Value: 6
  misc_feature: MA Experiment 20000072 PARAMETER Experiment Name: At_100uM_ABA_Mutants_cDNA_P Parameter: Tissue Value: Aerial
  misc_feature: MA Experiment 20000072 PARAMETER Experiment Name: At_100uM_ABA_Mutants_cDNA_P Parameter: Treatment Value: 100uM ABA vs. No Treatment
  misc_feature: MA Experiment ID: 20000179 Result: Up-regulated in Transcription
  misc_feature: MA Experiment 20000179 PARAMETER Experiment Name: At_Germinating_Seeds_P Parameter: Age (hr) Value: 6 vs. 0
  misc_feature: MA Experiment 20000179 PARAMETER Experiment Name: At_Germinating_Seeds_P Parameter: Tissue Value: Germinating Seeds
  misc_feature: MA Experiment ID: 20000180 Result: Up-regulated in Transcription
  misc_feature: MA Experiment 20000180 PARAMETER Experiment Name: At_Germinating_Seeds_P Parameter: Age (hr) Value: 24 vs. 0
  misc_feature: MA Experiment 20000180 PARAMETER Experiment Name: At_Germinating_Seeds_P Parameter: Tissue Value: Germinating Seeds
  misc_feature: MA Experiment ID: 20000234 Result: Up-regulated in Transcription
  misc_feature: MA Experiment 20000234 PARAMETER Experiment Name: At_Siliques_P Parameter: Age (day) Value: 21
  misc_feature: MA Experiment 20000234 PARAMETER Experiment Name: At_Siliques_P Parameter: Organism Value: A. thaliana
  misc_feature: MA Experiment 20000234 PARAMETER Experiment Name: At_Siliques_P Parameter: Plant Line Value: WS
  misc_feature: MA Experiment 20000234 PARAMETER Experiment Name: At_Siliques_P Parameter: Tissue Value: Less Than 5mm Siliques vs. Whole Plant
  misc_feature: MA Experiment ID: 20000235 Result: Up-regulated in Transcription
  misc_feature: MA Experiment 20000235 PARAMETER Experiment Name: At_Siliques_P Parameter: Age (day) Value: 21
  misc_feature: MA Experiment 20000235 PARAMETER Experiment Name: At_Siliques_P Parameter: Organism Value: A. thaliana
  misc_feature: MA Experiment 20000235 PARAMETER Experiment Name: At_Siliques_P Parameter: Plant Line Value: WS
  misc_feature: MA Experiment 20000235 PARAMETER Experiment Name: At_Siliques_P Parameter: Tissue Value: 5-10mm Siliques vs. Whole Plant
  misc_feature: MA Experiment ID: 20000265 Result: Up-regulated in Transcription
  misc_feature: MA Experiment 20000265 PARAMETER Experiment Name: At_Open_Flower_P Parameter: Age (day) Value: 21
  misc_feature: MA Experiment 20000265 PARAMETER Experiment Name: At_Open_Flower_P Parameter: Plant Line Value: WS
  misc_feature: MA Experiment 20000265 PARAMETER Experiment Name: At_Open_Flower_P Parameter: Tissue Value: Closed Flower vs. Whole Plant
  misc_feature: MA Experiment ID: 20001560 Result: Up-regulated in Transcription
  misc_feature: MA Experiment 20001560 PARAMETER Experiment Name: At_Drought_Soil_Dry_P Parameter: Age (day) Value: 28
  misc_feature: MA Experiment 20001560 PARAMETER Experiment Name: At_Drought_Soil_Dry_P Parameter: Organism Value: A. thaliana
  misc_feature: MA Experiment 20001560 PARAMETER Experiment Name: At_Drought_Soil_Dry_P Parameter: Plant Line Value: WS
  misc_feature: MA Experiment 20001560 PARAMETER Experiment Name: At_Drought_Soil_Dry_P Parameter: Post Timepoint (hr) Value: None
  misc_feature: MA Experiment 20001560 PARAMETER Experiment Name: At_Drought_Soil_Dry_P Parameter: Post-Treatment Value: None
  misc_feature: MA Experiment 20001560 PARAMETER Experiment Name: At_Drought_Soil_Dry_P Parameter: Timepoint (day) Value: 14
  misc_feature: MA Experiment 20001560 PARAMETER Experiment Name: At_Drought_Soil_Dry_P Parameter: Treatment Value: Drought vs. No Drought
aatttattctcatgtttgtttgtttctcactttaccaatctcacttacagatcttccttcttcttcctcttcctcttccttcttccttaaaccctacaagcttctactctattgacaaatttgattccgagtttacatcgataatggcggaccaaacctccgattcaacatctcccgtggctcctctctccgtatcttctcctactgctactaagaaagataataccaatcctgttgattcgaagctcacggaattgaatgaatcaagggctgagttactaaacaggatccagaatctgaaacaggacttgcaaagttggagaggtaaattggacactcaagttaaagtctaccgtgaggagctctctgggctaaagaagactctgaatcttgaagttgagcagcttcgtgaggaattcaaagatctgaaaactaccttgaatcaacagcaagatgatgtttccgctagcctgaaaagcttaggcctacaagattcaaaagagcaaattgataagagaagtgaggtgacagaagagaaagtggaagctctatcgactgatgataatgccaaagaagcagaacattagataatatgaaaattgtttgttcttatgatattctcgccactactgttaccactaccttgagattgtactagtatgcttaatatgtagttccgcggtttagttgattctaatgatgcaccatgacacaatggtttgctgc

SEQ ID NO: 105247 - protein, 194 aa, Arabidopsis thaliana
  peptide (1)..(194): Ceres Seq. ID no. 13616788
  misc_feature (4)..(194): Homolog of NCBI NO: 30683404 NR Description: expressed protein [Arabidopsis thaliana]
  misc_feature (48)..(194): Homolog of NCBI NO: 18175846 NR Description: unknown protein [Arabidopsis thaliana]
  misc_feature (48)..(194): Homolog of NCBI NO: 21592347 NR Description: unknown [Arabidopsis thaliana]
  misc_feature (48)..(170): Homolog of NCBI NO: 7485072 NR Description: hypothetical protein - Arabidopsis thaliana hypothetical protein [Arabidopsis thaliana]
  misc_feature (58)..(167): Homolog of NCBI NO: 29370843 NR Description: unknown [Oryza sativa (japonica cultivar-group)]
  misc_feature (73)..(194): Homolog of NCBI NO: 7485072 NR Description: hypothetical protein - Arabidopsis thaliana hypothetical protein [Arabidopsis thaliana]
  misc_feature (61)..(192): Homolog of NCBI NO: 22831125 NR Description: contains ESTs
FILMFVCFSLYQSHLQIFLLLPLPLPSSLNPTSFYSIDKFDSEFTSIMADQTSDSTSPVAPLSVSSPTATKKDNTNPVDSKLTELNESRAELLNRIQNLKQDLQSWRGKLDTQVKVYREELSGLKKTLNLEVEQLREEFKDLKTTLNQQQDDVSASLKSLGLQDSKEQIDKRSEVTEEKVEALSTDDNAKEAEH

SEQ ID NO: 105248 - protein, 191 aa, Arabidopsis thaliana
  peptide (1)..(191): Ceres Seq. ID no. 13616789
  misc_feature (1)..(191): Homolog of NCBI NO: 30683404 NR Description: expressed protein [Arabidopsis thaliana]
  misc_feature (45)..(191): Homolog of NCBI NO: 18175846 NR Description: unknown protein [Arabidopsis thaliana]
  misc_feature (45)..(191): Homolog of NCBI NO: 21592347 NR Description: unknown [Arabidopsis thaliana]
  misc_feature (45)..(167): Homolog of NCBI NO: 7485072 NR Description: hypothetical protein - Arabidopsis thaliana hypothetical protein [Arabidopsis thaliana]
  misc_feature (55)..(164): Homolog of NCBI NO: 29370843 NR Description: unknown [Oryza sativa (japonica cultivar-group)]
  misc_feature (70)..(191): Homolog of NCBI NO: 7485072 NR Description: hypothetical protein - Arabidopsis thaliana hypothetical protein [Arabidopsis thaliana]
  misc_feature (58)..(189): Homolog of NCBI NO: 22831125 NR Description: contains ESTs
MFVCFSLYQSHLQIFLLLPLPLPSSLNPTSFYSIDKFDSEFTSIMADQTSDSTSPVAPLSVSSPTATKKDNTNPVDSKLTELNESRAELLNRIQNLKQDLQSWRGKLDTQVKVYREELSGLKKTLNLEVEQLREEFKDLKTTLNQQQDDVSASLKSLGLQDSKEQIDKRSEVTEEKVEALSTDDNAKEAEH

SEQ ID NO: 105249 - protein, 147 aa, Arabidopsis thaliana; identical to SEQ ID NO: 35359
  peptide (1)..(147): Ceres Seq. ID no. 13616790
  misc_feature (1)..(147): Homolog of NCBI NO: 30683404 NR Description: expressed protein [Arabidopsis thaliana]
  misc_feature (1)..(147): Homolog of NCBI NO: 18175846 NR Description: unknown protein [Arabidopsis thaliana]
  misc_feature (1)..(147): Homolog of NCBI NO: 21592347 NR Description: unknown [Arabidopsis thaliana]
  misc_feature (1)..(123): Homolog of NCBI NO: 7485072 NR Description: hypothetical protein - Arabidopsis thaliana hypothetical protein [Arabidopsis thaliana]
  misc_feature (11)..(120): Homolog of NCBI NO: 29370843 NR Description: unknown [Oryza sativa (japonica cultivar-group)]
  misc_feature (26)..(147): Homolog of NCBI NO: 7485072 NR Description: hypothetical protein - Arabidopsis thaliana hypothetical protein [Arabidopsis thaliana]
  misc_feature (14)..(145): Homolog of NCBI NO: 22831125 NR Description: contains ESTs

SEQ ID NO: 105250 - DNA, 1116 bp, Arabidopsis thaliana
  misc_feature (1)..(1116): Ceres Seq. ID no. 13616795
  misc_feature: MA Experiment ID: 108433 Result: Down-regulated in Transcription
  misc_feature: MA Experiment 108433 PARAMETER Experiment Name: At_rhl_Mutant2_cDNA_P Parameter: Age (day) Value: 7
  misc_feature: MA Experiment 108433 PARAMETER Experiment Name: At_rhl_Mutant2_cDNA_P Parameter: Organism Value: A. thaliana
  misc_feature: MA Experiment 108433 PARAMETER Experiment Name: At_rhl_Mutant2_cDNA_P Parameter: Plant Line Value: rhl Mutant vs. wt landsburg
  misc_feature: MA Experiment 108433 PARAMETER Experiment Name: At_rhl_Mutant2_cDNA_P Parameter: Tissue Value: Roots
  misc_feature: MA Experiment ID: 108434 Result: Up-regulated in Transcription
  misc_feature: MA Experiment 108434 PARAMETER Experiment Name: At_Root_Tips_cDNA_P Parameter: Tissue Value: Root Tips
  misc_feature: MA Experiment ID: 108435 Result: Up-regulated in Transcription
  misc_feature: MA Experiment 108435 PARAMETER Experiment Name: At_stm_Mutants_cDNA_P Parameter: Plant Line Value: wt Landsburg vs stm
  misc_feature: MA Experiment 108435 PARAMETER Experiment Name: At_stm_Mutants_cDNA_P Parameter: Tissue Value: Shoot Apical Meristem Region
  misc_feature: MA Experiment ID: 108461 Result: Up-regulated in Transcription
  misc_feature: MA Experiment 108461 PARAMETER Experiment Name: At_Germinating_Seeds_cDNA_P Parameter: Age (day) Value: 1 vs. 0
  misc_feature: MA Experiment 108461 PARAMETER Experiment Name: At_Germinating_Seeds_cDNA_P Parameter: Tissue Value: Germinating Seeds
  misc_feature: MA Experiment ID: 108462 Result: Up-regulated in Transcription
  misc_feature: MA Experiment 108462 PARAMETER Experiment Name: At_Germinating_Seeds_cDNA_P Parameter: Age (day) Value: 2 vs. 0
  misc_feature: MA Experiment 108462 PARAMETER Experiment Name: At_Germinating_Seeds_cDNA_P Parameter: Tissue Value: Germinating Seeds
  misc_feature: MA Experiment ID: 108464 Result: Up-regulated in Transcription
  misc_feature: MA Experiment 108464 PARAMETER Experiment Name: At_Germinating_Seeds_cDNA_P Parameter: Age (day) Value: 4 vs. 0
  misc_feature: MA Experiment 108464 PARAMETER Experiment Name: At_Germinating_Seeds_cDNA_P Parameter: Tissue Value: Germinating Seeds
  misc_feature: MA Experiment ID: 108573 Result: Down-regulated in Transcription
  misc_feature: MA Experiment 108573 PARAMETER Experiment Name: At_Drought_cDNA_P Parameter: Timepoint (hr) Value: 6
  misc_feature: MA Experiment 108573 PARAMETER Experiment Name: At_Drought_cDNA_P Parameter: Tissue Value: Aerial
  misc_feature: MA Experiment 108573 PARAMETER Experiment Name: At_Drought_cDNA_P Parameter: Treatment Value: Drought vs. No Drought
  misc_feature: MA Experiment ID: 108577 Result: Down-regulated in Transcription
  misc_feature: MA Experiment 108577 PARAMETER Experiment Name: At_42deg_Heat_cDNA_P Parameter: Temperature (deg C) Value: 42 vs. 22
  misc_feature: MA Experiment 108577 PARAMETER Experiment Name: At_42deg_Heat_cDNA_P Parameter: Timepoint (hr) Value: 6
  misc_feature: MA Experiment 108577 PARAMETER Experiment Name: At_42deg_Heat_cDNA_P Parameter: Tissue Value: Aerial
  misc_feature: MA Experiment ID: 108585 Result: Down-regulated in Transcription
  misc_feature: MA Experiment 108585 PARAMETER Experiment Name: At_5mM_NaNP_cDNA_P Parameter: Timepoint (hr) Value: 6
  misc_feature: MA Experiment 108585 PARAMETER Experiment Name: At_5mM_NaNP_cDNA_P Parameter: Tissue Value: Aerial
  misc_feature: MA Experiment 108585 PARAMETER Experiment Name: At_5mM_NaNP_cDNA_P Parameter: Treatment Value: null
  misc_feature: MA Experiment ID: 20000113 Result: Down-regulated in Transcription
  misc_feature: MA Experiment 20000113 PARAMETER Experiment Name: At_42deg_Heat_cDNA_P Parameter: Temperature (deg C) Value: 42 vs. 22
  misc_feature: MA Experiment 20000113 PARAMETER Experiment Name: At_42deg_Heat_cDNA_P Parameter: Timepoint (hr) Value: 8
  misc_feature: MA Experiment 20000113 PARAMETER Experiment Name: At_42deg_Heat_cDNA_P Parameter: Tissue Value: Aerial
  misc_feature: MA Experiment ID: 20000144 Result: Down-regulated in Transcription
  misc_feature: MA Experiment 20000144 PARAMETER Experiment Name: At_42deg_Heat_cDNA_P Parameter: Temperature (deg C) Value: 42 vs. 22
  misc_feature: MA Experiment 20000144 PARAMETER Experiment Name: At_42deg_Heat_cDNA_P Parameter: Timepoint (hr) Value: 1
  misc_feature: MA Experiment 20000144 PARAMETER Experiment Name: At_42deg_Heat_cDNA_P Parameter: Tissue Value: Aerial
  misc_feature: MA Experiment ID: 20000286 Result: Up-regulated in Transcription
  misc_feature: MA Experiment 20000286 PARAMETER Experiment Name: At_Open_Flower_P Parameter: Age (day) Value: 21
  misc_feature: MA Experiment 20000286 PARAMETER Experiment Name: At_Open_Flower_P Parameter: Plant Line Value: WS
  misc_feature: MA Experiment 20000286 PARAMETER Experiment Name: At_Open_Flower_P Parameter: Tissue Value: Half Open vs. Whole Plant
  misc_feature: MA Experiment ID: 20001247 Result: Down-regulated in Transcription
  misc_feature: MA Experiment 20001247 PARAMETER Experiment Name: At_Far-red-induction_P Parameter: Age (day) Value: 7
  misc_feature: MA Experiment 20001247 PARAMETER Experiment Name: At_Far-red-induction_P Parameter: Light Value: Far-red vs. White
  misc_feature: MA Experiment 20001247 PARAMETER Experiment Name: At_Far-red-induction_P Parameter: Organism Value: A. thaliana
  misc_feature: MA Experiment 20001247 PARAMETER Experiment Name: At_Far-red-induction_P Parameter: Plant Line Value: Columbia
  misc_feature: MA Experiment 20001247 PARAMETER Experiment Name: At_Far-red-induction_P Parameter: Timepoint (hr) Value: 1
  misc_feature: MA Experiment 20001247 PARAMETER Experiment Name: At_Far-red-induction_P Parameter: Tissue Value: Whole Plant
attattcccctaacgaatttcaaatcaaaatctctctctttctcttatctctaatggcgttgaggaacattgaaaacgctcttccgatctcacaggaacgacctaagaagctggccaaactctcaaagcaaccggagattggtctaaatgacgaaaacaaccctgtcgctgtggctgaatcgaccgtcgaatacgttgcttctgagaatctcaaaccattttcagatcctgaatcttctgtccagagattacttgaagaattagcatcaaaggattggattaaagtatgtgactcattgaacaacacaaggagatttgcaattcatcactcttctctgttgctaccaattctagaaaagcttatagttgtgatggtgaaggcgatgaagaatcctagaagtgcattgtgcaagacttcgattatgacttgttctgatatcttcactgcttatggagaaaagttgctggaaggacctcatttgaaatctatggacgatctgctgttgcagttgctgatgaaagcttcacaagacaagaagtttgtgtgtgaagaagcagagaaagcgctgaacacgatggttaactcggtggctcgcttgccgcttctgcgtaagcttcagagttatgtccgtcacagtaaccctcgtgtcagggccaaagctgctgtgtctacttccaactgcgtttctaaaatggaggtaaatgaaatggaagaatttgggatgattctgctcgcacaaatggctgcggatcagttgagtgacaagttgccagaggcaagggaagctgcaaggagtatggtgaactcgcttttcgagaaatttacatggaatgaagaagaagacgaagaaggaagcaagcaagaagcttggaagaagttttgtgagaagaatgtaacagggcttaatgcacaagccatgatcaagatcgttgcatctcaataaaattctgaagatgaaaatgttgttctctctgattcatgtaaaatacgtttttacatgatataaacaatcttttttatttctagtggatctgtcctctcaattccaatgctactaccataatacaacagaagctcagtggttctttaagcttcatgaaaaattgttgttgtgg

SEQ ID NO: 105251 - protein, 313 aa, Arabidopsis thaliana
  peptide (1)..(313): Ceres Seq. ID no. 13616796
  misc_feature (18)..(313): Homolog of NCBI NO: 18414533 NR Description: expressed protein [Arabidopsis thaliana]
  misc_feature (18)..(313): Homolog of NCBI NO: 21593517 NR Description: unknown [Arabidopsis thaliana]
  misc_feature (119)..(313): Homolog of NCBI NO: 7485173 NR Description: hypothetical protein - Arabidopsis thaliana hypothetical protein [Arabidopsis thaliana]
  misc_feature (18)..(84): Homolog of NCBI NO: 7485173 NR Description: hypothetical protein - Arabidopsis thaliana hypothetical protein [Arabidopsis thaliana]
  misc_feature (62)..(309): Homolog of NCBI NO: 21537265 NR Description: unknown [Arabidopsis thaliana]
  misc_feature (62)..(309): Homolog of NCBI NO: 18395821 NR Description: expressed protein [Arabidopsis thaliana]
  misc_feature (30)..(309): Homolog of NCBI NO: 15241493 NR Description: expressed protein [Arabidopsis thaliana]
  misc_feature (62)..(241): Homolog of NCBI NO: 9294314 NR Description: gb|AAF24615.1~gene_id:K24M9.2~similar to unknown
  misc_feature (62)..(232): Homolog of NCBI NO: 15229670 NR Description: expressed protein [Arabidopsis thaliana]
  misc_feature (63)..(267): Homolog of NCBI NO: 34865276 NR Description: similar to KIAA0423 [Rattus norvegicus]
YSPNEFQIKISLFLLSLMALRNIENALPISQERPKKLAKLSKQPEIGLNDENNPVAVAESTVEYVASENLKPFSDPESSVQRLLEELASKDWIKVCDSLNNTRRFAIHHSSLLLPILEKLIVVMVKAMKNPRSALCKTSIMTCSDIFTAYGEKLLEGPHLKSMDDLLLQLLMKASQDKKFVCEEAEKALNTMVNSVARLPLLRKLQSYVRHSNPRVRAKAAVSTSNCVSKMEVNEMEEFGMILLAQMAADQLSDKLPEAREAARSMVNSLFEKFTWNEEEDEEGSKQEAWKKFCEKNVTGLNAQAMIKIVASQ

SEQ ID NO: 105252 - protein, 296 aa, Arabidopsis thaliana
  peptide (1)..(296): Ceres Seq. ID no. 13616797
  misc_feature (1)..(296): Homolog of NCBI NO: 18414533 NR Description: expressed protein [Arabidopsis thaliana]
  misc_feature (1)..(296): Homolog of NCBI NO: 21593517 NR Description: unknown [Arabidopsis thaliana]
  misc_feature (102)..(296): Homolog of NCBI NO: 7485173 NR Description: hypothetical protein - Arabidopsis thaliana hypothetical protein [Arabidopsis thaliana]
  misc_feature (1)..(67): Homolog of NCBI NO: 7485173 NR Description: hypothetical protein - Arabidopsis thaliana hypothetical protein [Arabidopsis thaliana]
  misc_feature (45)..(292): Homolog of NCBI NO: 21537265 NR Description: unknown [Arabidopsis thaliana]
  misc_feature (45)..(292): Homolog of NCBI NO: 18395821 NR Description: expressed protein [Arabidopsis thaliana]
  misc_feature (13)..(292): Homolog of NCBI NO: 15241493 NR Description: expressed protein [Arabidopsis thaliana]
  misc_feature (45)..(224): Homolog of NCBI NO: 9294314 NR Description: gb|AAF24615.1~gene_id:K24M9.2~similar to unknown
  misc_feature (45)..(215): Homolog of NCBI NO: 15229670 NR Description: expressed protein [Arabidopsis thaliana]
  misc_feature (46)..(250): Homolog of NCBI NO: 34865276 NR Description: similar to KIAA0423 [Rattus norvegicus]
MALRNIENALPISQERPKKLAKLSKQPEIGLNDENNPVAVAESTVEYVASENLKPFSDPESSVQRLLEELASKDWIKVCDSLNNTRRFAIHHSSLLLPILEKLIVVMVKAMKNPRSALCKTSIMTCSDIFTAYGEKLLEGPHLKSMDDLLLQLLMKASQDKKFVCEEAEKALNTMVNSVARLPLLRKLQSYVRHSNPRVRAKAAVSTSNCVSKMEVNEMEEFGMILLAQMAADQLSDKLPEAREAARSMVNSLFEKFTWNEEEDEEGSKQEAWKKFCEKNVTGLNAQAMIKIVASQ

SEQ ID NO: 105253 - protein, 190 aa, Arabidopsis thaliana
  peptide (1)..(190): Ceres Seq. ID no. 13616798
  misc_feature (1)..(190): Homolog of NCBI NO: 18414533 NR Description: expressed protein [Arabidopsis thaliana]
  misc_feature (1)..(190): Homolog of NCBI NO: 21593517 NR Description: unknown [Arabidopsis thaliana]
  misc_feature (1)..(190): Homolog of NCBI NO: 7485173 NR Description: hypothetical protein - Arabidopsis thaliana hypothetical protein [Arabidopsis thaliana]
  misc_feature (1)..(186): Homolog of NCBI NO: 21537265 NR Description: unknown [Arabidopsis thaliana]
  misc_feature (1)..(186): Homolog of NCBI NO: 18395821 NR Description: expressed protein [Arabidopsis thaliana]
  misc_feature (1)..(186): Homolog of NCBI NO: 15241493 NR Description: expressed protein [Arabidopsis thaliana]
  misc_feature (1)..(118): Homolog of NCBI NO: 9294314 NR Description: gb|AAF24615.1~gene_id:K24M9.2~similar to unknown
  misc_feature (1)..(109): Homolog of NCBI NO: 15229670 NR Description: expressed protein [Arabidopsis thaliana]
  misc_feature (1)..(144): Homolog of NCBI NO: 34865276 NR Description: similar to KIAA0423 [Rattus norvegicus]
  misc_feature (1)..(141): Homolog of NCBI NO: 40807213 NR Description: Unknown (protein for IMAGE:6161345) [Homo sapiens]
MVKAMKNPRSALCKTSIMTCSDIFTAYGEKLLEGPHLKSMDDLLLQLLMKASQDKKFVCEEAEKALNTMVNSVARLPLLRKLQSYVRHSNPRVRAKAAVSTSNCVSKMEVNEMEEFGMILLAQMAADQLSDKLPEAREAARSMVNSLFEKFTWNEEEDEEGSKQEAWKKFCEKNVTGLNAQAMIKIVASQ

SEQ ID NO: 105254 - DNA, 945 bp, Arabidopsis thaliana
  misc_feature (1)..(945): Ceres Seq. ID no. 13616803
  misc_feature: MA Experiment ID: 108595 Result: Down-regulated in Transcription
  misc_feature: MA Experiment 108595 PARAMETER Experiment Name: At_Ler-pi_Ovule_cDNA_P Parameter: Plant Line Value: null
  misc_feature: MA Experiment ID: 108605 Result: Up-regulated in Transcription
  misc_feature: MA Experiment 108605 PARAMETER Experiment Name: At_100uM_ABA_cDNA_P Parameter: Timepoint (hr) Value: 6
  misc_feature: MA Experiment 108605 PARAMETER Experiment Name: At_100uM_ABA_cDNA_P Parameter: Tissue Value: Aerial
  misc_feature: MA Experiment 108605 PARAMETER Experiment Name: At_100uM_ABA_cDNA_P Parameter: Treatment Value: 100uM ABA vs. No Treatment
  misc_feature: MA Experiment ID: 108607 Result: Up-regulated in Transcription
  misc_feature: MA Experiment 108607 PARAMETER Experiment Name: At_100uM_ABA_cDNA_P Parameter: Timepoint (hr) Value: 4
  misc_feature: MA Experiment 108607 PARAMETER Experiment Name: At_100uM_ABA_cDNA_P Parameter: Tissue Value: Aerial
  misc_feature: MA Experiment 108607 PARAMETER Experiment Name: At_100uM_ABA_cDNA_P Parameter: Treatment Value: 100uM ABA vs. No Treatment
  misc_feature: MA Experiment ID: 20000070 Result: Up-regulated in Transcription
  misc_feature: MA Experiment 20000070 PARAMETER Experiment Name: At_100uM_ABA_Mutants_cDNA_P Parameter: Plant Line Value: CS24
  misc_feature: MA Experiment 20000070 PARAMETER Experiment Name: At_100uM_ABA_Mutants_cDNA_P Parameter: Timepoint (hr) Value: 6
  misc_feature: MA Experiment 20000070 PARAMETER Experiment Name: At_100uM_ABA_Mutants_cDNA_P Parameter: Tissue Value: Aerial
  misc_feature: MA Experiment 20000070 PARAMETER Experiment Name: At_100uM_ABA_Mutants_cDNA_P Parameter: Treatment Value: 100uM ABA vs. No Treatment
  misc_feature: MA Experiment ID: 20000071 Result: Up-regulated in Transcription
  misc_feature: MA Experiment 20000071 PARAMETER Experiment Name: At_100uM_ABA_Mutants_cDNA_P Parameter: Plant Line Value: CS8104
  misc_feature: MA Experiment 20000071 PARAMETER Experiment Name: At_100uM_ABA_Mutants_cDNA_P Parameter: Timepoint (hr) Value: 6
  misc_feature: MA Experiment 20000071 PARAMETER Experiment Name: At_100uM_ABA_Mutants_cDNA_P Parameter: Tissue Value: Aerial
  misc_feature: MA Experiment 20000071 PARAMETER Experiment Name: At_100uM_ABA_Mutants_cDNA_P Parameter: Treatment Value: 100uM ABA vs. No Treatment
  misc_feature: MA Experiment ID: 20000072 Result: Up-regulated in Transcription
  misc_feature: MA Experiment 20000072 PARAMETER Experiment Name: At_100uM_ABA_Mutants_cDNA_P Parameter: Plant Line Value: CS8105
  misc_feature: MA Experiment 20000072 PARAMETER Experiment Name: At_100uM_ABA_Mutants_cDNA_P Parameter: Timepoint (hr) Value: 6
  misc_feature: MA Experiment 20000072 PARAMETER Experiment Name: At_100uM_ABA_Mutants_cDNA_P Parameter: Tissue Value: Aerial
  misc_feature: MA Experiment 20000072 PARAMETER Experiment Name: At_100uM_ABA_Mutants_cDNA_P Parameter: Treatment Value: 100uM ABA vs. No Treatment
  misc_feature: MA Experiment ID: 20000117 Result: Up-regulated in Transcription
  misc_feature: MA Experiment 20000117 PARAMETER Experiment Name: At_100uM_ABA_Mutants_cDNA_P Parameter: Plant Line Value: Columbia
  misc_feature: MA Experiment 20000117 PARAMETER Experiment Name: At_100uM_ABA_Mutants_cDNA_P Parameter: Timepoint (hr) Value: 6
  misc_feature: MA Experiment 20000117 PARAMETER Experiment Name: At_100uM_ABA_Mutants_cDNA_P Parameter: Tissue Value: Aerial
  misc_feature: MA Experiment 20000117 PARAMETER Experiment Name: At_100uM_ABA_Mutants_cDNA_P Parameter: Treatment Value: 100uM ABA vs. No Treatment
  misc_feature: MA Experiment ID: 20000169 Result: Up-regulated in Transcription
  misc_feature: MA Experiment 20000169 PARAMETER Experiment Name: At_100uM_ABA_P Parameter: Age (day) Value: 14
  misc_feature: MA Experiment 20000169 PARAMETER Experiment Name: At_100uM_ABA_P Parameter: Organism Value: A. thaliana
  misc_feature: MA Experiment 20000169 PARAMETER Experiment Name: At_100uM_ABA_P Parameter: Plant Line Value: WS
  misc_feature: MA Experiment 20000169 PARAMETER Experiment Name: At_100uM_ABA_P Parameter: Timepoint (hr) Value: 6
  misc_feature: MA Experiment 20000169 PARAMETER Experiment Name: At_100uM_ABA_P Parameter: Tissue Value: Aerial
  misc_feature: MA Experiment 20000169 PARAMETER Experiment Name: At_100uM_ABA_P Parameter: Treatment Value: 100uM ABA vs. No Treatment
  misc_feature: MA Experiment ID: 20000264 Result: Up-regulated in Transcription
  misc_feature: MA Experiment 20000264 PARAMETER Experiment Name: At_Open_Flower_P Parameter: Age (day) Value: 21
  misc_feature: MA Experiment 20000264 PARAMETER Experiment Name: At_Open_Flower_P Parameter: Plant Line Value: WS
  misc_feature: MA Experiment 20000264 PARAMETER Experiment Name: At_Open_Flower_P Parameter: Tissue Value: Open Flower vs. Whole Plant
  misc_feature: MA Experiment ID: 20000265 Result: Up-regulated in Transcription
  misc_feature: MA Experiment 20000265 PARAMETER Experiment Name: At_Open_Flower_P Parameter: Age (day) Value: 21
  misc_feature: MA Experiment 20000265 PARAMETER Experiment Name: At_Open_Flower_P Parameter: Plant Line Value: WS
  misc_feature: MA Experiment 20000265 PARAMETER Experiment Name: At_Open_Flower_P Parameter: Tissue Value: Closed Flower vs. Whole Plant
  misc_feature: MA Experiment ID: 20000794 Result: Up-regulated in Transcription
  misc_feature: MA Experiment 20000794 PARAMETER Experiment Name: At_Petals_P Parameter: Age (day) Value: 23-25 days
  misc_feature: MA Experiment 20000794 PARAMETER Experiment Name: At_Petals_P Parameter: Plant Line Value: WS
  misc_feature: MA Experiment 20000794 PARAMETER Experiment Name: At_Petals_P Parameter: Tissue Value: Petals vs. Whole plant
ctccacgattctgaccaaaaaaaggagaaggaataagagaaaagtgagtttgttgtttgtatcgatcagaaaatggcgacgtcgatgatacagaggatgttcaagcaagggacgaagatcgtctgcgtcggccgtaactacgccgctcacgccaaagaactaggcaacgccgtccccaaggaaccagttatattcttgaagccaacatcatcatacttagaaaatggaggaacaattgagatcccacatcctttggattcacttcaccatgaagtagaactcgctttagtgattggacagaaagctagagatgtacctgaatcaatagccatggattacattggaggatatgcggttgctcttgatatgactgctagggaactccaagcttctgctaaggcatctggtctcccatggacggttgcgaaaggacaagataccttcactcctatcagctctgttctgccaaaggcgatggtgcgtgatcccgataatctagaactttggctcaaggttgatggtgaaacaagacagaagggtttgaccaaagatatgatattcaaggtcccctacctcattagctacataagttctataatgaccctttacggagatgtcatcttgacaggcacaccagaaggtgttggacctgtaaagataggtcagaagataacggccggaatcaccggtctatctgaagttcaattcgatgtggagaggcgtgtaaagcccttgagctaataagtggttttatttatctttcatacaaaaatgtcaattttataaaagcatctctaaaattttcatcacttactgtgtttcctaaggaagggagaaataaaactcgttactcattttatttgtaatctctataacaatggctctaagaccggtttaaattgtttatatgggagagtatttgtaaagttgtgatatttactgttg

SEQ ID NO: 105255 - protein, 222 aa, Arabidopsis thaliana
  peptide (1)..(222): Ceres Seq. ID no. 13616804
  misc_feature (30)..(196): Pfam Name: Fumarylacetoacetate (FAA) hydrolase family Pfam Description: Fumarylacetoacetate (FAA) hydrolase family
  misc_feature (1)..(222): Homolog of NCBI NO: 15234757 NR Description: isomerase like protein [Arabidopsis thaliana]
  misc_feature (1)..(222): Homolog of NCBI NO: 16209656 NR Description: AT4g15940/dl4011w [Arabidopsis thaliana]
  misc_feature (1)..(221): Homolog of NCBI NO: 15228286 NR Description: decarboxilase -related [Arabidopsis thaliana]
  misc_feature (1)..(185): Homolog of NCBI NO: 7485073 NR Description: hypothetical protein - Arabidopsis thaliana
  misc_feature (7)..(222): Homolog of NCBI NO: 34897304 NR Description: putative hydroxylase [Oryza sativa]
  misc_feature (7)..(186): Homolog of NCBI NO: 28372682 NR Description: putative isomerase [Oryza sativa (japonica
  misc_feature (6)..(214): Homolog of NCBI NO: 28829830 NR Description: similar to Arabidopsis thaliana (Mouse-ear AT4g15940/dl4011w (Isomerase like protein) [Dictyostelium
  misc_feature (1)..(216): Homolog of NCBI NO: 13654274 NR Description: hypothetical protein DKFZp566J2046 [Homo sapiens] hypothetical protein [Homo sapiens] >gi|21753214|dbj|BAC04308.1|
  misc_feature (1)..(216): Homolog of NCBI NO: 14336767 NR Description: similar to homoprotocatechuate catabolism
  misc_feature (1)..(210): Homolog of NCBI NO: 38648928 NR Description: Unknown (protein for MGC:74876) [Homo sapiens]
MATSMIQRMFKQGTKIVCVGRNYAAHAKELGNAVPKEPVIFLKPTSSYLENGGTIEIPHPLDSLHHEVELALVIGQKARDVPESIAMDYIGGYAVALDMTARELQASAKASGLPWTVAKGQDTFTPISSVLPKAMVRDPDNLELWLKVDGETRQKGLTKDMIFKVPYLISYISSIMTLYGDVILTGTPEGVGPVKIGQKITAGITGLSEVQFDVERRVKPLS

SEQ ID NO: 105256 - protein, 218 aa, Arabidopsis thaliana
  peptide (1)..(218): Ceres Seq. ID no. 13616805
  misc_feature (26)..(192): Pfam Name: Fumarylacetoacetate (FAA) hydrolase family Pfam Description: Fumarylacetoacetate (FAA) hydrolase family
  misc_feature (1)..(218): Homolog of NCBI NO: 15234757 NR Description: isomerase like protein [Arabidopsis thaliana]
  misc_feature (1)..(218): Homolog of NCBI NO: 16209656 NR Description: AT4g15940/dl4011w [Arabidopsis thaliana]
  misc_feature (1)..(217): Homolog of NCBI NO: 15228286 NR Description: decarboxilase -related [Arabidopsis thaliana]
  misc_feature (1)..(181): Homolog of NCBI NO: 7485073 NR Description: hypothetical protein - Arabidopsis thaliana
  misc_feature (3)..(218): Homolog of NCBI NO: 34897304 NR Description: putative hydroxylase [Oryza sativa]
  misc_feature (3)..(182): Homolog of NCBI NO: 28372682 NR Description: putative isomerase [Oryza sativa (japonica
  misc_feature (2)..(210): Homolog of NCBI NO: 28829830 NR Description: similar to Arabidopsis thaliana (Mouse-ear AT4g15940/dl4011w (Isomerase like protein) [Dictyostelium
  misc_feature (1)..(212): Homolog of NCBI NO: 13654274 NR Description: hypothetical protein DKFZp566J2046 [Homo sapiens] hypothetical protein [Homo sapiens] >gi|21753214|dbj|BAC04308.1|
  misc_feature (1)..(212): Homolog of NCBI NO: 14336767 NR Description: similar to homoprotocatechuate catabolism
  misc_feature (1)..(206): Homolog of NCBI NO: 38648928 NR Description: Unknown (protein for MGC:74876) [Homo sapiens]
MIQRMFKQGTKIVCVGRNYAAHAKELGNAVPKEPVIFLKPTSSYLENGGTIEIPHPLDSLHHEVELALVIGQKARDVPESIAMDYIGGYAVALDMTARELQASAKASGLPWTVAKGQDTFTPISSVLPKAMVRDPDNLELWLKVDGETRQKGLTKDMIFKVPYLISYISSIMTLYGDVILTGTPEGVGPVKIGQKITAGITGLSEVQFDVERRVKPLS

SEQ ID NO: 105257 - protein, 214 aa, Arabidopsis thaliana
  peptide (1)..(214): Ceres Seq. ID no. 13616806
  misc_feature (22)..(188): Pfam Name: Fumarylacetoacetate (FAA) hydrolase family Pfam Description: Fumarylacetoacetate (FAA) hydrolase family
  misc_feature (1)..(214): Homolog of NCBI NO: 15234757 NR Description: isomerase like protein [Arabidopsis thaliana]
  misc_feature (1)..(214): Homolog of NCBI NO: 16209656 NR Description: AT4g15940/dl4011w [Arabidopsis thaliana]
  misc_feature (1)..(213): Homolog of NCBI NO: 15228286 NR Description: decarboxilase -related [Arabidopsis thaliana]
  misc_feature (1)..(177): Homolog of NCBI NO: 7485073 NR Description: hypothetical protein - Arabidopsis thaliana
  misc_feature (1)..(214): Homolog of NCBI NO: 34897304 NR Description: putative hydroxylase [Oryza sativa]
  misc_feature (1)..(178): Homolog of NCBI NO: 28372682 NR Description: putative isomerase [Oryza sativa (japonica
  misc_feature (1)..(206): Homolog of NCBI NO: 28829830 NR Description: similar to Arabidopsis thaliana (Mouse-ear AT4g15940/dl4011w (Isomerase like protein) [Dictyostelium
  misc_feature (1)..(208): Homolog of NCBI NO: 13654274 NR Description: hypothetical protein DKFZp566J2046 [Homo sapiens] hypothetical protein [Homo sapiens] >gi|21753214|dbj|BAC04308.1|
  misc_feature (1)..(208): Homolog of NCBI NO: 14336767 NR Description: similar to homoprotocatechuate catabolism
  misc_feature (1)..(202): Homolog of NCBI NO: 38648928 NR Description: Unknown (protein for MGC:74876) [Homo sapiens]
MFKQGTKIVCVGRNYAAHAKELGNAVPKEPVIFLKPTSSYLENGGTIEIPHPLDSLHHEVELALVIGQKARDVPESIAMDYIGGYAVALDMTARELQASAKASGLPWTVAKGQDTFTPISSVLPKAMVRDPDNLELWLKVDGETRQKGLTKDMIFKVPYLISYISSIMTLYGDVILTGTPEGVGPVKIGQKITAGITGLSEVQFDVERRVKPLS

SEQ ID NO: 105258 - DNA, 1052 bp, Arabidopsis thaliana
  misc_feature (1)..(1052): Ceres Seq. ID no. 13616807
  misc_feature: MA Experiment ID: 108461 Result: Up-regulated in Transcription
  misc_feature: MA Experiment 108461 PARAMETER Experiment Name: At_Germinating_Seeds_cDNA_P Parameter: Age (day) Value: 1 vs. 0
  misc_feature: MA Experiment 108461 PARAMETER Experiment Name: At_Germinating_Seeds_cDNA_P Parameter: Tissue Value: Germinating Seeds
  misc_feature: MA Experiment ID: 108462 Result: Up-regulated in Transcription
  misc_feature: MA Experiment 108462 PARAMETER Experiment Name: At_Germinating_Seeds_cDNA_P Parameter: Age (day) Value: 2 vs. 0
  misc_feature: MA Experiment 108462 PARAMETER Experiment Name: At_Germinating_Seeds_cDNA_P Parameter: Tissue Value: Germinating Seeds
  misc_feature: MA Experiment ID: 20000111 Result: Down-regulated in Transcription
  misc_feature: MA Experiment 20000111 PARAMETER Experiment Name: At_42deg_Heat_cDNA_P Parameter: Temperature (deg C) Value: 42 vs. 22
  misc_feature: MA Experiment 20000111 PARAMETER Experiment Name: At_42deg_Heat_cDNA_P Parameter: Timepoint (hr) Value: 6
  misc_feature: MA Experiment 20000111 PARAMETER Experiment Name: At_42deg_Heat_cDNA_P Parameter: Tissue Value: Aerial
  misc_feature: MA Experiment ID: 20000113 Result: Down-regulated in Transcription
  misc_feature: MA Experiment 20000113 PARAMETER Experiment Name: At_42deg_Heat_cDNA_P Parameter: Temperature (deg C) Value: 42 vs. 22
  misc_feature: MA Experiment 20000113 PARAMETER Experiment Name: At_42deg_Heat_cDNA_P Parameter: Timepoint (hr) Value: 8
  misc_feature: MA Experiment 20000113 PARAMETER Experiment Name: At_42deg_Heat_cDNA_P Parameter: Tissue Value: Aerial
  misc_feature: MA Experiment ID: 20000224 Result: Up-regulated in Transcription
  misc_feature: MA Experiment ID: 20000234 Result: Up-regulated in Transcription
  misc_feature: MA Experiment 20000234 PARAMETER Experiment Name: At_Siliques_P Parameter: Age (day) Value: 21
  misc_feature: MA Experiment 20000234 PARAMETER Experiment Name: At_Siliques_P Parameter: Organism Value: A. thaliana
  misc_feature: MA Experiment 20000234 PARAMETER Experiment Name: At_Siliques_P Parameter: Plant Line Value: WS
  misc_feature: MA Experiment 20000234 PARAMETER Experiment Name: At_Siliques_P Parameter: Tissue Value: Less Than 5mm Siliques vs. Whole Plant
  misc_feature: MA Experiment ID: 20000235 Result: Up-regulated in Transcription
  misc_feature: MA Experiment 20000235 PARAMETER Experiment Name: At_Siliques_P Parameter: Age (day) Value: 21
  misc_feature: MA Experiment 20000235 PARAMETER Experiment Name: At_Siliques_P Parameter: Organism Value: A. thaliana
  misc_feature: MA Experiment 20000235 PARAMETER Experiment Name: At_Siliques_P Parameter: Plant Line Value: WS
  misc_feature: MA Experiment 20000235 PARAMETER Experiment Name: At_Siliques_P Parameter: Tissue Value: 5-10mm Siliques vs. Whole Plant
  misc_feature: MA Experiment ID: 20000264 Result: Up-regulated in Transcription
  misc_feature: MA Experiment 20000264 PARAMETER Experiment Name: At_Open_Flower_P Parameter: Age (day) Value: 21
  misc_feature: MA Experiment 20000264 PARAMETER Experiment Name: At_Open_Flower_P Parameter: Plant Line Value: WS
  misc_feature: MA Experiment 20000264 PARAMETER Experiment Name: At_Open_Flower_P Parameter: Tissue Value: Open Flower vs. Whole Plant
  misc_feature: MA Experiment ID: 20000265 Result: Up-regulated in Transcription
  misc_feature: MA Experiment 20000265 PARAMETER Experiment Name: At_Open_Flower_P Parameter: Age (day) Value: 21
  misc_feature: MA Experiment 20000265 PARAMETER Experiment Name: At_Open_Flower_P Parameter: Plant Line Value: WS
  misc_feature: MA Experiment 20000265 PARAMETER Experiment Name: At_Open_Flower_P Parameter: Tissue Value: Closed Flower vs. Whole Plant
  misc_feature: MA Experiment ID: 20000286 Result: Up-regulated in Transcription
  misc_feature: MA Experiment 20000286 PARAMETER Experiment Name: At_Open_Flower_P Parameter: Age (day) Value: 21
  misc_feature: MA Experiment 20000286 PARAMETER Experiment Name: At_Open_Flower_P Parameter: Plant Line Value: WS
  misc_feature: MA Experiment 20000286 PARAMETER Experiment Name: At_Open_Flower_P Parameter: Tissue Value: Half Open vs. Whole Plant
  misc_feature: MA Experiment ID: 20000451 Result: Down-regulated in Transcription
  misc_feature: MA Experiment 20000451 PARAMETER Experiment Name: At_CS6879_Shoots-Roots_P Parameter: Age (day) Value: 14
  misc_feature: MA Experiment 20000451 PARAMETER Experiment Name: At_CS6879_Shoots-Roots_P Parameter: Organism Value: A. thaliana
  misc_feature: MA Experiment 20000451 PARAMETER Experiment Name: At_CS6879_Shoots-Roots_P Parameter: Plant Line Value: CS6879 vs. WS
  misc_feature: MA Experiment 20000451 PARAMETER Experiment Name: At_CS6879_Shoots-Roots_P Parameter: Tissue Value: Roots
  misc_feature: MA Experiment ID: 20000794 Result: Up-regulated in Transcription
  misc_feature: MA Experiment 20000794 PARAMETER Experiment Name: At_Petals_P Parameter: Age (day) Value: 23-25 days
  misc_feature: MA Experiment 20000794 PARAMETER Experiment Name: At_Petals_P Parameter: Plant Line Value: WS
  misc_feature: MA Experiment 20000794 PARAMETER Experiment Name: At_Petals_P Parameter: Tissue Value: Petals vs. Whole plant
  misc_feature: MA Experiment ID: 20001905 Result: Down-regulated in Transcription
  misc_feature: MA Experiment 20001905 PARAMETER Experiment Name: At_Drought_Reproduction_P Parameter: Age (day) Value: 40
  misc_feature: MA Experiment 20001905 PARAMETER Experiment Name: At_Drought_Reproduction_P Parameter: Organism Value: A. thaliana
  misc_feature: MA Experiment 20001905 PARAMETER Experiment Name: At_Drought_Reproduction_P Parameter: Plant Line Value: WS
  misc_feature: MA Experiment 20001905 PARAMETER Experiment Name: At_Drought_Reproduction_P Parameter: Timepoint (day) Value: 10
  misc_feature: MA Experiment 20001905 PARAMETER Experiment Name: At_Drought_Reproduction_P Parameter: Tissue Value: Rosettes
  misc_feature: MA Experiment 20001905 PARAMETER Experiment Name: At_Drought_Reproduction_P Parameter: Treatment Value: Drought vs. No Drought
  misc_feature: MA Experiment ID: 20001911 Result: Down-regulated in Transcription
  misc_feature: MA Experiment 20001911 PARAMETER Experiment Name: At_Drought_Reproduction_P Parameter: Age (day) Value: 40
  misc_feature: MA Experiment 20001911 PARAMETER Experiment Name: At_Drought_Reproduction_P Parameter: Organism Value: A. thaliana
  misc_feature: MA Experiment 20001911 PARAMETER Experiment Name: At_Drought_Reproduction_P Parameter: Plant Line Value: WS
  misc_feature: MA Experiment 20001911 PARAMETER Experiment Name: At_Drought_Reproduction_P Parameter: Timepoint (day) Value: 10
  misc_feature: MA Experiment 20001911 PARAMETER Experiment Name: At_Drought_Reproduction_P Parameter: Tissue Value: Flowers
  misc_feature: MA Experiment 20001911 PARAMETER Experiment Name: At_Drought_Reproduction_P Parameter: Treatment Value: Drought vs. No Drought
acattttcgtcttcgtctccaatgattgctctctcactctcagtctcactcacatcattaccattctccttcgcgttttcatcgactccgtgcaaatcacgcgcctctcctccacgtagcaccgtctcgttgagttcttccaggagacgacaagatcgccggcgatcaattgaggctatgtctcaggtgatggaattggaagatgaatccgatttcgagaagcttctctcatcggataatcggatctcgatcactggattcggttctcttctctccgagagaagcgcgaggagtacattcccagatttggagaatttcagaatcgcgaaattgcaaggattcagaagagttttcgctcattctgctccgatcttcttcgagcgtggcatcgcgaatcctgaaactaaggagatctcaagcttgagtgttgagccatgtgaaggagagagccttgtggttactgtcttcgagatcaaaagctcagagattccggcttttattggaagggagcttgagttccggtttctcgctgttgttcctgaaacattggaaggcaaaccttacaccaattctgcggtactttgtggtcgatacagtgatgaggagtttttccagattagatgcaaaggaaacaaagggatttactttcaacattatggaagattcaagatcgataagatatggcgggacgacatcttaccttgtcgtctctatctaagacactgtgtgttggctgctaagaatctgggagatgaagcttacaataactttctggatcatacattcttgggagatcgaaaaacaaccatcagagagtatttaagcagcacagggtctggtatcatggaagaagaaccaccggaggctctaaagtctagatatggaggttgatcaaaaaccaacaaaaaaagttaaactgatttttatcaagcttcaaacgttatcgaagctagttataaaattaagaaaacaaaaatcaacaaatgtcccacatcgggagttttagaggagggtagcgtttctttggcctatataagagaatgagttttgtc

SEQ ID NO: 105259 - protein, 296 aa, Arabidopsis thaliana
  peptide (1)..(296): Ceres Seq. ID no. 13616808
  misc_feature (8)..(296): Homolog of NCBI NO: 7485175 NR Description: hypothetical protein - Arabidopsis thaliana hypothetical protein [Arabidopsis thaliana]
  misc_feature (60)..(296): Homolog of NCBI NO: 30683505 NR Description: expressed protein [Arabidopsis thaliana]
  misc_feature (90)..(296): Homolog of NCBI NO: 26452147 NR Description: unknown protein [Arabidopsis thaliana]
TFSSSSPMIALSLSVSLTSLPFSFAFSSTPCKSRASPPRSTVSLSSSRRRQDRRRSIEAMSQVMELEDESDFEKLLSSDNRISITGFGSLLSERSARSTFPDLENFRIAKLQGFRRVFAHSAPIFFERGIANPETKEISSLSVEPCEGESLVVTVFEIKSSEIPAFIGRELEFRFLAVVPETLEGKPYTNSAVLCGRYSDEEFFQIRCKGNKGIYFQHYGRFKIDKIWRDDILPCRLYLRHCVLAAKNLGDEAYNNFLDHTFLGDRKTTIREYLSSTGSGIMEEEPPEALKSRYGG

SEQ ID NO: 105260 - protein, 289 aa, Arabidopsis thaliana
  peptide (1)..(289): Ceres Seq. ID no. 13616809
  misc_feature (1)..(289): Homolog of NCBI NO: 7485175 NR Description: hypothetical protein - Arabidopsis thaliana hypothetical protein [Arabidopsis thaliana]
  misc_feature (53)..(289): Homolog of NCBI NO: 30683505 NR Description: expressed protein [Arabidopsis thaliana]
  misc_feature (83)..(289): Homolog of NCBI NO: 26452147 NR Description: unknown protein [Arabidopsis thaliana]
MIALSLSVSLTSLPFSFAFSSTPCKSRASPPRSTVSLSSSRRRQDRRRSIEAMSQVMELEDESDFEKLLSSDNRISITGFGSLLSERSARSTFPDLENFRIAKLQGFRRVFAHSAPIFFERGIANPETKEISSLSVEPCEGESLVVTVFEIKSSEIPAFIGRELEFRFLAVVPETLEGKPYTNSAVLCGRYSDEEFFQIRCKGNKGIYFQHYGRFKIDKIWRDDILPCRLYLRHCVLAAKNLGDEAYNNFLDHTFLGDRKTTIREYLSSTGSGIMEEEPPEALKSRYGG

SEQ ID NO: 105261 - protein, 237 aa, Arabidopsis thaliana
  peptide (1)..(237): Ceres Seq. ID no. 13616810
  misc_feature (1)..(237): Homolog of NCBI NO: 7485175 NR Description: hypothetical protein - Arabidopsis thaliana hypothetical protein [Arabidopsis thaliana]
  misc_feature (1)..(237): Homolog of NCBI NO: 30683505 NR Description: expressed protein [Arabidopsis thaliana]
  misc_feature (31)..(237): Homolog of NCBI NO: 26452147 NR Description: unknown protein [Arabidopsis thaliana]
MSQVMELEDESDFEKLLSSDNRISITGFGSLLSERSARSTFPDLENFRIAKLQGFRRVFAHSAPIFFERGIANPETKEISSLSVEPCEGESLVVTVFEIKSSEIPAFIGRELEFRFLAVVPETLEGKPYTNSAVLCGRYSDEEFFQIRCKGNKGIYFQHYGRFKIDKIWRDDILPCRLYLRHCVLAAKNLGDEAYNNFLDHTFLGDRKTTIREYLSSTGSGIMEEEPPEALKSRYGG

SEQ ID NO: 105262 - DNA, 1176 bp, Arabidopsis thaliana
  misc_feature (1)..(1176): Ceres Seq. ID no. 13616816
  misc_feature: MA Experiment ID: 20000794 Result: Up-regulated in Transcription
  misc_feature: MA Experiment 20000794 PARAMETER Experiment Name: At_Petals_P Parameter: Age (day) Value: 23-25 days
  misc_feature: MA Experiment 20000794 PARAMETER Experiment Name: At_Petals_P Parameter: Plant Line Value: WS
  misc_feature: MA Experiment 20000794 PARAMETER Experiment Name: At_Petals_P Parameter: Tissue Value: Petals vs. Whole plant
attcgtaaccccgtgcaaaaaaaactgaaaaccccaaatccaacctctctcactcaaaaaccatgtcttggctcttcaaatctcgcggcgatgacgatcacgatcccgatcccgatccttccacaactcatggcggtgtcaaagaagatttatcttccttactccgtggcgtcgcagctttcctggcaccgcctccttctccacctgtaaacgaacgccgactctcctctgataattcaccaactcagctaggtcttctcgggatccgcaacgatctagccgagattcgtggaaatttctccaatttcgcatctaatttactccaatttcctagtaatctaagagatagagaaagtagtagaagatctccgttgaacgatcaagttcctggaatctctgaagaagtagtcgatttcgctgttaaaatctcgacgaaacctggttgttggacagattttccattgtcactcgatactgaatttgaactgtctgaggctcaaagggcacatgcatcagccattgaagatttggttcctggccttgtagctgtgaagaatcaagttagtagttacatggatgatgaacacttctggctgatttattttattttgctgatgccgagactgaatgggcatgattttgaactcttagcaacatgcaaggtatttgaaacaagggatcaacttttactaaagctgcaaaagaaagagacagggtcaagcaagagcactactggtcacgaaactcctgaagaaggtagcagtagggaaacagaaaccgttgagggagtcattgacaagatagagactctaaaaattgagcaaagggagataagtgatgagtcatctgaagaacaacggaggagtttcagagatgaagaggtaatctcctttagtgatttagatgtcgatgatctctcggagaagccaagtcccaacaggagtacactgaaaagaccagcatcaaacgcaagcgggtcaagctgggttcagctcagcaagagccaagttggacatagcaaggattcggaaggtgattccagtgactggcttccaattggcgattctgattaacgtttaaaggtatgaaattgaatattactgtaaagtgaagtgttagcaatgacttttaaatgaaaccatgcacatttttattaataaaaatcttactgtgtag

SEQ ID NO: 105263 - protein, 336 aa, Arabidopsis thaliana; identical to SEQ ID NO: 22118
  peptide (1)..(336): Ceres Seq. ID no. 13616817
  misc_feature (139)..(184): Pfam Name: BSD domain Pfam Description: BSD domain
  misc_feature (1)..(336): Homolog of NCBI NO: 18396945 NR Description: expressed protein [Arabidopsis thaliana] expressed protein [Arabidopsis thaliana] unknown protein [Arabidopsis thaliana]
  misc_feature (1)..(336): Homolog of NCBI NO: 21592796 NR Description: unknown [Arabidopsis thaliana]
  misc_feature (1)..(308): Homolog of NCBI NO: 25411374 NR Description: hypothetical protein At2g10950 [imported] -
  misc_feature (36)..(284): Homolog of NCBI NO: 18425006 NR Description: expressed protein [Arabidopsis thaliana] gene_id:K14B20.8~unknown protein [Arabidopsis thaliana] unknown protein [Arabidopsis thaliana]
  misc_feature (108)..(328): Homolog of NCBI NO: 28273391 NR Description: putative BSD domain containing protein [Oryza
  misc_feature (15)..(86): Homolog of NCBI NO: 28273391 NR Description: putative BSD domain containing protein [Oryza
  misc_feature (69)..(335): Homolog of NCBI NO: 15229611 NR Description: expressed protein [Arabidopsis thaliana]
  misc_feature (111)..(325): Homolog of NCBI NO: 21555533 NR Description: unknown [Arabidopsis thaliana]
  misc_feature (111)..(332): Homolog of NCBI NO: 18391195 NR Description: expressed protein [Arabidopsis thaliana]
  misc_feature (63)..(286): Homolog of NCBI NO: 34909848 NR Description: OSJNBb0053G03.5 [Oryza sativa (japonica

SEQ ID NO: 105264 - DNA, 1303 bp, Arabidopsis thaliana
  misc_feature (1)..(1303): Ceres Seq. ID no. 13616825
  misc_feature: MA Experiment ID: 108461 Result: Up-regulated in Transcription
  misc_feature: MA Experiment 108461 PARAMETER Experiment Name: At_Germinating_Seeds_cDNA_P Parameter: Age (day) Value: 1 vs. 0
  misc_feature: MA Experiment 108461 PARAMETER Experiment Name: At_Germinating_Seeds_cDNA_P Parameter: Tissue Value: Germinating Seeds
  misc_feature: MA Experiment ID: 108462 Result: Up-regulated in Transcription
  misc_feature: MA Experiment 108462 PARAMETER Experiment Name: At_Germinating_Seeds_cDNA_P Parameter: Age (day) Value: 2 vs. 0
  misc_feature: MA Experiment 108462 PARAMETER Experiment Name: At_Germinating_Seeds_cDNA_P Parameter: Tissue Value: Germinating Seeds
  misc_feature: MA Experiment ID: 108463 Result: Up-regulated in Transcription
  misc_feature: MA Experiment 108463 PARAMETER Experiment Name: At_Germinating_Seeds_cDNA_P Parameter: Age (day) Value: 3 vs. 0
  misc_feature: MA Experiment 108463 PARAMETER Experiment Name: At_Germinating_Seeds_cDNA_P Parameter: Tissue Value: Germinating Seeds
  misc_feature: MA Experiment ID: 108464 Result: Up-regulated in Transcription
  misc_feature: MA Experiment 108464 PARAMETER Experiment Name: At_Germinating_Seeds_cDNA_P Parameter: Age (day) Value: 4 vs. 0
  misc_feature: MA Experiment 108464 PARAMETER Experiment Name: At_Germinating_Seeds_cDNA_P Parameter: Tissue Value: Germinating Seeds
  misc_feature: MA Experiment ID: 108473 Result: Down-regulated in Transcription
  misc_feature: MA Experiment 108473 PARAMETER Experiment Name: At_Drought_Flowers_cDNA_P Parameter: Timepoint (hr) Value: 7 d
  misc_feature: MA Experiment 108473 PARAMETER Experiment Name: At_Drought_Flowers_cDNA_P Parameter: Tissue Value: Flower
  misc_feature: MA Experiment 108473 PARAMETER Experiment Name: At_Drought_Flowers_cDNA_P Parameter: Treatment Value: Drought vs. No Drought
  misc_feature: MA Experiment ID: 108501 Result: Down-regulated in Transcription
  misc_feature: MA Experiment 108501 PARAMETER Experiment Name: At_ap2_floral_buds_cDNA_P Parameter: Plant Line Value: ap2 (Ler.)
  misc_feature: MA Experiment 108501 PARAMETER Experiment Name: At_ap2_floral_buds_cDNA_P Parameter: Tissue Value: Closed Flower
  misc_feature: MA Experiment ID: 108572 Result: Up-regulated in Transcription
  misc_feature: MA Experiment 108572 PARAMETER Experiment Name: At_Drought_cDNA_P Parameter: Timepoint (hr) Value: 1
  misc_feature: MA Experiment 108572 PARAMETER Experiment Name: At_Drought_cDNA_P Parameter: Tissue Value: Aerial
  misc_feature: MA Experiment 108572 PARAMETER Experiment Name: At_Drought_cDNA_P Parameter: Treatment Value: Drought vs. No Drought
  misc_feature: MA Experiment ID: 108574 Result: Up-regulated in Transcription
  misc_feature: MA Experiment 108574 PARAMETER Experiment Name: At_Wounding__cDNA_P Parameter: Timepoint (hr) Value: 1
  misc_feature: MA Experiment 108574 PARAMETER Experiment Name: At_Wounding__cDNA_P Parameter: Tissue Value: Aerial
  misc_feature: MA Experiment 108574 PARAMETER Experiment Name: At_Wounding__cDNA_P Parameter: Treatment Value: Wounding vs. No Wounding
  misc_feature: MA Experiment ID: 108576 Result: Down-regulated in Transcription
  misc_feature: MA Experiment 108576 PARAMETER Experiment Name: At_42deg_Heat_cDNA_P Parameter: Temperature (deg C) Value: 42 vs. 22
  misc_feature: MA Experiment 108576 PARAMETER Experiment Name: At_42deg_Heat_cDNA_P Parameter: Timepoint (hr) Value: 1
  misc_feature: MA Experiment 108576 PARAMETER Experiment Name: At_42deg_Heat_cDNA_P Parameter: Tissue Value: Aerial
  misc_feature: MA Experiment ID: 108577 Result: Down-regulated in Transcription
  misc_feature: MA Experiment 108577 PARAMETER Experiment Name: At_42deg_Heat_cDNA_P Parameter: Temperature (deg C) Value: 42 vs. 22
  misc_feature: MA Experiment 108577 PARAMETER Experiment Name: At_42deg_Heat_cDNA_P Parameter: Timepoint (hr) Value: 6
  misc_feature: MA Experiment 108577 PARAMETER Experiment Name: At_42deg_Heat_cDNA_P Parameter: Tissue Value: Aerial
  misc_feature: MA Experiment ID: 108595 Result: Down-regulated in Transcription
  misc_feature: MA Experiment 108595 PARAMETER Experiment Name: At_Ler-pi_Ovule_cDNA_P Parameter: Plant Line Value: null
  misc_feature: MA Experiment ID: 108605 Result: Up-regulated in Transcription
  misc_feature: MA Experiment 108605 PARAMETER Experiment Name: At_100uM_ABA_cDNA_P Parameter: Timepoint (hr) Value: 6
  misc_feature: MA Experiment 108605 PARAMETER Experiment Name: At_100uM_ABA_cDNA_P Parameter: Tissue Value: Aerial
  misc_feature: MA Experiment 108605 PARAMETER Experiment Name: At_100uM_ABA_cDNA_P Parameter: Treatment Value: 100uM ABA vs. No Treatment
  misc_feature: MA Experiment ID: 108607 Result: Up-regulated in Transcription
  misc_feature: MA Experiment 108607 PARAMETER Experiment Name: At_100uM_ABA_cDNA_P Parameter: Timepoint (hr) Value: 4
  misc_feature: MA Experiment 108607 PARAMETER Experiment Name: At_100uM_ABA_cDNA_P Parameter: Tissue Value: Aerial
  misc_feature: MA Experiment 108607 PARAMETER Experiment Name: At_100uM_ABA_cDNA_P Parameter: Treatment Value: 100uM ABA vs. No Treatment
  misc_feature: MA Experiment ID: 20000093 Result: Down-regulated in Transcription
  misc_feature: MA Experiment 20000093 PARAMETER Experiment Name: At_42deg_Heat_cDNA_P Parameter: Temperature (deg C) Value: 42 vs. 22
  misc_feature: MA Experiment 20000093 PARAMETER Experiment Name: At_42deg_Heat_cDNA_P Parameter: Timepoint (hr) Value: 0.5
  misc_feature: MA Experiment 20000093 PARAMETER Experiment Name: At_42deg_Heat_cDNA_P Parameter: Tissue Value: Aerial
  misc_feature: MA Experiment ID: 20000111 Result: Down-regulated in Transcription
  misc_feature: MA Experiment 20000111 PARAMETER Experiment Name: At_42deg_Heat_cDNA_P Parameter: Temperature (deg C) Value: 42 vs. 22
  misc_feature: MA Experiment 20000111 PARAMETER Experiment Name: At_42deg_Heat_cDNA_P Parameter: Timepoint (hr) Value: 6
  misc_feature: MA Experiment 20000111 PARAMETER Experiment Name: At_42deg_Heat_cDNA_P Parameter: Tissue Value: Aerial
  misc_feature: MA Experiment ID: 20000112 Result: Down-regulated in Transcription
  misc_feature: MA Experiment 20000112 PARAMETER Experiment Name: At_42deg_Heat_cDNA_P Parameter: Temperature (deg C) Value: 42 vs. 22
  misc_feature: MA Experiment 20000112 PARAMETER Experiment Name: At_42deg_Heat_cDNA_P Parameter: Timepoint (hr) Value: 2
  misc_feature: MA Experiment 20000112 PARAMETER Experiment Name: At_42deg_Heat_cDNA_P Parameter: Tissue Value: Aerial
  misc_feature: MA Experiment ID: 20000113 Result: Down-regulated in Transcription
  misc_feature: MA Experiment 20000113 PARAMETER Experiment Name: At_42deg_Heat_cDNA_P Parameter: Temperature (deg C) Value: 42 vs. 22
  misc_feature: MA Experiment 20000113 PARAMETER Experiment Name: At_42deg_Heat_cDNA_P Parameter: Timepoint (hr) Value: 8
  misc_feature: MA Experiment 20000113 PARAMETER Experiment Name: At_42deg_Heat_cDNA_P Parameter: Tissue Value: Aerial
  misc_feature: MA Experiment ID: 20000144 Result: Down-regulated in Transcription
  misc_feature: MA Experiment 20000144 PARAMETER Experiment Name: At_42deg_Heat_cDNA_P Parameter: Temperature (deg C) Value: 42 vs. 22
  misc_feature: MA Experiment 20000144 PARAMETER Experiment Name: At_42deg_Heat_cDNA_P Parameter: Timepoint (hr) Value: 1
  misc_feature: MA Experiment 20000144 PARAMETER Experiment Name: At_42deg_Heat_cDNA_P Parameter: Tissue Value: Aerial
  misc_feature: MA Experiment ID: 20000180 Result: Up-regulated in Transcription
  misc_feature: MA Experiment 20000180 PARAMETER Experiment Name: At_Germinating_Seeds_P Parameter: Age (hr) Value: 24 vs. 0
  misc_feature: MA Experiment 20000180 PARAMETER Experiment Name: At_Germinating_Seeds_P Parameter: Tissue Value: Germinating Seeds
  misc_feature: MA Experiment ID: 20000185 Result: Down-regulated in Transcription
  misc_feature: MA Experiment 20000185 PARAMETER Experiment Name: At_Roots__P Parameter: Age (day) Value: 7 vs. 21
  misc_feature: MA Experiment 20000185 PARAMETER Experiment Name: At_Roots__P Parameter: Organism Value: A. thaliana
  misc_feature: MA Experiment 20000185 PARAMETER Experiment Name: At_Roots__P Parameter: Tissue Value: Roots vs. Whole Plant
  misc_feature: MA Experiment ID: 20000267 Result: Up-regulated in Transcription
  misc_feature: MA Experiment 20000267 PARAMETER Experiment Name: At_Drought_P Parameter: Age (day) Value: 7
  misc_feature: MA Experiment 20000267 PARAMETER Experiment Name: At_Drought_P Parameter: Organism Value: A. thaliana
  misc_feature: MA Experiment 20000267 PARAMETER Experiment Name: At_Drought_P Parameter: Plant Line Value: WS
  misc_feature: MA Experiment 20000267 PARAMETER Experiment Name: At_Drought_P Parameter: Timepoint (hr) Value: 6
  misc_feature: MA Experiment 20000267 PARAMETER Experiment Name: At_Drought_P Parameter: Tissue Value: Whole Plant
  misc_feature: MA Experiment 20000267 PARAMETER Experiment Name: At_Drought_P Parameter: Treatment Value: Drought vs. No Drought
  misc_feature: MA Experiment ID: 20000286 Result: Up-regulated in Transcription
  misc_feature: MA Experiment 20000286 PARAMETER Experiment Name: At_Open_Flower_P Parameter: Age (day) Value: 21
  misc_feature: MA Experiment 20000286 PARAMETER Experiment Name: At_Open_Flower_P Parameter: Plant Line Value: WS
  misc_feature: MA Experiment 20000286 PARAMETER Experiment Name: At_Open_Flower_P Parameter: Tissue Value: Half Open vs. Whole Plant
  misc_feature: MA Experiment ID: 20000436 Result: Up-regulated in Transcription
  misc_feature: MA Experiment 20000436 PARAMETER Experiment Name: At_Drought_P Parameter: Age (day) Value: 7
  misc_feature: MA Experiment 20000436 PARAMETER Experiment Name: At_Drought_P Parameter: Organism Value: A. thaliana
  misc_feature: MA Experiment 20000436 PARAMETER Experiment Name: At_Drought_P Parameter: Plant Line Value: WS
  misc_feature: MA Experiment 20000436 PARAMETER Experiment Name: At_Drought_P Parameter: Timepoint (hr) Value: 12
  misc_feature: MA Experiment 20000436 PARAMETER Experiment Name: At_Drought_P Parameter: Tissue Value: Whole Plant
  misc_feature: MA Experiment 20000436 PARAMETER Experiment Name: At_Drought_P Parameter: Treatment Value: Drought vs. No Drought
  misc_feature: MA Experiment ID: 20000794 Result: Down-regulated in Transcription
  misc_feature: MA Experiment 20000794 PARAMETER Experiment Name: At_Petals_P Parameter: Age (day) Value: 23-25 days
  misc_feature: MA Experiment 20000794 PARAMETER Experiment Name: At_Petals_P Parameter: Plant Line Value: WS
  misc_feature: MA Experiment 20000794 PARAMETER Experiment Name: At_Petals_P Parameter: Tissue Value: Petals vs. Whole plant
  misc_feature: MA Experiment ID: 20001248 Result: Down-regulated in Transcription
  misc_feature: MA Experiment 20001248 PARAMETER Experiment Name: At_Far-red-induction_P Parameter: Age (day) Value: 7
  misc_feature: MA Experiment 20001248 PARAMETER Experiment Name: At_Far-red-induction_P Parameter: Light Value: Far-red vs. White
  misc_feature: MA Experiment 20001248 PARAMETER Experiment Name: At_Far-red-induction_P Parameter: Organism Value: A. thaliana
  misc_feature: MA Experiment 20001248 PARAMETER Experiment Name: At_Far-red-induction_P Parameter: Plant Line Value: Columbia
  misc_feature: MA Experiment 20001248 PARAMETER Experiment Name: At_Far-red-induction_P Parameter: Timepoint (hr) Value: 4
  misc_feature: MA Experiment 20001248 PARAMETER Experiment Name: At_Far-red-induction_P Parameter: Tissue Value: Whole Plant
  misc_feature: MA Experiment ID: 20001554 Result: Up-regulated in Transcription
  misc_feature: MA Experiment 20001554 PARAMETER Experiment Name: At_Drought_Soil_Dry_P Parameter: Age (day) Value: 21
  misc_feature: MA Experiment 20001554 PARAMETER Experiment Name: At_Drought_Soil_Dry_P Parameter: Organism Value: A. thaliana
  misc_feature: MA Experiment 20001554 PARAMETER Experiment Name: At_Drought_Soil_Dry_P Parameter: Plant Line Value: WS
  misc_feature: MA Experiment 20001554 PARAMETER Experiment Name: At_Drought_Soil_Dry_P Parameter: Post Timepoint (hr) Value: None
  misc_feature: MA Experiment 20001554 PARAMETER Experiment Name: At_Drought_Soil_Dry_P Parameter: Post-Treatment Value: None
  misc_feature: MA Experiment 20001554 PARAMETER Experiment Name: At_Drought_Soil_Dry_P Parameter: Timepoint (day) Value: 7
  misc_feature: MA Experiment 20001554 PARAMETER Experiment Name: At_Drought_Soil_Dry_P Parameter: Treatment Value: Drought vs. No Drought
  misc_feature: MA Experiment ID: 20001911 Result: Down-regulated in Transcription
  misc_feature: MA Experiment 20001911 PARAMETER Experiment Name: At_Drought_Reproduction_P Parameter: Age (day) Value: 40
  misc_feature: MA Experiment 20001911 PARAMETER Experiment Name: At_Drought_Reproduction_P Parameter: Organism Value: A. thaliana
  misc_feature: MA Experiment 20001911 PARAMETER Experiment Name: At_Drought_Reproduction_P Parameter: Plant Line Value: WS
  misc_feature: MA Experiment 20001911 PARAMETER Experiment Name: At_Drought_Reproduction_P Parameter: Timepoint (day) Value: 10
  misc_feature: MA Experiment 20001911 PARAMETER Experiment Name: At_Drought_Reproduction_P Parameter: Tissue Value: Flowers
  misc_feature: MA Experiment 20001911 PARAMETER Experiment Name: At_Drought_Reproduction_P Parameter: Treatment Value: Drought vs. No Drought
atggaatcacactatcacaatcataaccacaaaaacaaacactatgggacacctcaaaagtctcttcacaattcttttcctaatagctatgtcttcaaccgtaacatttgccggtaaaatacccgcgatcatcgtgtttggcgactcttccgttgatgccgggaacaacaactatatcccaactgttgctagaagcaactttgagccatatggacgggactttgttggtggaaagccgaccggacggttttgtaacggaaagattgcgacggattttatgtccgaagccttagggcttaaaccaatcattccggcgtacttggatccttcttataacatttcggattttgcaacaggtgttacctttgcttctgctgccactggctatgacaacgccacttctgatgttctgtcggtactacctctatggaaacaactcgaatactacaaagaataccaaacaaaacttaaagcataccaaggaaaagacagaggcacagagactatagaaagctctctctacctcataagcatagggaccaacgatttcctcgagaattactttgcctttccgggccgttcttcgcaatattccgtcagtctttaccaagattttctagccggaatcgcgaaagaatttgtgaagaagttgcatggacttggtgctagaaagatctcactaggtgggttacctccaatgggatgcatgcctttagagagagccaccaacattggcactggaggtgagtgcgtaggacggtacaacgacatagccgtccagttcaacagcaagcttgataagatggttgagaagctgagcaaagagctccctggttccaacctcgttttctcaaatccctatgagccatttatgcggatcatcaagaacccttcctcctttgggttcgaggtggtgggagcggcatgttgcgcgacagggatgttcgagatgggatatggttgtcaaaggaataacccattcacatgtacaaacgcagacaagtatgtgttttgggactcatttcacccaacacagaagactaatcacatcatggccaatgctctcatgaacagcacattccctcacttcctctaaattatttttatgtttgtgtgtggaaactaaatagatataagagtaatattattattagggattgcttttgatatgcactctgtatgtatttatatttaagtagattttgctcttgtgttagttagcgaaacctacgtttcttttctagattatggtgtgcctatatatgtagcttattttatcctctttagttattctcaatatatc

SEQ ID NO: 105265 - protein, 364 aa, Arabidopsis thaliana
  peptide (1)..(364): Ceres Seq. ID no. 13616826
  misc_feature (43)..(355): Pfam Name: GDSL-like Lipase/Acylhydrolase Pfam Description: GDSL-like Lipase/Acylhydrolase
  misc_feature (15)..(364): Homolog of NCBI NO: 15228157 NR Description: GDSL-motif lipase/hydrolase protein [Arabidopsis
  misc_feature (15)..(364): Homolog of NCBI NO: 21593518 NR Description: putative GDSL-motif lipase/hydrolase [Arabidopsis
  misc_feature (39)..(363): Homolog of NCBI NO: 18416824 NR Description: GDSL-motif lipase/hydrolase protein [Arabidopsis
  misc_feature (39)..(363): Homolog of NCBI NO: 7485330 NR Description: hypothetical protein F10M23.130 - Arabidopsis >gi|4455202|emb|CAB36525.1| putative APG protein [Arabidopsis >gi|7269531|emb|CAB79534.1| putative APG protein [Arabidopsis
  misc_feature (62)..(353): Homolog of NCBI NO: 15224201 NR Description: GDSL-motif lipase/hydrolase protein [Arabidopsis
  misc_feature (21)..(364): Homolog of NCBI NO: 15222901 NR Description: family II extracellular lipase 3 (EXL3) thaliana] >gi|15054386|gb|AAK30018.1| family II lipase EXL3
  misc_feature (21)..(364): Homolog of NCBI NO: 26449364 NR Description: putative family II lipase EXL3 [Arabidopsis
  misc_feature (21)..(356): Homolog of NCBI NO: 10638955 NR Description: putative proline-rich protein APG isolog [Cicer
  misc_feature (21)..(364): Homolog of NCBI NO: 25404994 NR Description: protein T4O12.13 [imported] - Arabidopsis >gi|8778808|gb|AAF79815.1|AC007396_8 T4O12.13 [Arabidopsis
  misc_feature (15)..(360): Homolog of NCBI NO: 15228189 NR Description: GDSL-motif lipase/hydrolase protein [Arabidopsis
WNHTITIITTKTNTMGHLKSLFTILFLIAMSSTVTFAGKIPAIIVFGDSSVDAGNNNYIPTVARSNFEPYGRDFVGGKPTGRFCNGKIATDFMSEALGLKPIIPAYLDPSYNISDFATGVTFASAATGYDNATSDVLSVLPLWKQLEYYKEYQTKLKAYQGKDRGTETIESSLYLISIGTNDFLENYFAFPGRSSQYSVSLYQDFLAGIAKEFVKKLHGLGARKISLGGLPPMGCMPLERATNIGTGGECVGRYNDIAVQFNSKLDKMVEKLSKELPGSNLVFSNPYEPFMRIIKNPSSFGFEVVGAACCATGMFEMGYGCQRNNPFTCTNADKYVFWDSFHPTQKTNHIMANALMNSTFPHFL

SEQ ID NO: 105266 - protein, 350 aa, Arabidopsis thaliana
  peptide (1)..(350): Ceres Seq. ID no. 13616827
  misc_feature (29)..(341): Pfam Name: GDSL-like Lipase/Acylhydrolase Pfam Description: GDSL-like Lipase/Acylhydrolase
  misc_feature (1)..(350): Homolog of NCBI NO: 15228157 NR Description: GDSL-motif lipase/hydrolase protein [Arabidopsis
  misc_feature (1)..(350): Homolog of NCBI NO: 21593518 NR Description: putative GDSL-motif lipase/hydrolase [Arabidopsis
  misc_feature (25)..(349): Homolog of NCBI NO: 18416824 NR Description: GDSL-motif lipase/hydrolase protein [Arabidopsis
  misc_feature (25)..(349): Homolog of NCBI NO: 7485330 NR Description: hypothetical protein F10M23.130 - Arabidopsis >gi|4455202|emb|CAB36525.1| putative APG protein [Arabidopsis >gi|7269531|emb|CAB79534.1| putative APG protein [Arabidopsis
  misc_feature (48)..(339): Homolog of NCBI NO: 15224201 NR Description: GDSL-motif lipase/hydrolase protein [Arabidopsis
  misc_feature (7)..(350): Homolog of NCBI NO: 15222901 NR Description: family II extracellular lipase 3 (EXL3) thaliana] >gi|15054386|gb|AAK30018.1| family II lipase EXL3
  misc_feature (7)..(350): Homolog of NCBI NO: 26449364 NR Description: putative family II lipase EXL3 [Arabidopsis
  misc_feature (7)..(342): Homolog of NCBI NO: 10638955 NR Description: putative proline-rich protein APG isolog [Cicer
  misc_feature (7)..(350): Homolog of NCBI NO: 25404994 NR Description: protein T4O12.13 [imported] - Arabidopsis >gi|8778808|gb|AAF79815.1|AC007396_8 T4O12.13 [Arabidopsis
  misc_feature (1)..(346): Homolog of NCBI NO: 15228189 NR Description: GDSL-motif lipase/hydrolase protein [Arabidopsis
MGHLKSLFTILFLIAMSSTVTFAGKIPAIIVFGDSSVDAGNNNYIPTVARSNFEPYGRDFVGGKPTGRFCNGKIATDFMSEALGLKPIIPAYLDPSYNISDFATGVTFASAATGYDNATSDVLSVLPLWKQLEYYKEYQTKLKAYQGKDRGTETIESSLYLISIGTNDFLENYFAFPGRSSQYSVSLYQDFLAGIAKEFVKKLHGLGARKISLGGLPPMGCMPLERATNIGTGGECVGRYNDIAVQFNSKLDKMVEKLSKELPGSNLVFSNPYEPFMRIIKNPSSFGFEVVGAACCATGMFEMGYGCQRNNPFTCTNADKYVFWDSFHPTQKTNHIMANALMNSTFPHFL

SEQ ID NO: 105267 - protein, 335 aa, Arabidopsis thaliana
  peptide (1)..(335): Ceres Seq. ID no. 13616828
  misc_feature (14)..(326): Pfam Name: GDSL-like Lipase/Acylhydrolase Pfam Description: GDSL-like Lipase/Acylhydrolase
  misc_feature (1)..(335): Homolog of NCBI NO: 15228157 NR Description: GDSL-motif lipase/hydrolase protein [Arabidopsis
  misc_feature (1)..(335): Homolog of NCBI NO: 21593518 NR Description: putative GDSL-motif lipase/hydrolase [Arabidopsis
  misc_feature (10)..(334): Homolog of NCBI NO: 18416824 NR Description: GDSL-motif lipase/hydrolase protein [Arabidopsis
  misc_feature (10)..(334): Homolog of NCBI NO: 7485330 NR Description: hypothetical protein F10M23.130 - Arabidopsis >gi|4455202|emb|CAB36525.1| putative APG protein [Arabidopsis >gi|7269531|emb|CAB79534.1| putative APG protein [Arabidopsis
  misc_feature (33)..(324): Homolog of NCBI NO: 15224201 NR Description: GDSL-motif lipase/hydrolase protein [Arabidopsis
  misc_feature (1)..(335): Homolog of NCBI NO: 15222901 NR Description: family II extracellular lipase 3 (EXL3) thaliana] >gi|15054386|gb|AAK30018.1| family II lipase EXL3
  misc_feature (1)..(335): Homolog of NCBI NO: 26449364 NR Description: putative family II lipase EXL3 [Arabidopsis
  misc_feature (1)..(327): Homolog of NCBI NO: 10638955 NR Description: putative proline-rich protein APG isolog [Cicer
  misc_feature (1)..(335): Homolog of NCBI NO: 25404994 NR Description: protein T4O12.13 [imported] - Arabidopsis >gi|8778808|gb|AAF79815.1|AC007396_8 T4O12.13 [Arabidopsis
  misc_feature (1)..(331): Homolog of NCBI NO: 15228189 NR Description: GDSL-motif lipase/hydrolase protein [Arabidopsis
MSSTVTFAGKIPAIIVFGDSSVDAGNNNYIPTVARSNFEPYGRDFVGGKPTGRFCNGKIATDFMSEALGLKPIIPAYLDPSYNISDFATGVTFASAATGYDNATSDVLSVLPLWKQLEYYKEYQTKLKAYQGKDRGTETIESSLYLISIGTNDFLENYFAFPGRSSQYSVSLYQDFLAGIAKEFVKKLHGLGARKISLGGLPPMGCMPLERATNIGTGGECVGRYNDIAVQFNSKLDKMVEKLSKELPGSNLVFSNPYEPFMRIIKNPSSFGFEVVGAACCATGMFEMGYGCQRNNPFTCTNADKYVFWDSFHPTQKTNHIMANALMNSTFPHFL

SEQ ID NO: 105268 - DNA, 1040 bp, Arabidopsis thaliana
  misc_feature (1)..(1040): Ceres Seq. ID no. 13616832
  misc_feature: MA Experiment ID: 108434 Result: Down-regulated in Transcription
  misc_feature: MA Experiment 108434 PARAMETER Experiment Name: At_Root_Tips_cDNA_P Parameter: Tissue Value: Root Tips
  misc_feature: MA Experiment ID: 108461 Result: Down-regulated in Transcription
  misc_feature: MA Experiment 108461 PARAMETER Experiment Name: At_Germinating_Seeds_cDNA_P Parameter: Age (day) Value: 1 vs. 0
  misc_feature: MA Experiment 108461 PARAMETER Experiment Name: At_Germinating_Seeds_cDNA_P Parameter: Tissue Value: Germinating Seeds
  misc_feature: MA Experiment ID: 108462 Result: Up-regulated in Transcription
  misc_feature: MA Experiment 108462 PARAMETER Experiment Name: At_Germinating_Seeds_cDNA_P Parameter: Age (day) Value: 2 vs. 0
  misc_feature: MA Experiment 108462 PARAMETER Experiment Name: At_Germinating_Seeds_cDNA_P Parameter: Tissue Value: Germinating Seeds
  misc_feature: MA Experiment ID: 108463 Result: Up-regulated in Transcription
  misc_feature: MA Experiment 108463 PARAMETER Experiment Name: At_Germinating_Seeds_cDNA_P Parameter: Age (day) Value: 3 vs. 0
  misc_feature: MA Experiment 108463 PARAMETER Experiment Name: At_Germinating_Seeds_cDNA_P Parameter: Tissue Value: Germinating Seeds
  misc_feature: MA Experiment ID: 108464 Result: Up-regulated in Transcription
  misc_feature: MA Experiment 108464 PARAMETER Experiment Name: At_Germinating_Seeds_cDNA_P Parameter: Age (day) Value: 4 vs. 0
  misc_feature: MA Experiment 108464 PARAMETER Experiment Name: At_Germinating_Seeds_cDNA_P Parameter: Tissue Value: Germinating Seeds
  misc_feature: MA Experiment ID: 108469 Result: Up-regulated in Transcription
  misc_feature: MA Experiment ID: 108473 Result: Up-regulated in Transcription
  misc_feature: MA Experiment 108473 PARAMETER Experiment Name: At_Drought_Flowers_cDNA_P Parameter: Timepoint (hr) Value: 7 d
  misc_feature: MA Experiment 108473 PARAMETER Experiment Name: At_Drought_Flowers_cDNA_P Parameter: Tissue Value: Flower
  misc_feature: MA Experiment 108473 PARAMETER Experiment Name: At_Drought_Flowers_cDNA_P Parameter: Treatment Value: Drought vs. No Drought
  misc_feature: MA Experiment ID: 108488 Result: Down-regulated in Transcription
  misc_feature: MA Experiment ID: 108585 Result: Up-regulated in Transcription
  misc_feature: MA Experiment 108585 PARAMETER Experiment Name: At_5mM_NaNP_cDNA_P Parameter: Timepoint (hr) Value: 6
  misc_feature: MA Experiment 108585 PARAMETER Experiment Name: At_5mM_NaNP_cDNA_P Parameter: Tissue Value: Aerial
  misc_feature: MA Experiment 108585 PARAMETER Experiment Name: At_5mM_NaNP_cDNA_P Parameter: Treatment Value: null
  misc_feature: MA Experiment ID: 108605 Result: Up-regulated in Transcription
  misc_feature: MA Experiment 108605 PARAMETER Experiment Name: At_100uM_ABA_cDNA_P Parameter: Timepoint (hr) Value: 6
  misc_feature: MA Experiment 108605 PARAMETER Experiment Name: At_100uM_ABA_cDNA_P Parameter: Tissue Value: Aerial
  misc_feature: MA Experiment 108605 PARAMETER Experiment Name: At_100uM_ABA_cDNA_P Parameter: Treatment Value: 100uM ABA vs. No Treatment
  misc_feature: MA Experiment ID: 108607 Result: Up-regulated in Transcription
  misc_feature: MA Experiment 108607 PARAMETER Experiment Name: At_100uM_ABA_cDNA_P Parameter: Timepoint (hr) Value: 4
  misc_feature: MA Experiment 108607 PARAMETER Experiment Name: At_100uM_ABA_cDNA_P Parameter: Tissue Value: Aerial
  misc_feature: MA Experiment 108607 PARAMETER Experiment Name: At_100uM_ABA_cDNA_P Parameter: Treatment Value: 100uM ABA vs. No Treatment
  misc_feature: MA Experiment ID: 108608 Result: Up-regulated in Transcription
  misc_feature: MA Experiment 108608 PARAMETER Experiment Name: At_100uM_ABA_cDNA_P Parameter: Timepoint (hr) Value: 1
  misc_feature: MA Experiment 108608 PARAMETER Experiment Name: At_100uM_ABA_cDNA_P Parameter: Tissue Value: Aerial
  misc_feature: MA Experiment 108608 PARAMETER Experiment Name: At_100uM_ABA_cDNA_P Parameter: Treatment Value: 100uM ABA vs. No Treatment
  misc_feature: MA Experiment ID: 108609 Result: Up-regulated in Transcription
  misc_feature: MA Experiment 108609 PARAMETER Experiment Name: At_100uM_ABA_cDNA_P Parameter: Timepoint (hr) Value: 24
  misc_feature: MA Experiment 108609 PARAMETER Experiment Name: At_100uM_ABA_cDNA_P Parameter: Tissue Value: Aerial
  misc_feature: MA Experiment 108609 PARAMETER Experiment Name: At_100uM_ABA_cDNA_P Parameter: Treatment Value: 100uM ABA vs. No Treatment
  misc_feature: MA Experiment ID: 108668 Result: Up-regulated in Transcription
  misc_feature: MA Experiment 108668 PARAMETER Experiment Name: At_2mM_SA_cDNA_P Parameter: Plant Line Value: WS
  misc_feature: MA Experiment 108668 PARAMETER Experiment Name: At_2mM_SA_cDNA_P Parameter: Timepoint (hr) Value: 6
  misc_feature: MA Experiment 108668 PARAMETER Experiment Name: At_2mM_SA_cDNA_P Parameter: Treatment Value: 2mM SA vs. No Treatment
  misc_feature: MA Experiment ID: 20000069 Result: Up-regulated in Transcription
  misc_feature: MA Experiment 20000069 PARAMETER Experiment Name: At_100uM_ABA_Mutants_cDNA_P Parameter: Plant Line Value: CS23
  misc_feature: MA Experiment 20000069 PARAMETER Experiment Name: At_100uM_ABA_Mutants_cDNA_P Parameter: Timepoint (hr) Value: 6
  misc_feature: MA Experiment 20000069 PARAMETER Experiment Name: At_100uM_ABA_Mutants_cDNA_P Parameter: Tissue Value: Aerial
  misc_feature: MA Experiment 20000069 PARAMETER Experiment Name: At_100uM_ABA_Mutants_cDNA_P Parameter: Treatment Value: 100uM ABA vs. No Treatment
  misc_feature: MA Experiment ID: 20000070 Result: Up-regulated in Transcription
  misc_feature: MA Experiment 20000070 PARAMETER Experiment Name: At_100uM_ABA_Mutants_cDNA_P Parameter: Plant Line Value: CS24
  misc_feature: MA Experiment 20000070 PARAMETER Experiment Name: At_100uM_ABA_Mutants_cDNA_P Parameter: Timepoint (hr) Value: 6
  misc_feature: MA Experiment 20000070 PARAMETER Experiment Name: At_100uM_ABA_Mutants_cDNA_P Parameter: Tissue Value: Aerial
  misc_feature: MA Experiment 20000070 PARAMETER Experiment Name: At_100uM_ABA_Mutants_cDNA_P Parameter: Treatment Value: 100uM ABA vs. No Treatment
  misc_feature: MA Experiment ID: 20000071 Result: Up-regulated in Transcription
  misc_feature: MA Experiment 20000071 PARAMETER Experiment Name: At_100uM_ABA_Mutants_cDNA_P Parameter: Plant Line Value: CS8104
  misc_feature: MA Experiment 20000071 PARAMETER Experiment Name: At_100uM_ABA_Mutants_cDNA_P Parameter: Timepoint (hr) Value: 6
  misc_feature: MA Experiment 20000071 PARAMETER Experiment Name: At_100uM_ABA_Mutants_cDNA_P Parameter: Tissue Value: Aerial
  misc_feature: MA Experiment 20000071 PARAMETER Experiment Name: At_100uM_ABA_Mutants_cDNA_P Parameter: Treatment Value: 100uM ABA vs. No Treatment
  misc_feature: MA Experiment ID: 20000072 Result: Up-regulated in Transcription
  misc_feature: MA Experiment 20000072 PARAMETER Experiment Name: At_100uM_ABA_Mutants_cDNA_P Parameter: Plant Line Value: CS8105
  misc_feature: MA Experiment 20000072 PARAMETER Experiment Name: At_100uM_ABA_Mutants_cDNA_P Parameter: Timepoint (hr) Value: 6
  misc_feature: MA Experiment 20000072 PARAMETER Experiment Name: At_100uM_ABA_Mutants_cDNA_P Parameter: Tissue Value: Aerial
  misc_feature: MA Experiment 20000072 PARAMETER Experiment Name: At_100uM_ABA_Mutants_cDNA_P Parameter: Treatment Value: 100uM ABA vs. No Treatment
  misc_feature: MA Experiment ID: 20000086 Result: Up-regulated in Transcription
  misc_feature: MA Experiment 20000086 PARAMETER Experiment Name: At_100uM_ABA_Mutants_cDNA_P Parameter: Plant Line Value: CS22
  misc_feature: MA Experiment 20000086 PARAMETER Experiment Name: At_100uM_ABA_Mutants_cDNA_P Parameter: Timepoint (hr) Value: 6
  misc_feature: MA Experiment 20000086 PARAMETER Experiment Name: At_100uM_ABA_Mutants_cDNA_P Parameter: Tissue Value: Aerial
  misc_feature: MA Experiment 20000086 PARAMETER Experiment Name: At_100uM_ABA_Mutants_cDNA_P Parameter: Treatment Value: 100uM ABA vs. No Treatment
  misc_feature: MA Experiment ID: 20000087 Result: Up-regulated in Transcription
  misc_feature: MA Experiment 20000087 PARAMETER Experiment Name: At_100uM_ABA_Mutants_cDNA_P Parameter: Plant Line Value: WS
  misc_feature: MA Experiment 20000087 PARAMETER Experiment Name: At_100uM_ABA_Mutants_cDNA_P Parameter: Timepoint (hr) Value: 6
  misc_feature: MA Experiment 20000087 PARAMETER Experiment Name: At_100uM_ABA_Mutants_cDNA_P Parameter: Tissue Value: Aerial
  misc_feature: MA Experiment 20000087 PARAMETER Experiment Name: At_100uM_ABA_Mutants_cDNA_P Parameter: Treatment Value: 100uM ABA vs. No Treatment
  misc_feature: MA Experiment ID: 20000088 Result: Up-regulated in Transcription
  misc_feature: MA Experiment 20000088 PARAMETER Experiment Name: At_100uM_ABA_Mutants_cDNA_P Parameter: Plant Line Value: Landsberg
  misc_feature: MA Experiment 20000088 PARAMETER Experiment Name: At_100uM_ABA_Mutants_cDNA_P Parameter: Timepoint (hr) Value: 6
  misc_feature: MA Experiment 20000088 PARAMETER Experiment Name: At_100uM_ABA_Mutants_cDNA_P Parameter: Tissue Value: Aerial
  misc_feature: MA Experiment 20000088 PARAMETER Experiment Name: At_100uM_ABA_Mutants_cDNA_P Parameter: Treatment Value: 100uM ABA vs. No Treatment
  misc_feature: MA Experiment ID: 20000089 Result: Up-regulated in Transcription
  misc_feature: MA Experiment ID: 20000117 Result: Up-regulated in Transcription
  misc_feature: MA Experiment 20000117 PARAMETER Experiment Name: At_100uM_ABA_Mutants_cDNA_P Parameter: Plant Line Value: Columbia
  misc_feature: MA Experiment 20000117 PARAMETER Experiment Name: At_100uM_ABA_Mutants_cDNA_P Parameter: Timepoint (hr) Value: 6
  misc_feature: MA Experiment 20000117 PARAMETER Experiment Name: At_100uM_ABA_Mutants_cDNA_P Parameter: Tissue Value: Aerial
  misc_feature: MA Experiment 20000117 PARAMETER Experiment Name: At_100uM_ABA_Mutants_cDNA_P Parameter: Treatment Value: 100uM ABA vs. No Treatment
  misc_feature: MA Experiment ID: 20000166 Result: Up-regulated in Transcription
  misc_feature: MA Experiment 20000166 PARAMETER Experiment Name: At_100uM_ABA_P Parameter: Age (day) Value: 14
  misc_feature: MA Experiment 20000166 PARAMETER Experiment Name: At_100uM_ABA_P Parameter: Organism Value: A. thaliana
  misc_feature: MA Experiment 20000166 PARAMETER Experiment Name: At_100uM_ABA_P Parameter: Plant Line Value: WS
  misc_feature: MA Experiment 20000166 PARAMETER Experiment Name: At_100uM_ABA_P Parameter: Timepoint (hr) Value: 1
  misc_feature: MA Experiment 20000166 PARAMETER Experiment Name: At_100uM_ABA_P Parameter: Tissue Value: Aerial
  misc_feature: MA Experiment 20000166 PARAMETER Experiment Name: At_100uM_ABA_P Parameter: Treatment Value: 100uM ABA vs. No Treatment
  misc_feature: MA Experiment ID: 20000169 Result: Up-regulated in Transcription
  misc_feature: MA Experiment 20000169 PARAMETER Experiment Name: At_100uM_ABA_P Parameter: Age (day) Value: 14
  misc_feature: MA Experiment 20000169 PARAMETER Experiment Name: At_100uM_ABA_P Parameter: Organism Value: A. thaliana
  misc_feature: MA Experiment 20000169 PARAMETER Experiment Name: At_100uM_ABA_P Parameter: Plant Line Value: WS
  misc_feature: MA Experiment 20000169 PARAMETER Experiment Name: At_100uM_ABA_P Parameter: Timepoint (hr) Value: 6
  misc_feature: MA Experiment 20000169 PARAMETER Experiment Name: At_100uM_ABA_P Parameter: Tissue Value: Aerial
  misc_feature: MA Experiment 20000169 PARAMETER Experiment Name: At_100uM_ABA_P Parameter: Treatment Value: 100uM ABA vs. No Treatment
  misc_feature: MA Experiment ID: 20000179 Result: Down-regulated in Transcription
  misc_feature: MA Experiment 20000179 PARAMETER Experiment Name: At_Germinating_Seeds_P Parameter: Age (hr) Value: 6 vs. 0
  misc_feature: MA Experiment 20000179 PARAMETER Experiment Name: At_Germinating_Seeds_P Parameter: Tissue Value: Germinating Seeds
  misc_feature: MA Experiment ID: 20000182 Result: Up-regulated in Transcription
  misc_feature: MA Experiment 20000182 PARAMETER Experiment Name: At_2mM_SA_P Parameter: Age (day) Value: 14
  misc_feature: MA Experiment 20000182 PARAMETER Experiment Name: At_2mM_SA_P Parameter: Organism Value: A. thaliana
  misc_feature: MA Experiment 20000182 PARAMETER Experiment Name: At_2mM_SA_P Parameter: Plant Line Value: WS
  misc_feature: MA Experiment 20000182 PARAMETER Experiment Name: At_2mM_SA_P Parameter: Timepoint (hr) Value: 6
  misc_feature: MA Experiment 20000182 PARAMETER Experiment Name: At_2mM_SA_P Parameter: Tissue Value: Aerial
  misc_feature: MA Experiment 20000182 PARAMETER Experiment Name: At_2mM_SA_P Parameter: Treatment Value: 2mM SA vs. No Treatment
  misc_feature: MA Experiment ID: 20000185 Result: Up-regulated in Transcription
  misc_feature: MA Experiment 20000185 PARAMETER Experiment Name: At_Roots__P Parameter: Age (day) Value: 7 vs. 21
  misc_feature: MA Experiment 20000185 PARAMETER Experiment Name: At_Roots__P Parameter: Organism Value: A. thaliana
  misc_feature: MA Experiment 20000185 PARAMETER Experiment Name: At_Roots__P Parameter: Tissue Value: Roots vs. Whole Plant
  misc_feature: MA Experiment ID: 20000234 Result: Down-regulated in Transcription
  misc_feature: MA Experiment 20000234 PARAMETER Experiment Name: At_Siliques_P Parameter: Age (day) Value: 21
  misc_feature: MA Experiment 20000234 PARAMETER Experiment Name: At_Siliques_P Parameter: Organism Value: A. thaliana
  misc_feature: MA Experiment 20000234 PARAMETER Experiment Name: At_Siliques_P Parameter: Plant Line Value: WS
  misc_feature: MA Experiment 20000234 PARAMETER Experiment Name: At_Siliques_P Parameter: Tissue Value: Less Than 5mm Siliques vs. Whole Plant
  misc_feature: MA Experiment ID: 20000267 Result: Up-regulated in Transcription
  misc_feature: MA Experiment 20000267 PARAMETER Experiment Name: At_Drought_P Parameter: Age (day) Value: 7
  misc_feature: MA Experiment 20000267 PARAMETER Experiment Name: At_Drought_P Parameter: Organism Value: A. thaliana
  misc_feature: MA Experiment 20000267 PARAMETER Experiment Name: At_Drought_P Parameter: Plant Line Value: WS
  misc_feature: MA Experiment 20000267 PARAMETER Experiment Name: At_Drought_P Parameter: Timepoint (hr) Value: 6
  misc_feature: MA Experiment 20000267 PARAMETER Experiment Name: At_Drought_P Parameter: Tissue Value: Whole Plant
  misc_feature: MA Experiment 20000267 PARAMETER Experiment Name: At_Drought_P Parameter: Treatment Value: Drought vs. No Drought
  misc_feature: MA Experiment ID: 20000268 Result: Up-regulated in Transcription
  misc_feature: MA Experiment 20000268 PARAMETER Experiment Name: At_100mM_NaCl__P Parameter: Age (day) Value: 14
  misc_feature: MA Experiment 20000268 PARAMETER Experiment Name: At_100mM_NaCl__P Parameter: Organism Value: A. thaliana
  misc_feature: MA Experiment 20000268 PARAMETER Experiment Name: At_100mM_NaCl__P Parameter: Plant Line Value: WS
  misc_feature: MA Experiment 20000268 PARAMETER Experiment Name: At_100mM_NaCl__P Parameter: Timepoint (hr) Value: 6
  misc_feature: MA Experiment 20000268 PARAMETER Experiment Name: At_100mM_NaCl__P Parameter: Tissue Value: Whole Plant
  misc_feature: MA Experiment 20000268 PARAMETER Experiment Name: At_100mM_NaCl__P Parameter: Treatment Value: 100mM NaCl vs. No Treatment
  misc_feature: MA Experiment ID: 20000286 Result: Down-regulated in Transcription
  misc_feature: MA Experiment 20000286 PARAMETER Experiment Name: At_Open_Flower_P Parameter: Age (day) Value: 21
  misc_feature: MA Experiment 20000286 PARAMETER Experiment Name: At_Open_Flower_P Parameter: Plant Line Value: WS
  misc_feature: MA Experiment 20000286 PARAMETER Experiment Name: At_Open_Flower_P Parameter: Tissue Value: Half Open vs. Whole Plant
  misc_feature: MA Experiment ID: 20000436 Result: Up-regulated in Transcription
  misc_feature: MA Experiment 20000436 PARAMETER Experiment Name: At_Drought_P Parameter: Age (day) Value: 7
  misc_feature: MA Experiment 20000436 PARAMETER Experiment Name: At_Drought_P Parameter: Organism Value: A. thaliana
  misc_feature: MA Experiment 20000436 PARAMETER Experiment Name: At_Drought_P Parameter: Plant Line Value: WS
  misc_feature: MA Experiment 20000436 PARAMETER Experiment Name: At_Drought_P Parameter: Timepoint (hr) Value: 12
  misc_feature: MA Experiment 20000436 PARAMETER Experiment Name: At_Drought_P Parameter: Tissue Value: Whole Plant
  misc_feature: MA Experiment 20000436 PARAMETER Experiment Name: At_Drought_P Parameter: Treatment Value: Drought vs. No Drought
  misc_feature: MA Experiment ID: 20000437 Result: Up-regulated in Transcription
  misc_feature: MA Experiment 20000437 PARAMETER Experiment Name: At_Drought_P Parameter: Age (day) Value: 8
  misc_feature: MA Experiment 20000437 PARAMETER Experiment Name: At_Drought_P Parameter: Organism Value: A. thaliana
  misc_feature: MA Experiment 20000437 PARAMETER Experiment Name: At_Drought_P Parameter: Plant Line Value: WS
  misc_feature: MA Experiment 20000437 PARAMETER Experiment Name: At_Drought_P Parameter: Timepoint (hr) Value: 24
  misc_feature: MA Experiment 20000437 PARAMETER Experiment Name: At_Drought_P Parameter: Tissue Value: Whole Plant
  misc_feature: MA Experiment 20000437 PARAMETER Experiment Name: At_Drought_P Parameter: Treatment Value: Drought vs. No Drought
  misc_feature: MA Experiment ID: 20000439 Result: Up-regulated in Transcription
  misc_feature: MA Experiment 20000439 PARAMETER Experiment Name: At_Roots__P Parameter: Age (day) Value: 14 vs. 21
  misc_feature: MA Experiment 20000439 PARAMETER Experiment Name: At_Roots__P Parameter: Organism Value: A. thaliana
  misc_feature: MA Experiment 20000439 PARAMETER Experiment Name: At_Roots__P Parameter: Tissue Value: Roots vs. Whole Plant
  misc_feature: MA Experiment ID: 20000453 Result: Up-regulated in Transcription
  misc_feature: MA Experiment 20000453 PARAMETER Experiment Name: At_100uM_ABA_P Parameter: Age (day) Value: 15
  misc_feature: MA Experiment 20000453 PARAMETER Experiment Name: At_100uM_ABA_P Parameter: Organism Value: A. thaliana
  misc_feature: MA Experiment 20000453 PARAMETER Experiment Name: At_100uM_ABA_P Parameter: Plant Line Value: WS
  misc_feature: MA Experiment 20000453 PARAMETER Experiment Name: At_100uM_ABA_P Parameter: Timepoint (hr) Value: 24
  misc_feature: MA Experiment 20000453 PARAMETER Experiment Name: At_100uM_ABA_P Parameter: Tissue Value: Aerial
  misc_feature: MA Experiment 20000453 PARAMETER Experiment Name: At_100uM_ABA_P Parameter: Treatment Value: 100uM ABA vs. No Treatment
  misc_feature: MA Experiment ID: 20000709 Result: Up-regulated in Transcription
  misc_feature: MA Experiment 20000709 PARAMETER Experiment Name: At_15mM_NH4NO3_L-to-H_P Parameter: Age (hr) Value: 14
  misc_feature: MA Experiment 20000709 PARAMETER Experiment Name: At_15mM_NH4NO3_L-to-H_P Parameter: Organism Value: A. thaliana
  misc_feature: MA Experiment 20000709 PARAMETER Experiment Name: At_15mM_NH4NO3_L-to-H_P Parameter: Plant Line Value: WS
  misc_feature: MA Experiment 20000709 PARAMETER Experiment Name: At_15mM_NH4NO3_L-to-H_P Parameter: Timepoint (hr) Value: 4
  misc_feature: MA Experiment 20000709 PARAMETER Experiment Name: At_15mM_NH4NO3_L-to-H_P Parameter: Tissue Value: Aerial
  misc_feature: MA Experiment 20000709 PARAMETER Experiment Name: At_15mM_NH4NO3_L-to-H_P Parameter: Treatment Value: 15mM NH4NO3 vs. 30mM Mannitol
  misc_feature: MA Experiment ID: 20001555 Result: Up-regulated in Transcription
  misc_feature: MA Experiment 20001555 PARAMETER Experiment Name: At_Drought_Soil_Dry_P Parameter: Age (day) Value: 24
  misc_feature: MA Experiment 20001555 PARAMETER Experiment Name: At_Drought_Soil_Dry_P Parameter: Organism Value: A. thaliana
  misc_feature: MA Experiment 20001555 PARAMETER Experiment Name: At_Drought_Soil_Dry_P Parameter: Plant Line Value: WS
  misc_feature: MA Experiment 20001555 PARAMETER Experiment Name: At_Drought_Soil_Dry_P Parameter: Post Timepoint (hr) Value: None
  misc_feature: MA Experiment 20001555 PARAMETER Experiment Name: At_Drought_Soil_Dry_P Parameter: Post-Treatment Value: None
  misc_feature: MA Experiment 20001555 PARAMETER Experiment Name: At_Drought_Soil_Dry_P Parameter: Timepoint (day) Value: 10
  misc_feature: MA Experiment 20001555 PARAMETER Experiment Name: At_Drought_Soil_Dry_P Parameter: Treatment Value: Drought vs. No Drought
  misc_feature: MA Experiment ID: 20001557 Result: Up-regulated in Transcription
  misc_feature: MA Experiment 20001557 PARAMETER Experiment Name: At_Drought_Soil_Dry_P Parameter: Age (day) Value: 27
  misc_feature: MA Experiment 20001557 PARAMETER Experiment Name: At_Drought_Soil_Dry_P Parameter: Organism Value: A. thaliana
  misc_feature: MA Experiment 20001557 PARAMETER Experiment Name: At_Drought_Soil_Dry_P Parameter: Plant Line Value: WS
  misc_feature: MA Experiment 20001557 PARAMETER Experiment Name: At_Drought_Soil_Dry_P Parameter: Post Timepoint (hr) Value: 3
  misc_feature: MA Experiment 20001557 PARAMETER Experiment Name: At_Drought_Soil_Dry_P Parameter: Post-Treatment Value: Re-Water vs. No Drought
  misc_feature: MA Experiment 20001557 PARAMETER Experiment Name: At_Drought_Soil_Dry_P Parameter: Timepoint (day) Value: 13
  misc_feature: MA Experiment 20001557 PARAMETER Experiment Name: At_Drought_Soil_Dry_P Parameter: Treatment Value: Drought vs. No Drought
  misc_feature: MA Experiment ID: 20001560 Result: Up-regulated in Transcription
  misc_feature: MA Experiment 20001560 PARAMETER Experiment Name: At_Drought_Soil_Dry_P Parameter: Age (day) Value: 28
  misc_feature: MA Experiment 20001560 PARAMETER Experiment Name: At_Drought_Soil_Dry_P Parameter: Organism Value: A. thaliana
  misc_feature: MA Experiment 20001560 PARAMETER Experiment Name: At_Drought_Soil_Dry_P Parameter: Plant Line Value: WS
  misc_feature: MA Experiment 20001560 PARAMETER Experiment Name: At_Drought_Soil_Dry_P Parameter: Post Timepoint (hr) Value: None
  misc_feature: MA Experiment 20001560 PARAMETER Experiment Name: At_Drought_Soil_Dry_P Parameter: Post-Treatment Value: None
  misc_feature: MA Experiment 20001560 PARAMETER Experiment Name: At_Drought_Soil_Dry_P Parameter: Timepoint (day) Value: 14
  misc_feature: MA Experiment 20001560 PARAMETER Experiment Name: At_Drought_Soil_Dry_P Parameter: Treatment Value: Drought vs. No Drought
  misc_feature: MA Experiment ID: 20001904 Result: Up-regulated in Transcription
  misc_feature: MA Experiment 20001904 PARAMETER Experiment Name: At_Drought_Reproduction_P Parameter: Age (day) Value: 37
  misc_feature: MA Experiment 20001904 PARAMETER Experiment Name: At_Drought_Reproduction_P Parameter: Organism Value: A. thaliana
  misc_feature: MA Experiment 20001904 PARAMETER Experiment Name: At_Drought_Reproduction_P Parameter: Plant Line Value: WS
  misc_feature: MA Experiment 20001904 PARAMETER Experiment Name: At_Drought_Reproduction_P Parameter: Timepoint (day) Value: 7
  misc_feature: MA Experiment 20001904 PARAMETER Experiment Name: At_Drought_Reproduction_P Parameter: Tissue Value: Rosettes
  misc_feature: MA Experiment 20001904 PARAMETER Experiment Name: At_Drought_Reproduction_P Parameter: Treatment Value: Drought vs. No Drought
  misc_feature: MA Experiment ID: 20001905 Result: Up-regulated in Transcription
  misc_feature: MA Experiment 20001905 PARAMETER Experiment Name: At_Drought_Reproduction_P Parameter: Age (day) Value: 40
  misc_feature: MA Experiment 20001905 PARAMETER Experiment Name: At_Drought_Reproduction_P Parameter: Organism Value: A. thaliana
  misc_feature: MA Experiment 20001905 PARAMETER Experiment Name: At_Drought_Reproduction_P Parameter: Plant Line Value: WS
  misc_feature: MA Experiment 20001905 PARAMETER Experiment Name: At_Drought_Reproduction_P Parameter: Timepoint (day) Value: 10
  misc_feature: MA Experiment 20001905 PARAMETER Experiment Name: At_Drought_Reproduction_P Parameter: Tissue Value: Rosettes
  misc_feature: MA Experiment 20001905 PARAMETER Experiment Name: At_Drought_Reproduction_P Parameter: Treatment Value: Drought vs. No Drought
  misc_feature: MA Experiment ID: 20001906 Result: Up-regulated in Transcription
  misc_feature: MA Experiment 20001906 PARAMETER Experiment Name: At_Drought_Reproduction_P Parameter: Age (day) Value: 35
  misc_feature: MA Experiment 20001906 PARAMETER Experiment Name: At_Drought_Reproduction_P Parameter: Organism Value: A. thaliana
  misc_feature: MA Experiment 20001906 PARAMETER Experiment Name: At_Drought_Reproduction_P Parameter: Plant Line Value: WS
  misc_feature: MA Experiment 20001906 PARAMETER Experiment Name: At_Drought_Reproduction_P Parameter: Timepoint (day) Value: 5
  misc_feature: MA Experiment 20001906 PARAMETER Experiment Name: At_Drought_Reproduction_P Parameter: Tissue Value: Siliques
  misc_feature: MA Experiment 20001906 PARAMETER Experiment Name: At_Drought_Reproduction_P Parameter: Treatment Value: Drought vs. No Drought
  misc_feature: MA Experiment ID: 20001908 Result: Up-regulated in Transcription
  misc_feature: MA Experiment 20001908 PARAMETER Experiment Name: At_Drought_Reproduction_P Parameter: Age (day) Value: 40
  misc_feature: MA Experiment 20001908 PARAMETER Experiment Name: At_Drought_Reproduction_P Parameter: Organism Value: A. thaliana
  misc_feature: MA Experiment 20001908 PARAMETER Experiment Name: At_Drought_Reproduction_P Parameter: Plant Line Value: WS
  misc_feature: MA Experiment 20001908 PARAMETER Experiment Name: At_Drought_Reproduction_P Parameter: Timepoint (day) Value: 10
  misc_feature: MA Experiment 20001908 PARAMETER Experiment Name: At_Drought_Reproduction_P Parameter: Tissue Value: Siliques
  misc_feature: MA Experiment 20001908 PARAMETER Experiment Name: At_Drought_Reproduction_P Parameter: Treatment Value: Drought vs. No Drought
  misc_feature: MA Experiment ID: 20001910 Result: Up-regulated in Transcription
  misc_feature: MA Experiment 20001910 PARAMETER Experiment Name: At_Drought_Reproduction_P Parameter: Age (day) Value: 37
  misc_feature: MA Experiment 20001910 PARAMETER Experiment Name: At_Drought_Reproduction_P Parameter: Organism Value: A. thaliana
  misc_feature: MA Experiment 20001910 PARAMETER Experiment Name: At_Drought_Reproduction_P Parameter: Plant Line Value: WS
  misc_feature: MA Experiment 20001910 PARAMETER Experiment Name: At_Drought_Reproduction_P Parameter: Timepoint (day) Value: 7
  misc_feature: MA Experiment 20001910 PARAMETER Experiment Name: At_Drought_Reproduction_P Parameter: Tissue Value: Flowers
  misc_feature: MA Experiment 20001910 PARAMETER Experiment Name: At_Drought_Reproduction_P Parameter: Treatment Value: Drought vs. No Drought
  misc_feature: MA Experiment ID: 20001911 Result: Up-regulated in Transcription
  misc_feature: MA Experiment 20001911 PARAMETER Experiment Name: At_Drought_Reproduction_P Parameter: Age (day) Value: 40
  misc_feature: MA Experiment 20001911 PARAMETER Experiment Name: At_Drought_Reproduction_P Parameter: Organism Value: A. thaliana
  misc_feature: MA Experiment 20001911 PARAMETER Experiment Name: At_Drought_Reproduction_P Parameter: Plant Line Value: WS
  misc_feature: MA Experiment 20001911 PARAMETER Experiment Name: At_Drought_Reproduction_P Parameter: Timepoint (day) Value: 10
  misc_feature: MA Experiment 20001911 PARAMETER Experiment Name: At_Drought_Reproduction_P Parameter: Tissue Value: Flowers
  misc_feature: MA Experiment 20001911 PARAMETER Experiment Name: At_Drought_Reproduction_P Parameter: Treatment Value: Drought vs. No Drought
aaacatatctttacagttctttcttgctaaacaacaataaaggggaaaataggttaattatgatgaaatctggggctgatttgcaatttccaccaggatttagatttcatcctacggatgaggagctagtcctcatgtatctctgtcgtaaatgcgcgtcgcagccgatccctgctccgattatcaccgaactcgatttgtaccgatatgatccttgggaccttcccgacatggctttgtacggtgaaaaggagtggtattttttctcaccaagagatcgaaagtatccaaacggttcaagacccaaccgtgcagctggtactggatattggaaagctaccggagctgataaaccaataggtcgtcctaaaccggttggtattaagaaggctctagtgttttactcgggaaaacctccaaatggagagaaaaccaattggattatgcacgaataccggctcgctgacgttgaccggtcggttcgtaagaaaaacagtctaagattggacgattgggtattgtgtcgtatatataacaagaaaggtgtcatcgagaagcgacgaagcgatatcgaggacgggttaaagcctgtgactgacacgtgtccaccggaatctgtggcgagattgatctccggctcggagcaagcggtgtcaccggaattcacgtgtagcaacggtcggttgagtaatgcccttgattttccgtttaattacgtagatgccatcgccgataacgagattgtgtcacggctattgggcgggaatcagatgtggtcgacgacgcttgatccacttgtggttaggcagggaactttctgagttgtcacgtgcgattagagttagtggaaagtggaaactatcactgtctgttttcgcacgtgtcgggtagccgtcttgaaacccgctagctgatccagaagtgacctcattgggcttttcaacaacaattgggccttagcctttcttctcccttagtaagacaagctactgtattgtgttgttattttcaggaagcaatataaattcattttaatcact

SEQ ID NO: 105269 - protein, 272 aa, Arabidopsis thaliana
  peptide (1)..(272): Ceres Seq. ID no. 13616833
  misc_feature (29)..(154): Pfam Name: No apical meristem (NAM) protein Pfam Description: No apical meristem (NAM) protein
  misc_feature (20)..(272): Homolog of NCBI NO: 15223963 NR Description: No apical meristem (NAM) protein family
  misc_feature (21)..(272): Homolog of NCBI NO: 21593134 NR Description: GRAB1-like protein [Arabidopsis thaliana]
  misc_feature (20)..(272): Homolog of NCBI NO: 31322580 NR Description: NAC-domain protein 14 [Brassica napus]
  misc_feature (25)..(187): Homolog of NCBI NO: 21105748 NR Description: nam-like protein 10 [Petunia x hybrida]
  misc_feature (21)..(185): Homolog of NCBI NO: 25458553 NR Description: OsNAC6 protein [imported] - rice OsNAC6 protein [Oryza sativa] >gi|13272281|gb|AAK17067.1| NAC6
  misc_feature (27)..(186): Homolog of NCBI NO: 15223456 NR Description: No apical meristem (NAM) protein family
  misc_feature (25)..(186): Homolog of NCBI NO: 31322578 NR Description: NAC-domain protein 18 [Brassica napus]
  misc_feature (25)..(186): Homolog of NCBI NO: 31322576 NR Description: NAC-domain protein 5-11 [Brassica napus]
  misc_feature (25)..(225): Homolog of NCBI NO: 31322570 NR Description: NAC-domain protein 5-1 [Brassica napus]
  misc_feature (8)..(225): Homolog of NCBI NO: 30697896 NR Description: No apical meristem (NAM) protein family thaliana] >gi|24030239|gb|AAN41296.1| unknown protein
TYLYSSFLLNNNKGENRLIMMKSGADLQFPPGFRFHPTDEELVLMYLCRKCASQPIPAPIITELDLYRYDPWDLPDMALYGEKEWYFFSPRDRKYPNGSRPNRAAGTGYWKATGADKPIGRPKPVGIKKALVFYSGKPPNGEKTNWIMHEYRLADVDRSVRKKNSLRLDDWVLCRIYNKKGVIEKRRSDIEDGLKPVTDTCPPESVARLISGSEQAVSPEFTCSNGRLSNALDFPFNYVDAIADNEIVSRLLGGNQMWSTTLDPLVVRQGTF

SEQ ID NO: 105270 - protein, 253 aa, Arabidopsis thaliana; identical to SEQ ID NO: 23480
  peptide (1)..(253): Ceres Seq. ID no. 13616834
  misc_feature (10)..(135): Pfam Name: No apical meristem (NAM) protein Pfam Description: No apical meristem (NAM) protein
  misc_feature (1)..(253): Homolog of NCBI NO: 15223963 NR Description: No apical meristem (NAM) protein family
  misc_feature (2)..(253): Homolog of NCBI NO: 21593134 NR Description: GRAB1-like protein [Arabidopsis thaliana]
  misc_feature (1)..(253): Homolog of NCBI NO: 31322580 NR Description: NAC-domain protein 14 [Brassica napus]
  misc_feature (6)..(168): Homolog of NCBI NO: 21105748 NR Description: nam-like protein 10 [Petunia x hybrida]
  misc_feature (2)..(166): Homolog of NCBI NO: 25458553 NR Description: OsNAC6 protein [imported] - rice OsNAC6 protein [Oryza sativa] >gi|13272281|gb|AAK17067.1| NAC6
  misc_feature (8)..(167): Homolog of NCBI NO: 15223456 NR Description: No apical meristem (NAM) protein family
  misc_feature (6)..(167): Homolog of NCBI NO: 31322578 NR Description: NAC-domain protein 18 [Brassica napus]
  misc_feature (6)..(167): Homolog of NCBI NO: 31322576 NR Description: NAC-domain protein 5-11 [Brassica napus]
  misc_feature (6)..(206): Homolog of NCBI NO: 31322570 NR Description: NAC-domain protein 5-1 [Brassica napus]
  misc_feature (1)..(206): Homolog of NCBI NO: 30697896 NR Description: No apical meristem (NAM) protein family thaliana] >gi|24030239|gb|AAN41296.1| unknown protein

SEQ ID NO: 105271 - protein, 252 aa, Arabidopsis thaliana; identical to SEQ ID NO: 23481
  peptide (1)..(252): Ceres Seq. ID no. 13616835
  misc_feature (9)..(134): Pfam Name: No apical meristem (NAM) protein Pfam Description: No apical meristem (NAM) protein
  misc_feature (1)..(252): Homolog of NCBI NO: 15223963 NR Description: No apical meristem (NAM) protein family
  misc_feature (1)..(252): Homolog of NCBI NO: 21593134 NR Description: GRAB1-like protein [Arabidopsis thaliana]
  misc_feature (1)..(252): Homolog of NCBI NO: 31322580 NR Description: NAC-domain protein 14 [Brassica napus]
  misc_feature (5)..(167): Homolog of NCBI NO: 21105748 NR Description: nam-like protein 10 [Petunia x hybrida]
  misc_feature (1)..(165): Homolog of NCBI NO: 25458553 NR Description: OsNAC6 protein [imported] - rice OsNAC6 protein [Oryza sativa] >gi|13272281|gb|AAK17067.1| NAC6
  misc_feature (7)..(166): Homolog of NCBI NO: 15223456 NR Description: No apical meristem (NAM) protein family
  misc_feature (5)..(166): Homolog of NCBI NO: 31322578 NR Description: NAC-domain protein 18 [Brassica napus]
  misc_feature (5)..(166): Homolog of NCBI NO: 31322576 NR Description: NAC-domain protein 5-11 [Brassica napus]
  misc_feature (5)..(205): Homolog of NCBI NO: 31322570 NR Description: NAC-domain protein 5-1 [Brassica napus]
  misc_feature (1)..(205): Homolog of NCBI NO: 30697896 NR Description: No apical meristem (NAM) protein family thaliana] >gi|24030239|gb|AAN41296.1| unknown protein

SEQ ID NO: 105272 - DNA, 1527 bp, Arabidopsis thaliana
  misc_feature (1)..(1527): Ceres Seq. ID no. 13616844
  misc_feature: MA Experiment ID: 108434 Result: Up-regulated in Transcription
  misc_feature: MA Experiment 108434 PARAMETER Experiment Name: At_Root_Tips_cDNA_P Parameter: Tissue Value: Root Tips
  misc_feature: MA Experiment ID: 108461 Result: Down-regulated in Transcription
  misc_feature: MA Experiment 108461 PARAMETER Experiment Name: At_Germinating_Seeds_cDNA_P Parameter: Age (day) Value: 1 vs. 0
  misc_feature: MA Experiment 108461 PARAMETER Experiment Name: At_Germinating_Seeds_cDNA_P Parameter: Tissue Value: Germinating Seeds
  misc_feature: MA Experiment ID: 108462 Result: Down-regulated in Transcription
  misc_feature: MA Experiment 108462 PARAMETER Experiment Name: At_Germinating_Seeds_cDNA_P Parameter: Age (day) Value: 2 vs. 0
  misc_feature: MA Experiment 108462 PARAMETER Experiment Name: At_Germinating_Seeds_cDNA_P Parameter: Tissue Value: Germinating Seeds
  misc_feature: MA Experiment ID: 108463 Result: Down-regulated in Transcription
  misc_feature: MA Experiment 108463 PARAMETER Experiment Name: At_Germinating_Seeds_cDNA_P Parameter: Age (day) Value: 3 vs. 0
  misc_feature: MA Experiment 108463 PARAMETER Experiment Name: At_Germinating_Seeds_cDNA_P Parameter: Tissue Value: Germinating Seeds
  misc_feature: MA Experiment ID: 108569 Result: Up-regulated in Transcription
  misc_feature: MA Experiment 108569 PARAMETER Experiment Name: At_0.001%_MeJA__cDNA_P Parameter: Timepoint (hr) Value: 6
  misc_feature: MA Experiment 108569 PARAMETER Experiment Name: At_0.001%_MeJA__cDNA_P Parameter: Tissue Value: Aerial
  misc_feature: MA Experiment 108569 PARAMETER Experiment Name: At_0.001%_MeJA__cDNA_P Parameter: Treatment Value: 0.001% MeJA vs. No Treatment
  misc_feature: MA Experiment ID: 108576 Result: Down-regulated in Transcription
  misc_feature: MA Experiment 108576 PARAMETER Experiment Name: At_42deg_Heat_cDNA_P Parameter: Temperature (deg C) Value: 42 vs. 22
  misc_feature: MA Experiment 108576 PARAMETER Experiment Name: At_42deg_Heat_cDNA_P Parameter: Timepoint (hr) Value: 1
  misc_feature: MA Experiment 108576 PARAMETER Experiment Name: At_42deg_Heat_cDNA_P Parameter: Tissue Value: Aerial
  misc_feature: MA Experiment ID: 108577 Result: Down-regulated in Transcription
  misc_feature: MA Experiment 108577 PARAMETER Experiment Name: At_42deg_Heat_cDNA_P Parameter: Temperature (deg C) Value: 42 vs. 22
  misc_feature: MA Experiment 108577 PARAMETER Experiment Name: At_42deg_Heat_cDNA_P Parameter: Timepoint (hr) Value: 6
  misc_feature: MA Experiment 108577 PARAMETER Experiment Name: At_42deg_Heat_cDNA_P Parameter: Tissue Value: Aerial
  misc_feature: MA Experiment ID: 108585 Result: Up-regulated in Transcription
  misc_feature: MA Experiment 108585 PARAMETER Experiment Name: At_5mM_NaNP_cDNA_P Parameter: Timepoint (hr) Value: 6
  misc_feature: MA Experiment 108585 PARAMETER Experiment Name: At_5mM_NaNP_cDNA_P Parameter: Tissue Value: Aerial
  misc_feature: MA Experiment 108585 PARAMETER Experiment Name: At_5mM_NaNP_cDNA_P Parameter: Treatment Value: null
  misc_feature: MA Experiment ID: 108594 Result: Down-regulated in Transcription
  misc_feature: MA Experiment 108594 PARAMETER Experiment Name: At_Ler-rhl_Root_cDNA_P Parameter: Plant Line Value: null
  misc_feature: MA Experiment ID: 20000087 Result: Down-regulated in Transcription
  misc_feature: MA Experiment 20000087 PARAMETER Experiment Name: At_100uM_ABA_Mutants_cDNA_P Parameter: Plant Line Value: WS
  misc_feature: MA Experiment 20000087 PARAMETER Experiment Name: At_100uM_ABA_Mutants_cDNA_P Parameter: Timepoint (hr) Value: 6
  misc_feature: MA Experiment 20000087 PARAMETER Experiment Name: At_100uM_ABA_Mutants_cDNA_P Parameter: Tissue Value: Aerial
  misc_feature: MA Experiment 20000087 PARAMETER Experiment Name: At_100uM_ABA_Mutants_cDNA_P Parameter: Treatment Value: 100uM ABA vs. No Treatment
  misc_feature: MA Experiment ID: 20000111 Result: Down-regulated in Transcription
  misc_feature: MA Experiment 20000111 PARAMETER Experiment Name: At_42deg_Heat_cDNA_P Parameter: Temperature (deg C) Value: 42 vs. 22
  misc_feature: MA Experiment 20000111 PARAMETER Experiment Name: At_42deg_Heat_cDNA_P Parameter: Timepoint (hr) Value: 6
  misc_feature: MA Experiment 20000111 PARAMETER Experiment Name: At_42deg_Heat_cDNA_P Parameter: Tissue Value: Aerial
  misc_feature: MA Experiment ID: 20000112 Result: Down-regulated in Transcription
  misc_feature: MA Experiment 20000112 PARAMETER Experiment Name: At_42deg_Heat_cDNA_P Parameter: Temperature (deg C) Value: 42 vs. 22
  misc_feature: MA Experiment 20000112 PARAMETER Experiment Name: At_42deg_Heat_cDNA_P Parameter: Timepoint (hr) Value: 2
  misc_feature: MA Experiment 20000112 PARAMETER Experiment Name: At_42deg_Heat_cDNA_P Parameter: Tissue Value: Aerial
  misc_feature: MA Experiment ID: 20000144 Result: Down-regulated in Transcription
  misc_feature: MA Experiment 20000144 PARAMETER Experiment Name: At_42deg_Heat_cDNA_P Parameter: Temperature (deg C) Value: 42 vs. 22
  misc_feature: MA Experiment 20000144 PARAMETER Experiment Name: At_42deg_Heat_cDNA_P Parameter: Timepoint (hr) Value: 1
  misc_feature: MA Experiment 20000144 PARAMETER Experiment Name: At_42deg_Heat_cDNA_P Parameter: Tissue Value: Aerial
  misc_feature: MA Experiment ID: 20000171 Result: Down-regulated in Transcription
  misc_feature: MA Experiment 20000171 PARAMETER Experiment Name: At_42deg_Heat_P Parameter: Age (day) Value: 14
  misc_feature: MA Experiment 20000171 PARAMETER Experiment Name: At_42deg_Heat_P Parameter: Organism Value: A. thaliana
  misc_feature: MA Experiment 20000171 PARAMETER Experiment Name: At_42deg_Heat_P Parameter: Plant Line Value: WS
  misc_feature: MA Experiment 20000171 PARAMETER Experiment Name: At_42deg_Heat_P Parameter: Temperature (deg C) Value: 42 vs. 22
  misc_feature: MA Experiment 20000171 PARAMETER Experiment Name: At_42deg_Heat_P Parameter: Timepoint (hr) Value: 1
  misc_feature: MA Experiment 20000171 PARAMETER Experiment Name: At_42deg_Heat_P Parameter: Tissue Value: Aerial
  misc_feature: MA Experiment ID: 20000173 Result: Down-regulated in Transcription
  misc_feature: MA Experiment 20000173 PARAMETER Experiment Name: At_42deg_Heat_P Parameter: Age (day) Value: 14
  misc_feature: MA Experiment 20000173 PARAMETER Experiment Name: At_42deg_Heat_P Parameter: Organism Value: A. thaliana
  misc_feature: MA Experiment 20000173 PARAMETER Experiment Name: At_42deg_Heat_P Parameter: Plant Line Value: WS
  misc_feature: MA Experiment 20000173 PARAMETER Experiment Name: At_42deg_Heat_P Parameter: Temperature (deg C) Value: 42 vs. 22
  misc_feature: MA Experiment 20000173 PARAMETER Experiment Name: At_42deg_Heat_P Parameter: Timepoint (hr) Value: 6
  misc_feature: MA Experiment 20000173 PARAMETER Experiment Name: At_42deg_Heat_P Parameter: Tissue Value: Aerial
  misc_feature: MA Experiment ID: 20000180 Result: Down-regulated in Transcription
  misc_feature: MA Experiment 20000180 PARAMETER Experiment Name: At_Germinating_Seeds_P Parameter: Age (hr) Value: 24 vs. 0
  misc_feature: MA Experiment 20000180 PARAMETER Experiment Name: At_Germinating_Seeds_P Parameter: Tissue Value: Germinating Seeds
  misc_feature: MA Experiment ID: 20000234 Result: Up-regulated in Transcription
  misc_feature: MA Experiment 20000234 PARAMETER Experiment Name: At_Siliques_P Parameter: Age (day) Value: 21
  misc_feature: MA Experiment 20000234 PARAMETER Experiment Name: At_Siliques_P Parameter: Organism Value: A. thaliana
  misc_feature: MA Experiment 20000234 PARAMETER Experiment Name: At_Siliques_P Parameter: Plant Line Value: WS
  misc_feature: MA Experiment 20000234 PARAMETER Experiment Name: At_Siliques_P Parameter: Tissue Value: Less Than 5mm Siliques vs. Whole Plant
  misc_feature: MA Experiment ID: 20000264 Result: Up-regulated in Transcription
  misc_feature: MA Experiment 20000264 PARAMETER Experiment Name: At_Open_Flower_P Parameter: Age (day) Value: 21
  misc_feature: MA Experiment 20000264 PARAMETER Experiment Name: At_Open_Flower_P Parameter: Plant Line Value: WS
  misc_feature: MA Experiment 20000264 PARAMETER Experiment Name: At_Open_Flower_P Parameter: Tissue Value: Open Flower vs. Whole Plant
  misc_feature: MA Experiment ID: 20000495 Result: Up-regulated in Transcription
  misc_feature: MA Experiment 20000495 PARAMETER Experiment Name: At_Guard_Cells_P Parameter: Harvest Date Value: 8/2/2002
  misc_feature: MA Experiment 20000495 PARAMETER Experiment Name: At_Guard_Cells_P Parameter: Organism Value: A. thaliana
  misc_feature: MA Experiment 20000495 PARAMETER Experiment Name: At_Guard_Cells_P Parameter: Tissue Value: Guard Cells vs. Leaves
aattttcatggcataaagagtgagagagagagagtcatagacaggagacgtttgagattgatgaacagcgaattcgaaacaaatcacatggaagaagagctctctttcgctaccgttaccttctccacttttctccttcattagggttttctctcttatttagctgcgcagctctctctctttcttacggattcacttcttaaaactcgttaatttcttgtgggtttttgtctcttttgcgatctgattccgaaagttgagtgagagtgagagaatcatggaggaaggaagtatgttcagatctctattagcgattcttcagtggtggggtttcaatgttaccgtcatcatcatgaacaaatggatctttcagaaactggattttaagtttccactatcggtttcatgtgttcacttcatatgttcgtcgattggagcttacatcgttatcaaagttctcaagcttaaaccattgattgttgtcgatcctgaagatcgatggaggaggatttttccaatgtctttcgtgttttgtatcaacattgtcttgggaaatgtcagtcttcgttacattccggtttcgtttatgcagacgattaagtctttcactccagctactacagttgtgttacagtggctggtatggaggaaatactttgactggcgtatttgggcgtctctcgtgcctattgttggtggaattcttctgacatctgtgactgaacttagttttaacatgtttggattctgtgctgccctgtttggatgtttagctacttccacaaagaccattctagccgaatctcttcttcatggttacaaatttgacagcataaacaccgtttactatatggcgccttttgccaccatgattctcgggataccagcgttattactggaaggcagtggaattttgagctggtttgaagcacaccctgctccctggtcagccctcatcattatactcagttctggtgttctagccttctgtctcaacttctccatcttctatgtcattcactccacaactgcagtcacattcaacgtggctggaaaccttaaggttgcagtggctgtaatggtctcatggttgatattccgtaacccaatatcatatatgaatgctgttggatgcggaattacgcttgtgggctgcacgttttatggatatgtgaggcatatgctttcacagcaaacaccgggaactcctaggactcctcgtaccccaagaagcaagatggaattacttccacttgttaataatgataaactcgaaggcaaagtctgatcttcttcattccgcagctcagtttagtactcactggttcagggtgctgcagaagagaagcattgacacaaggggtgttgaatttttactaaatatgcattttactcaaaaaccttagtagagaaaagttacatttttttttttcgttttgatttgagctcgtagaagagataatggttcctactactatttatatttctgtgaagtgtagaatcttttaatttatcaaatacattttc

SEQ ID NO: 105273 - protein, 336 aa, Arabidopsis thaliana; identical to SEQ ID NO: 29083
  peptide (1)..(336): Ceres Seq. ID no. 13616845
  misc_feature (23)..(147): Pfam Name: Integral membrane protein DUF6 Pfam Description: Integral membrane protein DUF6
  misc_feature (1)..(336): Homolog of NCBI NO: 18411611 NR Description: glucose-6-phosphate/phosphate [Arabidopsis thaliana] >gi|25354487|pir||F96805 unknown protein
  misc_feature (1)..(336): Homolog of NCBI NO: 15219121 NR Description: glucose-6-phosphate/phosphate [Arabidopsis thaliana] >gi|6552731|gb|AAF16530.1|AC013482_4 [Arabidopsis thaliana] >gi|29329825|emb|CAD83089.1| GONST5 Golgi
  misc_feature (8)..(333): Homolog of NCBI NO: 38567832 NR Description: OSJNBb0020J19.10 [Oryza sativa (japonica
  misc_feature (1)..(296): Homolog of NCBI NO: 9759107 NR Description: phosphate/phosphoenolpyruvate translocator
  misc_feature (1)..(296): Homolog of NCBI NO: 30681126 NR Description: phosphate translocator-related [Arabidopsis
  misc_feature (5)..(297): Homolog of NCBI NO: 15237644 NR Description: phosphate translocator-related [Arabidopsis
  misc_feature (5)..(297): Homolog of NCBI NO: 17064798 NR Description: phosphate/phosphoenolpyruvate translocator-like [Arabidopsis thaliana] >gi|20259810|gb|AAM13252.1|
  misc_feature (13)..(296): Homolog of NCBI NO: 27476065 NR Description: Putative phosphate/phosphoenolpyruvate
  misc_feature (1)..(297): Homolog of NCBI NO: 15228248 NR Description: phosphate translocator-related [Arabidopsis >gi|6056196|gb|AAF02813.1|AC009400_9 unknown protein [Arabidopsis
  misc_feature (13)..(300): Homolog of NCBI NO: 15221371 NR Description: phosphate translocator-related [Arabidopsis >gi|8778643|gb|AAF79651.1|AC025416_25 F5O11.25 [Arabidopsis >gi|9502394|gb|AAF88101.1|AC025417_29 T12C24.5 [Arabidopsis

SEQ ID NO: 105274 - protein, 331 aa, Arabidopsis thaliana; identical to SEQ ID NO: 29084
  peptide (1)..(331): Ceres Seq. ID no. 13616846
  misc_feature (18)..(142): Pfam Name: Integral membrane protein DUF6 Pfam Description: Integral membrane protein DUF6
  misc_feature (1)..(331): Homolog of NCBI NO: 18411611 NR Description: glucose-6-phosphate/phosphate [Arabidopsis thaliana] >gi|25354487|pir||F96805 unknown protein
  misc_feature (1)..(331): Homolog of NCBI NO: 15219121 NR Description: glucose-6-phosphate/phosphate [Arabidopsis thaliana] >gi|6552731|gb|AAF16530.1|AC013482_4 [Arabidopsis thaliana] >gi|29329825|emb|CAD83089.1| GONST5 Golgi
  misc_feature (3)..(328): Homolog of NCBI NO: 38567832 NR Description: OSJNBb0020J19.10 [Oryza sativa (japonica
  misc_feature (1)..(291): Homolog of NCBI NO: 9759107 NR Description: phosphate/phosphoenolpyruvate translocator
  misc_feature (1)..(291): Homolog of NCBI NO: 30681126 NR Description: phosphate translocator-related [Arabidopsis
  misc_feature (1)..(292): Homolog of NCBI NO: 15237644 NR Description: phosphate translocator-related [Arabidopsis
  misc_feature (1)..(292): Homolog of NCBI NO: 17064798 NR Description: phosphate/phosphoenolpyruvate translocator-like [Arabidopsis thaliana] >gi|20259810|gb|AAM13252.1|
  misc_feature (8)..(291): Homolog of NCBI NO: 27476065 NR Description: Putative phosphate/phosphoenolpyruvate
  misc_feature (1)..(292): Homolog of NCBI NO: 15228248 NR Description: phosphate translocator-related [Arabidopsis >gi|6056196|gb|AAF02813.1|AC009400_9 unknown protein [Arabidopsis
  misc_feature (8)..(295): Homolog of NCBI NO: 15221371 NR Description: phosphate translocator-related [Arabidopsis >gi|8778643|gb|AAF79651.1|AC025416_25 F5O11.25 [Arabidopsis >gi|9502394|gb|AAF88101.1|AC025417_29 T12C24.5 [Arabidopsis

SEQ ID NO: 105275 - protein, 311 aa, Arabidopsis thaliana; identical to SEQ ID NO: 29085
  peptide (1)..(311): Ceres Seq. ID no. 13616847
  misc_feature (1)..(122): Pfam Name: Integral membrane protein DUF6 Pfam Description: Integral membrane protein DUF6
  misc_feature (1)..(311): Homolog of NCBI NO: 18411611 NR Description: glucose-6-phosphate/phosphate [Arabidopsis thaliana] >gi|25354487|pir||F96805 unknown protein
  misc_feature (1)..(311): Homolog of NCBI NO: 15219121 NR Description: glucose-6-phosphate/phosphate [Arabidopsis thaliana] >gi|6552731|gb|AAF16530.1|AC013482_4 [Arabidopsis thaliana] >gi|29329825|emb|CAD83089.1| GONST5 Golgi
  misc_feature (1)..(308): Homolog of NCBI NO: 38567832 NR Description: OSJNBb0020J19.10 [Oryza sativa (japonica
  misc_feature (1)..(271): Homolog of NCBI NO: 9759107 NR Description: phosphate/phosphoenolpyruvate translocator
  misc_feature (1)..(271): Homolog of NCBI NO: 30681126 NR Description: phosphate translocator-related [Arabidopsis
  misc_feature (1)..(272): Homolog of NCBI NO: 15237644 NR Description: phosphate translocator-related [Arabidopsis
  misc_feature (1)..(272): Homolog of NCBI NO: 17064798 NR Description: phosphate/phosphoenolpyruvate translocator-like [Arabidopsis thaliana] >gi|20259810|gb|AAM13252.1|
  misc_feature (1)..(271): Homolog of NCBI NO: 27476065 NR Description: Putative phosphate/phosphoenolpyruvate
  misc_feature (1)..(272): Homolog of NCBI NO: 15228248 NR Description: phosphate translocator-related [Arabidopsis >gi|6056196|gb|AAF02813.1|AC009400_9 unknown protein [Arabidopsis
  misc_feature (1)..(275): Homolog of NCBI NO: 15221371 NR Description: phosphate translocator-related [Arabidopsis >gi|8778643|gb|AAF79651.1|AC025416_25 F5O11.25 [Arabidopsis >gi|9502394|gb|AAF88101.1|AC025417_29 T12C24.5 [Arabidopsis

SEQ ID NO: 105276 - DNA, 1168 bp, Arabidopsis thaliana
  misc_feature (1)..(1168): Ceres Seq. ID no. 13616858
  misc_feature: MA Experiment ID: 108595 Result: Down-regulated in Transcription
  misc_feature: MA Experiment 108595 PARAMETER Experiment Name: At_Ler-pi_Ovule_cDNA_P Parameter: Plant Line Value: null
  misc_feature: MA Experiment ID: 20000185 Result: Up-regulated in Transcription
  misc_feature: MA Experiment 20000185 PARAMETER Experiment Name: At_Roots__P Parameter: Age (day) Value: 7 vs. 21
  misc_feature: MA Experiment 20000185 PARAMETER Experiment Name: At_Roots__P Parameter: Organism Value: A. thaliana
  misc_feature: MA Experiment 20000185 PARAMETER Experiment Name: At_Roots__P Parameter: Tissue Value: Roots vs. Whole Plant
atcttgtttcttactcatttctctaacaattttccaaattaaatacgtttataggatcatcgtggatggataatataatgcaatcgtcaatgccaccgggattccgatttcatccgacagaggaagagcttgtgggttattacctagataggaagatcaattcaatgaagagtgctttagatgtcattgtagagattgatctctacaaaatggagccatgggatatacaagcgaggtgtaaactagggtatgaagagcaaaacgagtggtacttctttagtcataaggacaggaagtaccctaccgggactaggaccaaccgagccactgcggctgggttctggaaagccacgggtagagacaaggcggtactatcaaaaaacagtgtcatcggaatgcggaagacacttgtctactacaagggtcgagctcctaatggaagaaagtccgattggatcatgcacgaataccgtctccaaaactccgagcttgccccggttcaggaggaaggctgggtggtgtgtcgagcatttaggaagccaattccaaaccagaggccattagggtacgagccatggcagaaccagctctaccacgtcgaaagtagtaacaactactcatcttcagtgacaatgaacacgagtcatcatatcggtgcatcttcatcaagtcataaccttaatcaaatgctcatgagcaataaccactacaatcctaataatacatcctcatcgatgcatcaatatggcaacattgagctcccgcagttggacagcccgagcttgtcgcctagtttagggacgaataaagatcagaacgagagtttcgagcaagaagaagagaagagctttaactgtgtggattggagaacactagataccttgcttgagacacaagtcatacatccgcataaccctaatattcttatgttcgaaacgcagtcgtataatccggcgccaagcttcccttccatgcatcaaagctataatgaggtcgaagctaatattcatcattctcttggatgcttccctgactcgtaattaaaaaaaaacacacttctatatattgatttgtattctatgatttaattgttccatctggaaaataacatttataactgtctatttgtaaaagaagtttgtgtttattacgtagaaatttgttgttg

SEQ ID NO: 105277 - protein, 324 aa, Arabidopsis thaliana; identical to SEQ ID NO: 42739
  peptide (1)..(324): Ceres Seq. ID no. 13616859
  misc_feature (9)..(138): Pfam Name: No apical meristem (NAM) protein Pfam Description: No apical meristem (NAM) protein
  misc_feature (1)..(324): Homolog of NCBI NO: 15217612 NR Description: No apical meristem (NAM) protein family
  misc_feature (1)..(262): Homolog of NCBI NO: 15227958 NR Description: NAM (no apical meristem)protein -related
  misc_feature (1)..(265): Homolog of NCBI NO: 15234325 NR Description: NAM like protein [Arabidopsis thaliana]
  misc_feature (9)..(285): Homolog of NCBI NO: 38637051 NR Description: putative OsNAC7 protein [Oryza sativa (japonica
  misc_feature (1)..(279): Homolog of NCBI NO: 15239338 NR Description: NAM (no apical meristem)-related protein
  misc_feature (5)..(259): Homolog of NCBI NO: 34902254 NR Description: Putative NAM-like protein [Oryza sativa (japonica
  misc_feature (7)..(280): Homolog of NCBI NO: 38605889 NR Description: OSJNBb0020O11.1 [Oryza sativa (japonica
  misc_feature (7)..(240): Homolog of NCBI NO: 15221256 NR Description: expressed protein [Arabidopsis thaliana]
  misc_feature (7)..(218): Homolog of NCBI NO: 15221554 NR Description: hypothetical protein [Arabidopsis thaliana]
  misc_feature (9)..(310): Homolog of NCBI NO: 15241802 NR Description: No apical meristem (NAM) protein family

SEQ ID NO: 105278 - protein, 320 aa, Arabidopsis thaliana; identical to SEQ ID NO: 42740
  peptide (1)..(320): Ceres Seq. ID no. 13616860
  misc_feature (5)..(134): Pfam Name: No apical meristem (NAM) protein Pfam Description: No apical meristem (NAM) protein
  misc_feature (1)..(320): Homolog of NCBI NO: 15217612 NR Description: No apical meristem (NAM) protein family
  misc_feature (1)..(258): Homolog of NCBI NO: 15227958 NR Description: NAM (no apical meristem)protein -related
  misc_feature (1)..(261): Homolog of NCBI NO: 15234325 NR Description: NAM like protein [Arabidopsis thaliana]
  misc_feature (5)..(281): Homolog of NCBI NO: 38637051 NR Description: putative OsNAC7 protein [Oryza sativa (japonica
  misc_feature (1)..(275): Homolog of NCBI NO: 15239338 NR Description: NAM (no apical meristem)-related protein
  misc_feature (1)..(255): Homolog of NCBI NO: 34902254 NR Description: Putative NAM-like protein [Oryza sativa (japonica
  misc_feature (3)..(276): Homolog of NCBI NO: 38605889 NR Description: OSJNBb0020O11.1 [Oryza sativa (japonica
  misc_feature (3)..(236): Homolog of NCBI NO: 15221256 NR Description: expressed protein [Arabidopsis thaliana]
  misc_feature (3)..(214): Homolog of NCBI NO: 15221554 NR Description: hypothetical protein [Arabidopsis thaliana]
  misc_feature (5)..(306): Homolog of NCBI NO: 15241802 NR Description: No apical meristem (NAM) protein family

SEQ ID NO: 105279 - protein, 316 aa, Arabidopsis thaliana; identical to SEQ ID NO: 42741
  peptide (1)..(316): Ceres Seq. ID no. 13616861
  misc_feature (1)..(130): Pfam Name: No apical meristem (NAM) protein Pfam Description: No apical meristem (NAM) protein
  misc_feature (1)..(316): Homolog of NCBI NO: 15217612 NR Description: No apical meristem (NAM) protein family
  misc_feature (1)..(254): Homolog of NCBI NO: 15227958 NR Description: NAM (no apical meristem)protein -related
  misc_feature (1)..(257): Homolog of NCBI NO: 15234325 NR Description: NAM like protein [Arabidopsis thaliana]
  misc_feature (1)..(277): Homolog of NCBI NO: 38637051 NR Description: putative OsNAC7 protein [Oryza sativa (japonica
  misc_feature (1)..(271): Homolog of NCBI NO: 15239338 NR Description: NAM (no apical meristem)-related protein
  misc_feature (1)..(251): Homolog of NCBI NO: 34902254 NR Description: Putative NAM-like protein [Oryza sativa (japonica
  misc_feature (1)..(272): Homolog of NCBI NO: 38605889 NR Description: OSJNBb0020O11.1 [Oryza sativa (japonica
  misc_feature (1)..(232): Homolog of NCBI NO: 15221256 NR Description: expressed protein [Arabidopsis thaliana]
  misc_feature (1)..(210): Homolog of NCBI NO: 15221554 NR Description: hypothetical protein [Arabidopsis thaliana]
  misc_feature (1)..(302): Homolog of NCBI NO: 15241802 NR Description: No apical meristem (NAM) protein family

SEQ ID NO: 105280 - DNA, 578 bp, Arabidopsis thaliana
  misc_feature (1)..(578): Ceres Seq. ID no. 13616866
  misc_feature: MA Experiment ID: 108434 Result: Down-regulated in Transcription
  misc_feature: MA Experiment 108434 PARAMETER Experiment Name: At_Root_Tips_cDNA_P Parameter: Tissue Value: Root Tips
  misc_feature: MA Experiment ID: 108573 Result: Up-regulated in Transcription
  misc_feature: MA Experiment 108573 PARAMETER Experiment Name: At_Drought_cDNA_P Parameter: Timepoint (hr) Value: 6
  misc_feature: MA Experiment 108573 PARAMETER Experiment Name: At_Drought_cDNA_P Parameter: Tissue Value: Aerial
  misc_feature: MA Experiment 108573 PARAMETER Experiment Name: At_Drought_cDNA_P Parameter: Treatment Value: Drought vs. No Drought
  misc_feature: MA Experiment ID: 108577 Result: Up-regulated in Transcription
  misc_feature: MA Experiment 108577 PARAMETER Experiment Name: At_42deg_Heat_cDNA_P Parameter: Temperature (deg C) Value: 42 vs. 22
  misc_feature: MA Experiment 108577 PARAMETER Experiment Name: At_42deg_Heat_cDNA_P Parameter: Timepoint (hr) Value: 6
  misc_feature: MA Experiment 108577 PARAMETER Experiment Name: At_42deg_Heat_cDNA_P Parameter: Tissue Value: Aerial
  misc_feature: MA Experiment ID: 108579 Result: Up-regulated in Transcription
  misc_feature: MA Experiment 108579 PARAMETER Experiment Name: At_4deg_Cold_cDNA_P Parameter: Temperature (deg C) Value: 4 vs. 22
  misc_feature: MA Experiment 108579 PARAMETER Experiment Name: At_4deg_Cold_cDNA_P Parameter: Timepoint (hr) Value: 6
  misc_feature: MA Experiment 108579 PARAMETER Experiment Name: At_4deg_Cold_cDNA_P Parameter: Tissue Value: Aerial
  misc_feature: MA Experiment ID: 20000111 Result: Up-regulated in Transcription
  misc_feature: MA Experiment 20000111 PARAMETER Experiment Name: At_42deg_Heat_cDNA_P Parameter: Temperature (deg C) Value: 42 vs. 22
  misc_feature: MA Experiment 20000111 PARAMETER Experiment Name: At_42deg_Heat_cDNA_P Parameter: Timepoint (hr) Value: 6
  misc_feature: MA Experiment 20000111 PARAMETER Experiment Name: At_42deg_Heat_cDNA_P Parameter: Tissue Value: Aerial
  misc_feature: MA Experiment ID: 20000112 Result: Up-regulated in Transcription
  misc_feature: MA Experiment 20000112 PARAMETER Experiment Name: At_42deg_Heat_cDNA_P Parameter: Temperature (deg C) Value: 42 vs. 22
  misc_feature: MA Experiment 20000112 PARAMETER Experiment Name: At_42deg_Heat_cDNA_P Parameter: Timepoint (hr) Value: 2
  misc_feature: MA Experiment 20000112 PARAMETER Experiment Name: At_42deg_Heat_cDNA_P Parameter: Tissue Value: Aerial
  misc_feature: MA Experiment ID: 20000113 Result: Up-regulated in Transcription
  misc_feature: MA Experiment 20000113 PARAMETER Experiment Name: At_42deg_Heat_cDNA_P Parameter: Temperature (deg C) Value: 42 vs. 22
  misc_feature: MA Experiment 20000113 PARAMETER Experiment Name: At_42deg_Heat_cDNA_P Parameter: Timepoint (hr) Value: 8
  misc_feature: MA Experiment 20000113 PARAMETER Experiment Name: At_42deg_Heat_cDNA_P Parameter: Tissue Value: Aerial
  misc_feature: MA Experiment ID: 20000144 Result: Up-regulated in Transcription
  misc_feature: MA Experiment 20000144 PARAMETER Experiment Name: At_42deg_Heat_cDNA_P Parameter: Temperature (deg C) Value: 42 vs. 22
  misc_feature: MA Experiment 20000144 PARAMETER Experiment Name: At_42deg_Heat_cDNA_P Parameter: Timepoint (hr) Value: 1
  misc_feature: MA Experiment 20000144 PARAMETER Experiment Name: At_42deg_Heat_cDNA_P Parameter: Tissue Value: Aerial
  misc_feature: MA Experiment ID: 20000171 Result: Up-regulated in Transcription
  misc_feature: MA Experiment 20000171 PARAMETER Experiment Name: At_42deg_Heat_P Parameter: Age (day) Value: 14
  misc_feature: MA Experiment 20000171 PARAMETER Experiment Name: At_42deg_Heat_P Parameter: Organism Value: A. thaliana
  misc_feature: MA Experiment 20000171 PARAMETER Experiment Name: At_42deg_Heat_P Parameter: Plant Line Value: WS
  misc_feature: MA Experiment 20000171 PARAMETER Experiment Name: At_42deg_Heat_P Parameter: Temperature (deg C) Value: 42 vs. 22
  misc_feature: MA Experiment 20000171 PARAMETER Experiment Name: At_42deg_Heat_P Parameter: Timepoint (hr) Value: 1
  misc_feature: MA Experiment 20000171 PARAMETER Experiment Name: At_42deg_Heat_P Parameter: Tissue Value: Aerial
  misc_feature: MA Experiment ID: 20000173 Result: Up-regulated in Transcription
  misc_feature: MA Experiment 20000173 PARAMETER Experiment Name: At_42deg_Heat_P Parameter: Age (day) Value: 14
  misc_feature: MA Experiment 20000173 PARAMETER Experiment Name: At_42deg_Heat_P Parameter: Organism Value: A. thaliana
  misc_feature: MA Experiment 20000173 PARAMETER Experiment Name: At_42deg_Heat_P Parameter: Plant Line Value: WS
  misc_feature: MA Experiment 20000173 PARAMETER Experiment Name: At_42deg_Heat_P Parameter: Temperature (deg C) Value: 42 vs. 22
  misc_feature: MA Experiment 20000173 PARAMETER Experiment Name: At_42deg_Heat_P Parameter: Timepoint (hr) Value: 6
  misc_feature: MA Experiment 20000173 PARAMETER Experiment Name: At_42deg_Heat_P Parameter: Tissue Value: Aerial
  misc_feature: MA Experiment ID: 20000224 Result: Down-regulated in Transcription
  misc_feature: MA Experiment ID: 20000437 Result: Up-regulated in Transcription
  misc_feature: MA Experiment 20000437 PARAMETER Experiment Name: At_Drought_P Parameter: Age (day) Value: 8
  misc_feature: MA Experiment 20000437 PARAMETER Experiment Name: At_Drought_P Parameter: Organism Value: A. thaliana
  misc_feature: MA Experiment 20000437 PARAMETER Experiment Name: At_Drought_P Parameter: Plant Line Value: WS
  misc_feature: MA Experiment 20000437 PARAMETER Experiment Name: At_Drought_P Parameter: Timepoint (hr) Value: 24
  misc_feature: MA Experiment 20000437 PARAMETER Experiment Name: At_Drought_P Parameter: Tissue Value: Whole Plant
  misc_feature: MA Experiment 20000437 PARAMETER Experiment Name: At_Drought_P Parameter: Treatment Value: Drought vs. No Drought
  misc_feature: MA Experiment ID: 20001557 Result: Down-regulated in Transcription
  misc_feature: MA Experiment 20001557 PARAMETER Experiment Name: At_Drought_Soil_Dry_P Parameter: Age (day) Value: 27
  misc_feature: MA Experiment 20001557 PARAMETER Experiment Name: At_Drought_Soil_Dry_P Parameter: Organism Value: A. thaliana
  misc_feature: MA Experiment 20001557 PARAMETER Experiment Name: At_Drought_Soil_Dry_P Parameter: Plant Line Value: WS
  misc_feature: MA Experiment 20001557 PARAMETER Experiment Name: At_Drought_Soil_Dry_P Parameter: Post Timepoint (hr) Value: 3
  misc_feature: MA Experiment 20001557 PARAMETER Experiment Name: At_Drought_Soil_Dry_P Parameter: Post-Treatment Value: Re-Water vs. No Drought
  misc_feature: MA Experiment 20001557 PARAMETER Experiment Name: At_Drought_Soil_Dry_P Parameter: Timepoint (day) Value: 13
  misc_feature: MA Experiment 20001557 PARAMETER Experiment Name: At_Drought_Soil_Dry_P Parameter: Treatment Value: Drought vs. No Drought
  misc_feature: MA Experiment ID: 20001905 Result: Up-regulated in Transcription
  misc_feature: MA Experiment 20001905 PARAMETER Experiment Name: At_Drought_Reproduction_P Parameter: Age (day) Value: 40
  misc_feature: MA Experiment 20001905 PARAMETER Experiment Name: At_Drought_Reproduction_P Parameter: Organism Value: A. thaliana
  misc_feature: MA Experiment 20001905 PARAMETER Experiment Name: At_Drought_Reproduction_P Parameter: Plant Line Value: WS
  misc_feature: MA Experiment 20001905 PARAMETER Experiment Name: At_Drought_Reproduction_P Parameter: Timepoint (day) Value: 10
  misc_feature: MA Experiment 20001905 PARAMETER Experiment Name: At_Drought_Reproduction_P Parameter: Tissue Value: Rosettes
  misc_feature: MA Experiment 20001905 PARAMETER Experiment Name: At_Drought_Reproduction_P Parameter: Treatment Value: Drought vs. No Drought
  misc_feature: MA Experiment ID: 20001911 Result: Up-regulated in Transcription
  misc_feature: MA Experiment 20001911 PARAMETER Experiment Name: At_Drought_Reproduction_P Parameter: Age (day) Value: 40
  misc_feature: MA Experiment 20001911 PARAMETER Experiment Name: At_Drought_Reproduction_P Parameter: Organism Value: A. thaliana
  misc_feature: MA Experiment 20001911 PARAMETER Experiment Name: At_Drought_Reproduction_P Parameter: Plant Line Value: WS
  misc_feature: MA Experiment 20001911 PARAMETER Experiment Name: At_Drought_Reproduction_P Parameter: Timepoint (day) Value: 10
  misc_feature: MA Experiment 20001911 PARAMETER Experiment Name: At_Drought_Reproduction_P Parameter: Tissue Value: Flowers
  misc_feature: MA Experiment 20001911 PARAMETER Experiment Name: At_Drought_Reproduction_P Parameter: Treatment Value: Drought vs. No Drought
gttattgaaaaaaaattcccagattctataaaaaagagaaatgcaaacatttgctcctggaacaagagtctaccacctcatcatcatcgtcttcttcttcttcttctgcttatcatcgttcttcgcttcaatcgtcatggctgatgaatataccggagaagcaacgggatcgtcggaagcaaaggttcacatcatctacaccgagaaacctaccgatgaagaacctaaaacctatcatctccgtaccctttcctctgctctcggcagtgaggaagctgcaaaagatgctttgatttacagttacaaggaagctgcttctggtttttcagctaagctcactcctgagcaagtcgctgagatatcaaaacaaccaggtgtgattcaagttgtgccaagccagacttatcagctgcacaaacctggtggtggtggtggtttcaagttgacctaacttgactttgtgtattctctacttctcaactaaacctgttgctttacagaaactagtctgttgttgtattgttgtgactttgaaccaagtatctaactaaaataatgttatgaagttgctttgattc

SEQ ID NO: 105281 - protein, 136 aa, Arabidopsis thaliana
  peptide (1)..(136): Ceres Seq. ID no. 13616867
  misc_feature (48)..(125): Pfam Name: Subtilisin N-terminal Region Pfam Description: Subtilisin N-terminal Region
  misc_feature (1)..(136): Homolog of NCBI NO: 18409953 NR Description: expressed protein [Arabidopsis thaliana]
  misc_feature (1)..(136): Homolog of NCBI NO: 21593285 NR Description: unknown [Arabidopsis thaliana]
  misc_feature (16)..(125): Homolog of NCBI NO: 3204125 NR Description: putative Pi starvation-induced protein [Cicer
  misc_feature (44)..(125): Homolog of NCBI NO: 7489176 NR Description: pit2 protein (clone pAL141), Pi starvation - common tobacco >gi|676884|dbj|BAA06151.1| The expression is
  misc_feature (25)..(122): Homolog of NCBI NO: 34394844 NR Description: unknown protein [Oryza sativa (japonica
  misc_feature (29)..(124): Homolog of NCBI NO: 28376696 NR Description: putative Pi starvation induced protein [Oryza
  misc_feature (15)..(124): Homolog of NCBI NO: 18416719 NR Description: subtilisin-like serine protease [Arabidopsis
  misc_feature (24)..(124): Homolog of NCBI NO: 18413349 NR Description: subtilisin-like serine protease [Arabidopsis
  misc_feature (41)..(124): Homolog of NCBI NO: 25289836 NR Description: hypothetical protein F9L11.12 - Arabidopsis >gi|6910572|gb|AAF31277.1|AC006424_6 Second of four adjacent
  misc_feature (41)..(124): Homolog of NCBI NO: 30692782 NR Description: subtilisin-like serine protease [Arabidopsis
MQTFAPGTRVYHLIIIVFFFFFCLSSFFASIVMADEYTGEATGSSEAKVHIIYTEKPTDEEPKTYHLRTLSSALGSEEAAKDALIYSYKEAASGFSAKLTPEQVAEISKQPGVIQVVPSQTYQLHKPGGGGGFKLT

SEQ ID NO: 105282 - protein, 104 aa, Arabidopsis thaliana; identical to SEQ ID NO: 24149
  peptide (1)..(104): Ceres Seq. ID no. 13616868
  misc_feature (16)..(93): Pfam Name: Subtilisin N-terminal Region Pfam Description: Subtilisin N-terminal Region
  misc_feature (1)..(104): Homolog of NCBI NO: 18409953 NR Description: expressed protein [Arabidopsis thaliana]
  misc_feature (1)..(104): Homolog of NCBI NO: 21593285 NR Description: unknown [Arabidopsis thaliana]
  misc_feature (1)..(93): Homolog of NCBI NO: 3204125 NR Description: putative Pi starvation-induced protein [Cicer
  misc_feature (12)..(93): Homolog of NCBI NO: 7489176 NR Description: pit2 protein (clone pAL141), Pi starvation - common tobacco >gi|676884|dbj|BAA06151.1| The expression is
  misc_feature (1)..(90): Homolog of NCBI NO: 34394844 NR Description: unknown protein [Oryza sativa (japonica
  misc_feature (1)..(92): Homolog of NCBI NO: 28376696 NR Description: putative Pi starvation induced protein [Oryza
  misc_feature (1)..(92): Homolog of NCBI NO: 18416719 NR Description: subtilisin-like serine protease [Arabidopsis
  misc_feature (1)..(92): Homolog of NCBI NO: 18413349 NR Description: subtilisin-like serine protease [Arabidopsis
  misc_feature (9)..(92): Homolog of NCBI NO: 25289836 NR Description: hypothetical protein F9L11.12 - Arabidopsis >gi|6910572|gb|AAF31277.1|AC006424_6 Second of four adjacent
  misc_feature (9)..(92): Homolog of NCBI NO: 30692782 NR Description: subtilisin-like serine protease [Arabidopsis

SEQ ID NO: 105283 - DNA, 2057 bp, Arabidopsis thaliana
  misc_feature (1)..(2057): Ceres Seq. ID no. 13616877
  misc_feature: MA Experiment ID: 108434 Result: Down-regulated in Transcription
  misc_feature: MA Experiment 108434 PARAMETER Experiment Name: At_Root_Tips_cDNA_P Parameter: Tissue Value: Root Tips
  misc_feature: MA Experiment ID: 108435 Result: Down-regulated in Transcription
  misc_feature: MA Experiment 108435 PARAMETER Experiment Name: At_stm_Mutants_cDNA_P Parameter: Plant Line Value: wt Landsburg vs stm
  misc_feature: MA Experiment 108435 PARAMETER Experiment Name: At_stm_Mutants_cDNA_P Parameter: Tissue Value: Shoot Apical Meristem Region
  misc_feature: MA Experiment ID: 108463 Result: Up-regulated in Transcription
  misc_feature: MA Experiment 108463 PARAMETER Experiment Name: At_Germinating_Seeds_cDNA_P Parameter: Age (day) Value: 3 vs. 0
  misc_feature: MA Experiment 108463 PARAMETER Experiment Name: At_Germinating_Seeds_cDNA_P Parameter: Tissue Value: Germinating Seeds
  misc_feature: MA Experiment ID: 108573 Result: Up-regulated in Transcription
  misc_feature: MA Experiment 108573 PARAMETER Experiment Name: At_Drought_cDNA_P Parameter: Timepoint (hr) Value: 6
  misc_feature: MA Experiment 108573 PARAMETER Experiment Name: At_Drought_cDNA_P Parameter: Tissue Value: Aerial
  misc_feature: MA Experiment 108573 PARAMETER Experiment Name: At_Drought_cDNA_P Parameter: Treatment Value: Drought vs. No Drought
  misc_feature: MA Experiment ID: 108574 Result: Down-regulated in Transcription
  misc_feature: MA Experiment 108574 PARAMETER Experiment Name: At_Wounding__cDNA_P Parameter: Timepoint (hr) Value: 1
  misc_feature: MA Experiment 108574 PARAMETER Experiment Name: At_Wounding__cDNA_P Parameter: Tissue Value: Aerial
  misc_feature: MA Experiment 108574 PARAMETER Experiment Name: At_Wounding__cDNA_P Parameter: Treatment Value: Wounding vs. No Wounding
  misc_feature: MA Experiment ID: 108577 Result: Down-regulated in Transcription
  misc_feature: MA Experiment 108577 PARAMETER Experiment Name: At_42deg_Heat_cDNA_P Parameter: Temperature (deg C) Value: 42 vs. 22
  misc_feature: MA Experiment 108577 PARAMETER Experiment Name: At_42deg_Heat_cDNA_P Parameter: Timepoint (hr) Value: 6
  misc_feature: MA Experiment 108577 PARAMETER Experiment Name: At_42deg_Heat_cDNA_P Parameter: Tissue Value: Aerial
  misc_feature: MA Experiment ID: 108668 Result: Down-regulated in Transcription
  misc_feature: MA Experiment 108668 PARAMETER Experiment Name: At_2mM_SA_cDNA_P Parameter: Plant Line Value: WS
  misc_feature: MA Experiment 108668 PARAMETER Experiment Name: At_2mM_SA_cDNA_P Parameter: Timepoint (hr) Value: 6
  misc_feature: MA Experiment 108668 PARAMETER Experiment Name: At_2mM_SA_cDNA_P Parameter: Treatment Value: 2mM SA vs. No Treatment
  misc_feature: MA Experiment ID: 20000030 Result: Down-regulated in Transcription
  misc_feature: MA Experiment 20000030 PARAMETER Experiment Name: At_CS6630_Roots_cDNA_P Parameter: Plant Line Value: CS6630 vs. WS
  misc_feature: MA Experiment 20000030 PARAMETER Experiment Name: At_CS6630_Roots_cDNA_P Parameter: Tissue Value: Roots
  misc_feature: MA Experiment ID: 20000071 Result: Up-regulated in Transcription
  misc_feature: MA Experiment 20000071 PARAMETER Experiment Name: At_100uM_ABA_Mutants_cDNA_P Parameter: Plant Line Value: CS8104
  misc_feature: MA Experiment 20000071 PARAMETER Experiment Name: At_100uM_ABA_Mutants_cDNA_P Parameter: Timepoint (hr) Value: 6
  misc_feature: MA Experiment 20000071 PARAMETER Experiment Name: At_100uM_ABA_Mutants_cDNA_P Parameter: Tissue Value: Aerial
  misc_feature: MA Experiment 20000071 PARAMETER Experiment Name: At_100uM_ABA_Mutants_cDNA_P Parameter: Treatment Value: 100uM ABA vs. No Treatment
  misc_feature: MA Experiment ID: 20000224 Result: Up-regulated in Transcription
  misc_feature: MA Experiment ID: 20000315 Result: Down-regulated in Transcription
  misc_feature: MA Experiment 20000315 PARAMETER Experiment Name: At_14day_Shoots-Roots_Sub_P Parameter: Age (day) Value: 14
  misc_feature: MA Experiment 20000315 PARAMETER Experiment Name: At_14day_Shoots-Roots_Sub_P Parameter: Organism Value: A. thaliana
  misc_feature: MA Experiment 20000315 PARAMETER Experiment Name: At_14day_Shoots-Roots_Sub_P Parameter: Plant Line Value: WS
  misc_feature: MA Experiment 20000315 PARAMETER Experiment Name: At_14day_Shoots-Roots_Sub_P Parameter: Tissue Value: Shoots vs. Whole Plant
  misc_feature: MA Experiment ID: 20000328 Result: Down-regulated in Transcription
  misc_feature: MA Experiment 20000328 PARAMETER Experiment Name: At_42deg_Heat_Sub_P Parameter: Age (day) Value: 14
  misc_feature: MA Experiment 20000328 PARAMETER Experiment Name: At_42deg_Heat_Sub_P Parameter: Organism Value: A. thaliana
  misc_feature: MA Experiment 20000328 PARAMETER Experiment Name: At_42deg_Heat_Sub_P Parameter: Plant Line Value: WS
  misc_feature: MA Experiment 20000328 PARAMETER Experiment Name: At_42deg_Heat_Sub_P Parameter: Temperature (deg C) Value: 42 vs. 22
  misc_feature: MA Experiment 20000328 PARAMETER Experiment Name: At_42deg_Heat_Sub_P Parameter: Timepoint (hr) Value: 6
  misc_feature: MA Experiment 20000328 PARAMETER Experiment Name: At_42deg_Heat_Sub_P Parameter: Tissue Value: Aerial
  misc_feature: MA Experiment ID: 20000355 Result: Down-regulated in Transcription
  misc_feature: MA Experiment 20000355 PARAMETER Experiment Name: At_Siliques_Sub_P Parameter: Age (day) Value: 21
  misc_feature: MA Experiment 20000355 PARAMETER Experiment Name: At_Siliques_Sub_P Parameter: Organism Value: A. thaliana
  misc_feature: MA Experiment 20000355 PARAMETER Experiment Name: At_Siliques_Sub_P Parameter: Plant Line Value: WS
  misc_feature: MA Experiment 20000355 PARAMETER Experiment Name: At_Siliques_Sub_P Parameter: Tissue Value: Less Than 5mm Siliques vs. Whole Plant
  misc_feature: MA Experiment ID: 20000440 Result: Down-regulated in Transcription
  misc_feature: MA Experiment 20000440 PARAMETER Experiment Name: At_Closed-Flower__Sub_P Parameter: Tissue Value: Closed Flower vs. Whole Plant
cctctgttttcttcttttaaaagcctcctcttcttcctcttctctctcctcacaactcaaaactctctccatctctcttctaaaatcagacaagaaagatggctcaagaggaagtacagaaatcggctgatgtcgctgctgctccggtggtgaaggagaaacctattaccgataaggaggttactattcctacccctgtggcagagaaagaggaagttgctgctcctgtctctgatgagaaggcggttccagagaaggaggtgactccggagaaggaagccccagcggcggaagcggagaaatctgtttcggtgaaggaggaagagacggttgttgtagctgagaaggttgttgttttaactgctgaggaagttcagaagaaggcacttgaggagtttaaggagcttgtaagggaggctttgaacaaacgtgaattcactgctccggtgacgccggttaaggaagagaaaacagaggagaagaaaacagaggaggaaactaaagaggaagagaaaacagaggagaagaaagaagagacaacgactgaggttaaggttgaagaagagaaaccggcggttccagcggcggaggaggagaaatcatcagaggctgctccggttgagaccaaatctgaggagaaacctgaagagaaagcagaggtaacaaccgagaaagcatccagtgccgaagaagatggaaccaagaccgtggaagcaatcgaagaatctatcgtctctgtttcaccacctgaatccgccgtagcacctgtcgtggtagagactgtcgccgttgctgaggcagagccagtggagccggaagaagtctcgatctggggagttccactactccaagacgagagatctgacgtgatcctcacgaaattcctccgtgcaagagactttaaggtcaaagaagctttaaccatgcttaaaaacaccgtccagtggcgtaaagaaaacaaaatcgacgaactcgttgaatccggagaagaagtgagtgagttcgagaagatggtgtttgctcacggtgttgacaaagaaggacacgtcgtgatctacagttcttacggtgagtttcagaacaaggagcttttctccgacaaggagaagcttaacaagttcctcagctggaggattcagctacaagagaagtgtgtgagagctattgatttcagcaaccctgaagcgaagtcttcgtttgtgttcgtcagcgacttcaggaacgctccaggacttggtaaaagagccttgtggcaattcatcagacgcgctgttaaacaattcgaggacaattatcctgaattcgccgctaaagagctattcatcaatgtcccatggtggtacattccatactacaaaacattcggatctatcatcacatccccaaggactaggagcaagatggtccttgctggtccatccaaatctgccgatactattttcaaatacatagctcctgaacaagttcccgttaaatacggtggacttagcaaagatactcctttgaccgaagaaaccataacggaagccatcgttaaaccggcagcaaactacactattgaattgcctgcttctgaggcttgcacgctttcatgggagcttagggttttgggtgctgatgtgagctacggagctcagtttgagccaaccaccgaaggaagctatgctgtgatcgtctctaagacacggaagattggatcaaccgatgaaccggtgataaccgattcttttaaggtgggtgaaccgggaaagattgtgatcacaatcgacaaccagacttccaagaagaagaaagtgctctacaggttcaaaactcaataaaaggtctgatctttgaaatccaaatccaaggaagaagcaaaaaaaatgttattttgttatttgggggaaacaaattttaattaattaatttagtttgttatttattatgtaattttgaaatctcaagatgtggttgtgtttttgctttgttttggtattgggggttgttttcgtgtgtggagaatatgtgattaaaattcaaaagaaagtaaagaacactttgtttcatgatttctt

SEQ ID NO: 105284 - protein, 573 aa, Arabidopsis thaliana; identical to SEQ ID NO: 39018
  peptide (1)..(573): Ceres Seq. ID no. 13616878
  misc_feature (305)..(489): Pfam Name: CRAL/TRIO domain Pfam Description: CRAL/TRIO domain
  misc_feature (1)..(573): Homolog of NCBI NO: 15218382 NR Description: cytosolic factor -related [Arabidopsis thaliana]
  misc_feature (1)..(573): Homolog of NCBI NO: 15219901 NR Description: expressed protein [Arabidopsis thaliana]
  misc_feature (121)..(572): Homolog of NCBI NO: 8894548 NR Description: hypothetical protein [Cicer arietinum]
  misc_feature (36)..(573): Homolog of NCBI NO: 34907288 NR Description: contains ESTs
  misc_feature (117)..(573): Homolog of NCBI NO: 15218383 NR Description: cytosolic factor -related [Arabidopsis thaliana]
  misc_feature (239)..(573): Homolog of NCBI NO: 15081614 NR Description: At1g72160/T9N14_8 [Arabidopsis thaliana]
  misc_feature (27)..(573): Homolog of NCBI NO: 18397616 NR Description: expressed protein [Arabidopsis thaliana]
  misc_feature (27)..(573): Homolog of NCBI NO: 14334978 NR Description: unknown protein [Arabidopsis thaliana]
  misc_feature (5)..(573): Homolog of NCBI NO: 30680992 NR Description: expressed protein [Arabidopsis thaliana]
  misc_feature (5)..(489): Homolog of NCBI NO: 25407487 NR Description: hypothetical protein AT4g09160 [imported] - thaliana >gi|7267559|emb|CAB78040.1| putative protein

SEQ ID NO: 105285 - protein, 298 aa, Arabidopsis thaliana; identical to SEQ ID NO: 39019
  peptide (1)..(298): Ceres Seq. ID no. 13616879
  misc_feature (30)..(214): Pfam Name: CRAL/TRIO domain Pfam Description: CRAL/TRIO domain
  misc_feature (1)..(298): Homolog of NCBI NO: 15218382 NR Description: cytosolic factor -related [Arabidopsis thaliana]
  misc_feature (1)..(298): Homolog of NCBI NO: 15219901 NR Description: expressed protein [Arabidopsis thaliana]
  misc_feature (1)..(297): Homolog of NCBI NO: 8894548 NR Description: hypothetical protein [Cicer arietinum]
  misc_feature (1)..(298): Homolog of NCBI NO: 34907288 NR Description: contains ESTs
  misc_feature (1)..(298): Homolog of NCBI NO: 15218383 NR Description: cytosolic factor -related [Arabidopsis thaliana]
  misc_feature (1)..(298): Homolog of NCBI NO: 15081614 NR Description: At1g72160/T9N14_8 [Arabidopsis thaliana]
  misc_feature (1)..(298): Homolog of NCBI NO: 18397616 NR Description: expressed protein [Arabidopsis thaliana]
  misc_feature (1)..(298): Homolog of NCBI NO: 14334978 NR Description: unknown protein [Arabidopsis thaliana]
  misc_feature (1)..(298): Homolog of NCBI NO: 30680992 NR Description: expressed protein [Arabidopsis thaliana]
  misc_feature (1)..(214): Homolog of NCBI NO: 25407487 NR Description: hypothetical protein AT4g09160 [imported] - thaliana >gi|7267559|emb|CAB78040.1| putative protein

SEQ ID NO: 105286 - DNA, 642 bp, Arabidopsis thaliana
  misc_feature (1)..(642): Ceres Seq. ID no. 13616880
  misc_feature: MA Experiment ID: 108501 Result: Up-regulated in Transcription
  misc_feature: MA Experiment 108501 PARAMETER Experiment Name: At_ap2_floral_buds_cDNA_P Parameter: Plant Line Value: ap2 (Ler.)
  misc_feature: MA Experiment 108501 PARAMETER Experiment Name: At_ap2_floral_buds_cDNA_P Parameter: Tissue Value: Closed Flower
  misc_feature: MA Experiment ID: 108595 Result: Up-regulated in Transcription
  misc_feature: MA Experiment 108595 PARAMETER Experiment Name: At_Ler-pi_Ovule_cDNA_P Parameter: Plant Line Value: null
  misc_feature: MA Experiment ID: 20000068 Result: Up-regulated in Transcription
  misc_feature: MA Experiment ID: 20000087 Result: Up-regulated in Transcription
  misc_feature: MA Experiment 20000087 PARAMETER Experiment Name: At_100uM_ABA_Mutants_cDNA_P Parameter: Plant Line Value: WS
  misc_feature: MA Experiment 20000087 PARAMETER Experiment Name: At_100uM_ABA_Mutants_cDNA_P Parameter: Timepoint (hr) Value: 6
  misc_feature: MA Experiment 20000087 PARAMETER Experiment Name: At_100uM_ABA_Mutants_cDNA_P Parameter: Tissue Value: Aerial
  misc_feature: MA Experiment 20000087 PARAMETER Experiment Name: At_100uM_ABA_Mutants_cDNA_P Parameter: Treatment Value: 100uM ABA vs. No Treatment
  misc_feature: MA Experiment ID: 20000182 Result: Up-regulated in Transcription
  misc_feature: MA Experiment 20000182 PARAMETER Experiment Name: At_2mM_SA_P Parameter: Age (day) Value: 14
  misc_feature: MA Experiment 20000182 PARAMETER Experiment Name: At_2mM_SA_P Parameter: Organism Value: A. thaliana
  misc_feature: MA Experiment 20000182 PARAMETER Experiment Name: At_2mM_SA_P Parameter: Plant Line Value: WS
  misc_feature: MA Experiment 20000182 PARAMETER Experiment Name: At_2mM_SA_P Parameter: Timepoint (hr) Value: 6
  misc_feature: MA Experiment 20000182 PARAMETER Experiment Name: At_2mM_SA_P Parameter: Tissue Value: Aerial
  misc_feature: MA Experiment 20000182 PARAMETER Experiment Name: At_2mM_SA_P Parameter: Treatment Value: 2mM SA vs. No Treatment
  misc_feature: MA Experiment ID: 20000184 Result: Down-regulated in Transcription
  misc_feature: MA Experiment 20000184 PARAMETER Experiment Name: At_Shoots__P Parameter: Age (day) Value: 7
  misc_feature: MA Experiment 20000184 PARAMETER Experiment Name: At_Shoots__P Parameter: Tissue Value: Shoots vs. Whole Plant
  misc_feature: MA Experiment ID: 20000185 Result: Down-regulated in Transcription
  misc_feature: MA Experiment 20000185 PARAMETER Experiment Name: At_Roots__P Parameter: Age (day) Value: 7 vs. 21
  misc_feature: MA Experiment 20000185 PARAMETER Experiment Name: At_Roots__P Parameter: Organism Value: A. thaliana
  misc_feature: MA Experiment 20000185 PARAMETER Experiment Name: At_Roots__P Parameter: Tissue Value: Roots vs. Whole Plant
  misc_feature: MA Experiment ID: 20000224 Result: Up-regulated in Transcription
  misc_feature: MA Experiment ID: 20000234 Result: Up-regulated in Transcription
  misc_feature: MA Experiment 20000234 PARAMETER Experiment Name: At_Siliques_P Parameter: Age (day) Value: 21
  misc_feature: MA Experiment 20000234 PARAMETER Experiment Name: At_Siliques_P Parameter: Organism Value: A. thaliana
  misc_feature: MA Experiment 20000234 PARAMETER Experiment Name: At_Siliques_P Parameter: Plant Line Value: WS
  misc_feature: MA Experiment 20000234 PARAMETER Experiment Name: At_Siliques_P Parameter: Tissue Value: Less Than 5mm Siliques vs. Whole Plant
  misc_feature: MA Experiment ID: 20000235 Result: Up-regulated in Transcription
  misc_feature: MA Experiment 20000235 PARAMETER Experiment Name: At_Siliques_P Parameter: Age (day) Value: 21
  misc_feature: MA Experiment 20000235 PARAMETER Experiment Name: At_Siliques_P Parameter: Organism Value: A. thaliana
  misc_feature: MA Experiment 20000235 PARAMETER Experiment Name: At_Siliques_P Parameter: Plant Line Value: WS
  misc_feature: MA Experiment 20000235 PARAMETER Experiment Name: At_Siliques_P Parameter: Tissue Value: 5-10mm Siliques vs. Whole Plant
  misc_feature: MA Experiment ID: 20000264 Result: Up-regulated in Transcription
  misc_feature: MA Experiment 20000264 PARAMETER Experiment Name: At_Open_Flower_P Parameter: Age (day) Value: 21
  misc_feature: MA Experiment 20000264 PARAMETER Experiment Name: At_Open_Flower_P Parameter: Plant Line Value: WS
  misc_feature: MA Experiment 20000264 PARAMETER Experiment Name: At_Open_Flower_P Parameter: Tissue Value: Open Flower vs. Whole Plant
  misc_feature: MA Experiment ID: 20000265 Result: Up-regulated in Transcription
  misc_feature: MA Experiment 20000265 PARAMETER Experiment Name: At_Open_Flower_P Parameter: Age (day) Value: 21
  misc_feature: MA Experiment 20000265 PARAMETER Experiment Name: At_Open_Flower_P Parameter: Plant Line Value: WS
  misc_feature: MA Experiment 20000265 PARAMETER Experiment Name: At_Open_Flower_P Parameter: Tissue Value: Closed Flower vs. Whole Plant
  misc_feature: MA Experiment ID: 20000286 Result: Up-regulated in Transcription
  misc_feature: MA Experiment 20000286 PARAMETER Experiment Name: At_Open_Flower_P Parameter: Age (day) Value: 21
  misc_feature: MA Experiment 20000286 PARAMETER Experiment Name: At_Open_Flower_P Parameter: Plant Line Value: WS
  misc_feature: MA Experiment 20000286 PARAMETER Experiment Name: At_Open_Flower_P Parameter: Tissue Value: Half Open vs. Whole Plant
  misc_feature: MA Experiment ID: 20000438 Result: Down-regulated in Transcription
  misc_feature: MA Experiment 20000438 PARAMETER Experiment Name: At_Shoots__P Parameter: Age (day) Value: 14
  misc_feature: MA Experiment 20000438 PARAMETER Experiment Name: At_Shoots__P Parameter: Tissue Value: Shoots vs. Whole Plant
  misc_feature: MA Experiment ID: 20000439 Result: Down-regulated in Transcription
  misc_feature: MA Experiment 20000439 PARAMETER Experiment Name: At_Roots__P Parameter: Age (day) Value: 14 vs. 21
  misc_feature: MA Experiment 20000439 PARAMETER Experiment Name: At_Roots__P Parameter: Organism Value: A. thaliana
  misc_feature: MA Experiment 20000439 PARAMETER Experiment Name: At_Roots__P Parameter: Tissue Value: Roots vs. Whole Plant
  misc_feature: MA Experiment ID: 20000495 Result: Up-regulated in Transcription
  misc_feature: MA Experiment 20000495 PARAMETER Experiment Name: At_Guard_Cells_P Parameter: Harvest Date Value: 8/2/2002
  misc_feature: MA Experiment 20000495 PARAMETER Experiment Name: At_Guard_Cells_P Parameter: Organism Value: A. thaliana
  misc_feature: MA Experiment 20000495 PARAMETER Experiment Name: At_Guard_Cells_P Parameter: Tissue Value: Guard Cells vs. Leaves
  misc_feature: MA Experiment ID: 20000527 Result: Down-regulated in Transcription
  misc_feature: MA Experiment 20000527 PARAMETER Experiment Name: At_10percent_PEG_P Parameter: Age (day) Value: 20
  misc_feature: MA Experiment 20000527 PARAMETER Experiment Name: At_10percent_PEG_P Parameter: Organism Value: A. thaliana
  misc_feature: MA Experiment 20000527 PARAMETER Experiment Name: At_10percent_PEG_P Parameter: Plant Line Value: WS
  misc_feature: MA Experiment 20000527 PARAMETER Experiment Name: At_10percent_PEG_P Parameter: Timepoint (day) Value: 20
  misc_feature: MA Experiment 20000527 PARAMETER Experiment Name: At_10percent_PEG_P Parameter: Tissue Value: Whole Plant
  misc_feature: MA Experiment 20000527 PARAMETER Experiment Name: At_10percent_PEG_P Parameter: Treatment Value: 10percent PEG vs. No Treatment
  misc_feature: MA Experiment ID: 20000794 Result: Down-regulated in Transcription
  misc_feature: MA Experiment 20000794 PARAMETER Experiment Name: At_Petals_P Parameter: Age (day) Value: 23-25 days
  misc_feature: MA Experiment 20000794 PARAMETER Experiment Name: At_Petals_P Parameter: Plant Line Value: WS
  misc_feature: MA Experiment 20000794 PARAMETER Experiment Name: At_Petals_P Parameter: Tissue Value: Petals vs. Whole plant
  misc_feature: MA Experiment ID: 20001451 Result: Up-regulated in Transcription
  misc_feature: MA Experiment 20001451 PARAMETER Experiment Name: At_Far-red-induction_P Parameter: Age (day) Value: 7
  misc_feature: MA Experiment 20001451 PARAMETER Experiment Name: At_Far-red-induction_P Parameter: Light Value: Far-red vs. White
  misc_feature: MA Experiment 20001451 PARAMETER Experiment Name: At_Far-red-induction_P Parameter: Organism Value: A. thaliana
  misc_feature: MA Experiment 20001451 PARAMETER Experiment Name: At_Far-red-induction_P Parameter: Plant Line Value: Columbia
  misc_feature: MA Experiment 20001451 PARAMETER Experiment Name: At_Far-red-induction_P Parameter: Timepoint (hr) Value: 24
  misc_feature: MA Experiment 20001451 PARAMETER Experiment Name: At_Far-red-induction_P Parameter: Tissue Value: Whole Plant
  misc_feature: MA Experiment ID: 20001457 Result: Up-regulated in Transcription
  misc_feature: MA Experiment 20001457 PARAMETER Experiment Name: At_50mM_NH4NO3_L-to-H_P Parameter: Age (day) Value: Undefined
  misc_feature: MA Experiment 20001457 PARAMETER Experiment Name: At_50mM_NH4NO3_L-to-H_P Parameter: Organism Value: Undefined
  misc_feature: MA Experiment 20001457 PARAMETER Experiment Name: At_50mM_NH4NO3_L-to-H_P Parameter: Plant Line Value: Undefined
  misc_feature: MA Experiment 20001457 PARAMETER Experiment Name: At_50mM_NH4NO3_L-to-H_P Parameter: Timepoint (hr) Value: 0.5
  misc_feature: MA Experiment 20001457 PARAMETER Experiment Name: At_50mM_NH4NO3_L-to-H_P Parameter: Tissue Value: Siliques
  misc_feature: MA Experiment 20001457 PARAMETER Experiment Name: At_50mM_NH4NO3_L-to-H_P Parameter: Treatment Value: 50mM NH4NO3 vs. 100mM Manitol
  misc_feature: MA Experiment ID: 20001556 Result: Up-regulated in Transcription
  misc_feature: MA Experiment 20001556 PARAMETER Experiment Name: At_Drought_Soil_Dry_P Parameter: Age (day) Value: 26
  misc_feature: MA Experiment 20001556 PARAMETER Experiment Name: At_Drought_Soil_Dry_P Parameter: Organism Value: A. thaliana
  misc_feature: MA Experiment 20001556 PARAMETER Experiment Name: At_Drought_Soil_Dry_P Parameter: Plant Line Value: WS
  misc_feature: MA Experiment 20001556 PARAMETER Experiment Name: At_Drought_Soil_Dry_P Parameter: Post Timepoint (hr) Value: None
  misc_feature: MA Experiment 20001556 PARAMETER Experiment Name: At_Drought_Soil_Dry_P Parameter: Post-Treatment Value: None
  misc_feature: MA Experiment 20001556 PARAMETER Experiment Name: At_Drought_Soil_Dry_P Parameter: Timepoint (day) Value: 12
  misc_feature: MA Experiment 20001556 PARAMETER Experiment Name: At_Drought_Soil_Dry_P Parameter: Treatment Value: Drought vs. No Drought
  misc_feature: MA Experiment ID: 20001768 Result: Up-regulated in Transcription
  misc_feature: MA Experiment 20001768 PARAMETER Experiment Name: At_Far-red-enriched-adult_P Parameter: Age (day) Value: 28
  misc_feature: MA Experiment 20001768 PARAMETER Experiment Name: At_Far-red-enriched-adult_P Parameter: Light Value: Far-red enriched vs. White
  misc_feature: MA Experiment 20001768 PARAMETER Experiment Name: At_Far-red-enriched-adult_P Parameter: Organism Value: A. thaliana
  misc_feature: MA Experiment 20001768 PARAMETER Experiment Name: At_Far-red-enriched-adult_P Parameter: Plant Line Value: Columbia
  misc_feature: MA Experiment 20001768 PARAMETER Experiment Name: At_Far-red-enriched-adult_P Parameter: Timepoint (hr) Value: 1
  misc_feature: MA Experiment 20001768 PARAMETER Experiment Name: At_Far-red-enriched-adult_P Parameter: Tissue Value: Aerial
  misc_feature: MA Experiment ID: 20001773 Result: Up-regulated in Transcription
  misc_feature: MA Experiment 20001773 PARAMETER Experiment Name: At_Far-red-enriched-adult_P Parameter: Age (day) Value: 30
  misc_feature: MA Experiment 20001773 PARAMETER Experiment Name: At_Far-red-enriched-adult_P Parameter: Light Value: Far-red enriched vs. White
  misc_feature: MA Experiment 20001773 PARAMETER Experiment Name: At_Far-red-enriched-adult_P Parameter: Organism Value: A. thaliana
  misc_feature: MA Experiment 20001773 PARAMETER Experiment Name: At_Far-red-enriched-adult_P Parameter: Plant Line Value: Columbia
  misc_feature: MA Experiment 20001773 PARAMETER Experiment Name: At_Far-red-enriched-adult_P Parameter: Timepoint (hr) Value: 48
  misc_feature: MA Experiment 20001773 PARAMETER Experiment Name: At_Far-red-enriched-adult_P Parameter: Tissue Value: Aerial
tcatcaatacaaacttagtagtgtattctttatacgtataataacatcccttgtgatcaaacaagtaaaccattcaaaagatgaaaggaagaattttgattttgagtttgctcataatgagtctggtcatggcacaagttcaagtagaagcaaagatctgctgcccttccaaccaagctagaaatggctatagtgtatgccgtataaggttttccaagggaaggtgtatgcaagtgagtggatgccaaaactctgatacatgccctcgaggttgggtaaacgccattctcgaaaactcagctgatgctaccaatgagcactgcaagttagggtgtgaaacttctgtgtgtggtgccatgaacactctccagaactctgatgcaagtgaaattgtgaatggagcgtcggaacaatgtgccaagggatgttctattttctgtaccaagagctatgtagtcccacctgggccgcctaaactgttgtaatggtcgtatatgtgaaaaaacaaatgctagactcttgctattctggtttgtgtgtgtgtgtgtgcatgtgtcgtagaaggtttgttcgatcactagattgtacatgccctctacttcctataacctaaataaagagttaaacgtacgtgtcttttat

SEQ ID NO: 105287 - protein, 134 aa, Arabidopsis thaliana; identical to SEQ ID NO: 36079
  peptide (1)..(134): Ceres Seq. ID no. 13616881
  misc_feature (25)..(67): Pfam Name: Plant thionin Pfam Description: Plant thionin
  misc_feature (1)..(134): Homolog of NCBI NO: 18410037 NR Description: thionin (THI2.1) [Arabidopsis thaliana] thionin >gi|19423934|gb|AAL87264.1| putative thionin protein
  misc_feature (13)..(134): Homolog of NCBI NO: 21554677 NR Description: thionin [Arabidopsis thaliana]
  misc_feature (17)..(134): Homolog of NCBI NO: 25294219 NR Description: thionin, 63255-62748 [imported] - Arabidopsis
  misc_feature (1)..(122): Homolog of NCBI NO: 15218931 NR Description: thionin, putative [Arabidopsis thaliana]
  misc_feature (1)..(121): Homolog of NCBI NO: 1181533 NR Description: thionin >gi|1586834|prf||2204399B thionin
  misc_feature (1)..(121): Homolog of NCBI NO: 15239447 NR Description: thionin (THI2.2) [Arabidopsis thaliana]
  misc_feature (1)..(121): Homolog of NCBI NO: 21553588 NR Description: thionin Thi2.2 [Arabidopsis thaliana]
  misc_feature (1)..(122): Homolog of NCBI NO: 1076466 NR Description: thionin variant Thi2Ca2 - Abyssinian crambe crambin precursor=thionin variant Thi2Ca2 [Crambe abyssinica,
  misc_feature (1)..(122): Homolog of NCBI NO: 1076463 NR Description: thionin variant Thi2Ca10 - Abyssinian crambe crambin precursor=thionin variant Thi2Ca10 [Crambe abyssinica,
  misc_feature (1)..(122): Homolog of NCBI NO: 1076464 NR Description: thionin variant Thi2Ca11 - Abyssinian crambe

SEQ ID NO: 105288 - protein, 122 aa, Arabidopsis thaliana; identical to SEQ ID NO: 36080
  peptide (1)..(122): Ceres Seq. ID no. 13616882
  misc_feature (13)..(55): Pfam Name: Plant thionin Pfam Description: Plant thionin
  misc_feature (1)..(122): Homolog of NCBI NO: 18410037 NR Description: thionin (THI2.1) [Arabidopsis thaliana] thionin >gi|19423934|gb|AAL87264.1| putative thionin protein
  misc_feature (1)..(122): Homolog of NCBI NO: 21554677 NR Description: thionin [Arabidopsis thaliana]
  misc_feature (5)..(122): Homolog of NCBI NO: 25294219 NR Description: thionin, 63255-62748 [imported] - Arabidopsis
  misc_feature (1)..(110): Homolog of NCBI NO: 15218931 NR Description: thionin, putative [Arabidopsis thaliana]
  misc_feature (1)..(109): Homolog of NCBI NO: 1181533 NR Description: thionin >gi|1586834|prf||2204399B thionin
  misc_feature (1)..(109): Homolog of NCBI NO: 15239447 NR Description: thionin (THI2.2) [Arabidopsis thaliana]
  misc_feature (1)..(109): Homolog of NCBI NO: 21553588 NR Description: thionin Thi2.2 [Arabidopsis thaliana]
  misc_feature (1)..(110): Homolog of NCBI NO: 1076466 NR Description: thionin variant Thi2Ca2 - Abyssinian crambe crambin precursor=thionin variant Thi2Ca2 [Crambe abyssinica,
  misc_feature (1)..(110): Homolog of NCBI NO: 1076463 NR Description: thionin variant Thi2Ca10 - Abyssinian crambe crambin precursor=thionin variant Thi2Ca10 [Crambe abyssinica,
  misc_feature (1)..(110): Homolog of NCBI NO: 1076464 NR Description: thionin variant Thi2Ca11 - Abyssinian crambe

SEQ ID NO: 105289 - protein, 118 aa, Arabidopsis thaliana; identical to SEQ ID NO: 36081
  peptide (1)..(118): Ceres Seq. ID no. 13616883
  misc_feature (9)..(51): Pfam Name: Plant thionin Pfam Description: Plant thionin
  misc_feature (1)..(118): Homolog of NCBI NO: 18410037 NR Description: thionin (THI2.1) [Arabidopsis thaliana] thionin >gi|19423934|gb|AAL87264.1| putative thionin protein
  misc_feature (1)..(118): Homolog of NCBI NO: 21554677 NR Description: thionin [Arabidopsis thaliana]
  misc_feature (1)..(118): Homolog of NCBI NO: 25294219 NR Description: thionin, 63255-62748 [imported] - Arabidopsis
  misc_feature (1)..(106): Homolog of NCBI NO: 15218931 NR Description: thionin, putative [Arabidopsis thaliana]
  misc_feature (1)..(105): Homolog of NCBI NO: 1181533 NR Description: thionin >gi|1586834|prf||2204399B thionin
  misc_feature (1)..(105): Homolog of NCBI NO: 15239447 NR Description: thionin (THI2.2) [Arabidopsis thaliana]
  misc_feature (1)..(105): Homolog of NCBI NO: 21553588 NR Description: thionin Thi2.2 [Arabidopsis thaliana]
  misc_feature (1)..(106): Homolog of NCBI NO: 1076466 NR Description: thionin variant Thi2Ca2 - Abyssinian crambe crambin precursor=thionin variant Thi2Ca2 [Crambe abyssinica,
  misc_feature (1)..(106): Homolog of NCBI NO: 1076463 NR Description: thionin variant Thi2Ca10 - Abyssinian crambe crambin precursor=thionin variant Thi2Ca10 [Crambe abyssinica,
  misc_feature (1)..(106): Homolog of NCBI NO: 1076464 NR Description: thionin variant Thi2Ca11 - Abyssinian crambe

SEQ ID NO: 105290 - DNA, 1135 bp, Arabidopsis thaliana
  misc_feature (1)..(1135): Ceres Seq. ID no. 13616890
  misc_feature: MA Experiment ID: 108434 Result: Down-regulated in Transcription
  misc_feature: MA Experiment 108434 PARAMETER Experiment Name: At_Root_Tips_cDNA_P Parameter: Tissue Value: Root Tips
  misc_feature: MA Experiment ID: 108461 Result: Up-regulated in Transcription
  misc_feature: MA Experiment 108461 PARAMETER Experiment Name: At_Germinating_Seeds_cDNA_P Parameter: Age (day) Value: 1 vs. 0
  misc_feature: MA Experiment 108461 PARAMETER Experiment Name: At_Germinating_Seeds_cDNA_P Parameter: Tissue Value: Germinating Seeds
  misc_feature: MA Experiment ID: 108462 Result: Up-regulated in Transcription
  misc_feature: MA Experiment 108462 PARAMETER Experiment Name: At_Germinating_Seeds_cDNA_P Parameter: Age (day) Value: 2 vs. 0
  misc_feature: MA Experiment 108462 PARAMETER Experiment Name: At_Germinating_Seeds_cDNA_P Parameter: Tissue Value: Germinating Seeds
  misc_feature: MA Experiment ID: 108463 Result: Up-regulated in Transcription
  misc_feature: MA Experiment 108463 PARAMETER Experiment Name: At_Germinating_Seeds_cDNA_P Parameter: Age (day) Value: 3 vs. 0
  misc_feature: MA Experiment 108463 PARAMETER Experiment Name: At_Germinating_Seeds_cDNA_P Parameter: Tissue Value: Germinating Seeds
  misc_feature: MA Experiment ID: 108464 Result: Up-regulated in Transcription
  misc_feature: MA Experiment 108464 PARAMETER Experiment Name: At_Germinating_Seeds_cDNA_P Parameter: Age (day) Value: 4 vs. 0
  misc_feature: MA Experiment 108464 PARAMETER Experiment Name: At_Germinating_Seeds_cDNA_P Parameter: Tissue Value: Germinating Seeds
  misc_feature: MA Experiment ID: 108561 Result: Up-regulated in Transcription
  misc_feature: MA Experiment 108561 PARAMETER Experiment Name: At_100uM_ABA_cDNA_P Parameter: Timepoint (hr) Value: 6
  misc_feature: MA Experiment 108561 PARAMETER Experiment Name: At_100uM_ABA_cDNA_P Parameter: Tissue Value: Aerial
  misc_feature: MA Experiment 108561 PARAMETER Experiment Name: At_100uM_ABA_cDNA_P Parameter: Treatment Value: 100uM ABA vs. No Treatment
  misc_feature: MA Experiment ID: 108573 Result: Down-regulated in Transcription
  misc_feature: MA Experiment 108573 PARAMETER Experiment Name: At_Drought_cDNA_P Parameter: Timepoint (hr) Value: 6
  misc_feature: MA Experiment 108573 PARAMETER Experiment Name: At_Drought_cDNA_P Parameter: Tissue Value: Aerial
  misc_feature: MA Experiment 108573 PARAMETER Experiment Name: At_Drought_cDNA_P Parameter: Treatment Value: Drought vs. No Drought
  misc_feature: MA Experiment ID: 108574 Result: Up-regulated in Transcription
  misc_feature: MA Experiment 108574 PARAMETER Experiment Name: At_Wounding__cDNA_P Parameter: Timepoint (hr) Value: 1
  misc_feature: MA Experiment 108574 PARAMETER Experiment Name: At_Wounding__cDNA_P Parameter: Tissue Value: Aerial
  misc_feature: MA Experiment 108574 PARAMETER Experiment Name: At_Wounding__cDNA_P Parameter: Treatment Value: Wounding vs. No Wounding
  misc_feature: MA Experiment ID: 108579 Result: Down-regulated in Transcription
  misc_feature: MA Experiment 108579 PARAMETER Experiment Name: At_4deg_Cold_cDNA_P Parameter: Temperature (deg C) Value: 4 vs. 22
  misc_feature: MA Experiment 108579 PARAMETER Experiment Name: At_4deg_Cold_cDNA_P Parameter: Timepoint (hr) Value: 6
  misc_feature: MA Experiment 108579 PARAMETER Experiment Name: At_4deg_Cold_cDNA_P Parameter: Tissue Value: Aerial
  misc_feature: MA Experiment ID: 108595 Result: Up-regulated in Transcription
  misc_feature: MA Experiment 108595 PARAMETER Experiment Name: At_Ler-pi_Ovule_cDNA_P Parameter: Plant Line Value: null
  misc_feature: MA Experiment ID: 108607 Result: Up-regulated in Transcription
  misc_feature: MA Experiment 108607 PARAMETER Experiment Name: At_100uM_ABA_cDNA_P Parameter: Timepoint (hr) Value: 4
  misc_feature: MA Experiment 108607 PARAMETER Experiment Name: At_100uM_ABA_cDNA_P Parameter: Tissue Value: Aerial
  misc_feature: MA Experiment 108607 PARAMETER Experiment Name: At_100uM_ABA_cDNA_P Parameter: Treatment Value: 100uM ABA vs. No Treatment
  misc_feature: MA Experiment ID: 20000071 Result: Up-regulated in Transcription
  misc_feature: MA Experiment 20000071 PARAMETER Experiment Name: At_100uM_ABA_Mutants_cDNA_P Parameter: Plant Line Value: CS8104
  misc_feature: MA Experiment 20000071 PARAMETER Experiment Name: At_100uM_ABA_Mutants_cDNA_P Parameter: Timepoint (hr) Value: 6
  misc_feature: MA Experiment 20000071 PARAMETER Experiment Name: At_100uM_ABA_Mutants_cDNA_P Parameter: Tissue Value: Aerial
  misc_feature: MA Experiment 20000071 PARAMETER Experiment Name: At_100uM_ABA_Mutants_cDNA_P Parameter: Treatment Value: 100uM ABA vs. No Treatment
  misc_feature: MA Experiment ID: 20000072 Result: Up-regulated in Transcription
  misc_feature: MA Experiment 20000072 PARAMETER Experiment Name: At_100uM_ABA_Mutants_cDNA_P Parameter: Plant Line Value: CS8105
  misc_feature: MA Experiment 20000072 PARAMETER Experiment Name: At_100uM_ABA_Mutants_cDNA_P Parameter: Timepoint (hr) Value: 6
  misc_feature: MA Experiment 20000072 PARAMETER Experiment Name: At_100uM_ABA_Mutants_cDNA_P Parameter: Tissue Value: Aerial
  misc_feature: MA Experiment 20000072 PARAMETER Experiment Name: At_100uM_ABA_Mutants_cDNA_P Parameter: Treatment Value: 100uM ABA vs. No Treatment
  misc_feature: MA Experiment ID: 20000087 Result: Up-regulated in Transcription
  misc_feature: MA Experiment 20000087 PARAMETER Experiment Name: At_100uM_ABA_Mutants_cDNA_P Parameter: Plant Line Value: WS
  misc_feature: MA Experiment 20000087 PARAMETER Experiment Name: At_100uM_ABA_Mutants_cDNA_P Parameter: Timepoint (hr) Value: 6
  misc_feature: MA Experiment 20000087 PARAMETER Experiment Name: At_100uM_ABA_Mutants_cDNA_P Parameter: Tissue Value: Aerial
  misc_feature: MA Experiment 20000087 PARAMETER Experiment Name: At_100uM_ABA_Mutants_cDNA_P Parameter: Treatment Value: 100uM ABA vs. No Treatment
  misc_feature: MA Experiment ID: 20000111 Result: Down-regulated in Transcription
  misc_feature: MA Experiment 20000111 PARAMETER Experiment Name: At_42deg_Heat_cDNA_P Parameter: Temperature (deg C) Value: 42 vs. 22
  misc_feature: MA Experiment 20000111 PARAMETER Experiment Name: At_42deg_Heat_cDNA_P Parameter: Timepoint (hr) Value: 6
  misc_feature: MA Experiment 20000111 PARAMETER Experiment Name: At_42deg_Heat_cDNA_P Parameter: Tissue Value: Aerial
  misc_feature: MA Experiment ID: 20000169 Result: Up-regulated in Transcription
  misc_feature: MA Experiment 20000169 PARAMETER Experiment Name: At_100uM_ABA_P Parameter: Age (day) Value: 14
  misc_feature: MA Experiment 20000169 PARAMETER Experiment Name: At_100uM_ABA_P Parameter: Organism Value: A. thaliana
  misc_feature: MA Experiment 20000169 PARAMETER Experiment Name: At_100uM_ABA_P Parameter: Plant Line Value: WS
  misc_feature: MA Experiment 20000169 PARAMETER Experiment Name: At_100uM_ABA_P Parameter: Timepoint (hr) Value: 6
  misc_feature: MA Experiment 20000169 PARAMETER Experiment Name: At_100uM_ABA_P Parameter: Tissue Value: Aerial
  misc_feature: MA Experiment 20000169 PARAMETER Experiment Name: At_100uM_ABA_P Parameter: Treatment Value: 100uM ABA vs. No Treatment
  misc_feature: MA Experiment ID: 20000173 Result: Down-regulated in Transcription
  misc_feature: MA Experiment 20000173 PARAMETER Experiment Name: At_42deg_Heat_P Parameter: Age (day) Value: 14
  misc_feature: MA Experiment 20000173 PARAMETER Experiment Name: At_42deg_Heat_P Parameter: Organism Value: A. thaliana
  misc_feature: MA Experiment 20000173 PARAMETER Experiment Name: At_42deg_Heat_P Parameter: Plant Line Value: WS
  misc_feature: MA Experiment 20000173 PARAMETER Experiment Name: At_42deg_Heat_P Parameter: Temperature (deg C) Value: 42 vs. 22
  misc_feature: MA Experiment 20000173 PARAMETER Experiment Name: At_42deg_Heat_P Parameter: Timepoint (hr) Value: 6
  misc_feature: MA Experiment 20000173 PARAMETER Experiment Name: At_42deg_Heat_P Parameter: Tissue Value: Aerial
  misc_feature: MA Experiment ID: 20000179 Result: Up-regulated in Transcription
  misc_feature: MA Experiment 20000179 PARAMETER Experiment Name: At_Germinating_Seeds_P Parameter: Age (hr) Value: 6 vs. 0
  misc_feature: MA Experiment 20000179 PARAMETER Experiment Name: At_Germinating_Seeds_P Parameter: Tissue Value: Germinating Seeds
  misc_feature: MA Experiment ID: 20000180 Result: Up-regulated in Transcription
  misc_feature: MA Experiment 20000180 PARAMETER Experiment Name: At_Germinating_Seeds_P Parameter: Age (hr) Value: 24 vs. 0
  misc_feature: MA Experiment 20000180 PARAMETER Experiment Name: At_Germinating_Seeds_P Parameter: Tissue Value: Germinating Seeds
  misc_feature: MA Experiment ID: 20000227 Result: Down-regulated in Transcription
  misc_feature: MA Experiment 20000227 PARAMETER Experiment Name: At_Root-Tips-vs-Tops_P Parameter: Tissue Value: Root Tips vs. Root Tops
  misc_feature: MA Experiment ID: 20000234 Result: Down-regulated in Transcription
  misc_feature: MA Experiment 20000234 PARAMETER Experiment Name: At_Siliques_P Parameter: Age (day) Value: 21
  misc_feature: MA Experiment 20000234 PARAMETER Experiment Name: At_Siliques_P Parameter: Organism Value: A. thaliana
  misc_feature: MA Experiment 20000234 PARAMETER Experiment Name: At_Siliques_P Parameter: Plant Line Value: WS
  misc_feature: MA Experiment 20000234 PARAMETER Experiment Name: At_Siliques_P Parameter: Tissue Value: Less Than 5mm Siliques vs. Whole Plant
  misc_feature: MA Experiment ID: 20000265 Result: Down-regulated in Transcription
  misc_feature: MA Experiment 20000265 PARAMETER Experiment Name: At_Open_Flower_P Parameter: Age (day) Value: 21
  misc_feature: MA Experiment 20000265 PARAMETER Experiment Name: At_Open_Flower_P Parameter: Plant Line Value: WS
  misc_feature: MA Experiment 20000265 PARAMETER Experiment Name: At_Open_Flower_P Parameter: Tissue Value: Closed Flower vs. Whole Plant
  misc_feature: MA Experiment ID: 20000439 Result: Up-regulated in Transcription
  misc_feature: MA Experiment 20000439 PARAMETER Experiment Name: At_Roots__P Parameter: Age (day) Value: 14 vs. 21
  misc_feature: MA Experiment 20000439 PARAMETER Experiment Name: At_Roots__P Parameter: Organism Value: A. thaliana
  misc_feature: MA Experiment 20000439 PARAMETER Experiment Name: At_Roots__P Parameter: Tissue Value: Roots vs. Whole Plant
  misc_feature: MA Experiment ID: 20001247 Result: Down-regulated in Transcription
  misc_feature: MA Experiment 20001247 PARAMETER Experiment Name: At_Far-red-induction_P Parameter: Age (day) Value: 7
  misc_feature: MA Experiment 20001247 PARAMETER Experiment Name: At_Far-red-induction_P Parameter: Light Value: Far-red vs. White
  misc_feature: MA Experiment 20001247 PARAMETER Experiment Name: At_Far-red-induction_P Parameter: Organism Value: A. thaliana
  misc_feature: MA Experiment 20001247 PARAMETER Experiment Name: At_Far-red-induction_P Parameter: Plant Line Value: Columbia
  misc_feature: MA Experiment 20001247 PARAMETER Experiment Name: At_Far-red-induction_P Parameter: Timepoint (hr) Value: 1
  misc_feature: MA Experiment 20001247 PARAMETER Experiment Name: At_Far-red-induction_P Parameter: Tissue Value: Whole Plant
  misc_feature: MA Experiment ID: 20001248 Result: Down-regulated in Transcription
  misc_feature: MA Experiment 20001248 PARAMETER Experiment Name: At_Far-red-induction_P Parameter: Age (day) Value: 7
  misc_feature: MA Experiment 20001248 PARAMETER Experiment Name: At_Far-red-induction_P Parameter: Light Value: Far-red vs. White
  misc_feature: MA Experiment 20001248 PARAMETER Experiment Name: At_Far-red-induction_P Parameter: Organism Value: A. thaliana
  misc_feature: MA Experiment 20001248 PARAMETER Experiment Name: At_Far-red-induction_P Parameter: Plant Line Value: Columbia
  misc_feature: MA Experiment 20001248 PARAMETER Experiment Name: At_Far-red-induction_P Parameter: Timepoint (hr) Value: 4
  misc_feature: MA Experiment 20001248 PARAMETER Experiment Name: At_Far-red-induction_P Parameter: Tissue Value: Whole Plant
  misc_feature: MA Experiment ID: 20001557 Result: Down-regulated in Transcription
  misc_feature: MA Experiment 20001557 PARAMETER Experiment Name: At_Drought_Soil_Dry_P Parameter: Age (day) Value: 27
  misc_feature: MA Experiment 20001557 PARAMETER Experiment Name: At_Drought_Soil_Dry_P Parameter: Organism Value: A. thaliana
  misc_feature: MA Experiment 20001557 PARAMETER Experiment Name: At_Drought_Soil_Dry_P Parameter: Plant Line Value: WS
  misc_feature: MA Experiment 20001557 PARAMETER Experiment Name: At_Drought_Soil_Dry_P Parameter: Post Timepoint (hr) Value: 3
  misc_feature: MA Experiment 20001557 PARAMETER Experiment Name: At_Drought_Soil_Dry_P Parameter: Post-Treatment Value: Re-Water vs. No Drought
  misc_feature: MA Experiment 20001557 PARAMETER Experiment Name: At_Drought_Soil_Dry_P Parameter: Timepoint (day) Value: 13
  misc_feature: MA Experiment 20001557 PARAMETER Experiment Name: At_Drought_Soil_Dry_P Parameter: Treatment Value: Drought vs. No Drought
  misc_feature: MA Experiment ID: 20001558 Result: Down-regulated in Transcription
  misc_feature: MA Experiment 20001558 PARAMETER Experiment Name: At_Drought_Soil_Dry_P Parameter: Age (day) Value: 27
  misc_feature: MA Experiment 20001558 PARAMETER Experiment Name: At_Drought_Soil_Dry_P Parameter: Organism Value: A. thaliana
  misc_feature: MA Experiment 20001558 PARAMETER Experiment Name: At_Drought_Soil_Dry_P Parameter: Plant Line Value: WS
  misc_feature: MA Experiment 20001558 PARAMETER Experiment Name: At_Drought_Soil_Dry_P Parameter: Post Timepoint (hr) Value: 6
  misc_feature: MA Experiment 20001558 PARAMETER Experiment Name: At_Drought_Soil_Dry_P Parameter: Post-Treatment Value: Re-Water vs. No Drought
  misc_feature: MA Experiment 20001558 PARAMETER Experiment Name: At_Drought_Soil_Dry_P Parameter: Timepoint (day) Value: 13
  misc_feature: MA Experiment 20001558 PARAMETER Experiment Name: At_Drought_Soil_Dry_P Parameter: Treatment Value: Drought vs. No Drought
  misc_feature: MA Experiment ID: 20001911 Result: Down-regulated in Transcription
  misc_feature: MA Experiment 20001911 PARAMETER Experiment Name: At_Drought_Reproduction_P Parameter: Age (day) Value: 40
  misc_feature: MA Experiment 20001911 PARAMETER Experiment Name: At_Drought_Reproduction_P Parameter: Organism Value: A. thaliana
  misc_feature: MA Experiment 20001911 PARAMETER Experiment Name: At_Drought_Reproduction_P Parameter: Plant Line Value: WS
  misc_feature: MA Experiment 20001911 PARAMETER Experiment Name: At_Drought_Reproduction_P Parameter: Timepoint (day) Value: 10
  misc_feature: MA Experiment 20001911 PARAMETER Experiment Name: At_Drought_Reproduction_P Parameter: Tissue Value: Flowers
  misc_feature: MA Experiment 20001911 PARAMETER Experiment Name: At_Drought_Reproduction_P Parameter: Treatment Value: Drought vs. No Drought
actacatcttctctctcttcttcgctcattctctcttcctcatatatttccaaaacaatacctttcttcttctctcttcagaagaaacgagagattcgagtgatgttttatgaactactactagtgtttttttccgtgaagtaaagagaaacggtaactttttctatttgttttcaagaaaagccaaagaaaaaaagaatttttaatatactctgttttttgcaatgattttgttttgtgaaatttttctcggagaagaaagtaatttagaagacggagagtggcaaaacgaaatataaaaaaaaaagttttcaatttcttttaagaaaaaaaaagctttttcccttcttaaaacccttcctctgtttcagaaacagagacataagaagaaaatagatcacaagctaattgcgttctcttctcttcttcttctactgggttttaaaatcaagaaaccatgtctgcgagtgttctaagtgatccaacaatgctaatttcaacaccggaggtaatactcgtctctccggtatcggttactcaaatctccggagatgagccagattcggtgacgtgtgattgttgcggattaaccgaggagtgtacccaatcgtacatagagatggtcagagagcgttacatggggaaatggatctgtggactttgttctgaagctgtgaagtatgaagtcatgagaacgaaaagattgttaacgacagaggaagctatggccagacacatgaacatgtgtaataagttcaaatcctcaagcccaccaccgaatccgacaggacatttgatctctgccatgagacagatcttgagaaaaagcttagattcaccaagaatgcttagatctatgcctaatagtccatctaaagacgaccaagatcatcatcatgattgtgtttctaatgttttgtctaggtctgatagctgtttcgctagtttgacttgaaaaaagctcatcgttgaaaaaattgttttaaaccgtcggtttagggacccacttggatcaaatccggttttctgatttgaaattttcgtcggtaaatcaaaaattggtttctgtatgtgtttttgccggatttgttgttgtacttttggaaaattttgggctaaaagaataatttggtgc

SEQ ID NO: 105291 - protein, 165 aa, Arabidopsis thaliana
  peptide (1)..(165): Ceres Seq. ID no. 13616891
  misc_feature (1)..(165): Homolog of NCBI NO: 15218503 NR Description: expressed protein [Arabidopsis thaliana]
  misc_feature (1)..(165): Homolog of NCBI NO: 15226673 NR Description: hypothetical protein [Arabidopsis thaliana]
  misc_feature (35)..(165): Homolog of NCBI NO: 15242032 NR Description: expressed protein [Arabidopsis thaliana]
  misc_feature (36)..(165): Homolog of NCBI NO: 21554329 NR Description: unknown [Arabidopsis thaliana]
  misc_feature (37)..(141): Homolog of NCBI NO: 23237920 NR Description: hypothetical protein~predicted by FGENESH etc.
  misc_feature (33)..(123): Homolog of NCBI NO: 15228776 NR Description: hypothetical protein [Arabidopsis thaliana] gb|AAF09050.1~gene_id:F16J14.10~similar to unknown protein
  misc_feature (24)..(165): Homolog of NCBI NO: 30695655 NR Description: expressed protein [Arabidopsis thaliana]
  misc_feature (24)..(165): Homolog of NCBI NO: 25405692 NR Description: F15I1.18 [imported] - Arabidopsis thaliana
  misc_feature (5)..(124): Homolog of NCBI NO: 34909436 NR Description: OSJNBa0014K08.12 [Oryza sativa (japonica
  misc_feature (35)..(165): Homolog of NCBI NO: 34903632 NR Description: B1046G12.23 [Oryza sativa (japonica
MSASVLSDPTMLISTPEVILVSPVSVTQISGDEPDSVTCDCCGLTEECTQSYIEMVRERYMGKWICGLCSEAVKYEVMRTKRLLTTEEAMARHMNMCNKFKSSSPPPNPTGHLISAMRQILRKSLDSPRMLRSMPNSPSKDDQDHHHDCVSNVLSRSDSCFASLT

SEQ ID NO: 105292 - protein, 155 aa, Arabidopsis thaliana
  peptide (1)..(155): Ceres Seq. ID no. 13616892
  misc_feature (1)..(155): Homolog of NCBI NO: 15218503 NR Description: expressed protein [Arabidopsis thaliana]
  misc_feature (1)..(155): Homolog of NCBI NO: 15226673 NR Description: hypothetical protein [Arabidopsis thaliana]
  misc_feature (25)..(155): Homolog of NCBI NO: 15242032 NR Description: expressed protein [Arabidopsis thaliana]
  misc_feature (26)..(155): Homolog of NCBI NO: 21554329 NR Description: unknown [Arabidopsis thaliana]
  misc_feature (27)..(131): Homolog of NCBI NO: 23237920 NR Description: hypothetical protein~predicted by FGENESH etc.
  misc_feature (23)..(113): Homolog of NCBI NO: 15228776 NR Description: hypothetical protein [Arabidopsis thaliana] gb|AAF09050.1~gene_id:F16J14.10~similar to unknown protein
  misc_feature (14)..(155): Homolog of NCBI NO: 30695655 NR Description: expressed protein [Arabidopsis thaliana]
  misc_feature (14)..(155): Homolog of NCBI NO: 25405692 NR Description: F15I1.18 [imported] - Arabidopsis thaliana
  misc_feature (1)..(114): Homolog of NCBI NO: 34909436 NR Description: OSJNBa0014K08.12 [Oryza sativa (japonica
  misc_feature (25)..(155): Homolog of NCBI NO: 34903632 NR Description: B1046G12.23 [Oryza sativa (japonica
MLISTPEVILVSPVSVTQISGDEPDSVTCDCCGLTEECTQSYIEMVRERYMGKWICGLCSEAVKYEVMRTKRLLTTEEAMARHMNMCNKFKSSSPPPNPTGHLISAMRQILRKSLDSPRMLRSMPNSPSKDDQDHHHDCVSNVLSRSDSCFASLT

SEQ ID NO: 105293 - protein, 111 aa, Arabidopsis thaliana
  peptide (1)..(111): Ceres Seq. ID no. 13616893
  misc_feature (1)..(111): Homolog of NCBI NO: 15218503 NR Description: expressed protein [Arabidopsis thaliana]
  misc_feature (1)..(111): Homolog of NCBI NO: 15226673 NR Description: hypothetical protein [Arabidopsis thaliana]
  misc_feature (1)..(111): Homolog of NCBI NO: 15242032 NR Description: expressed protein [Arabidopsis thaliana]
  misc_feature (1)..(111): Homolog of NCBI NO: 21554329 NR Description: unknown [Arabidopsis thaliana]
  misc_feature (1)..(87): Homolog of NCBI NO: 23237920 NR Description: hypothetical protein~predicted by FGENESH etc.
  misc_feature (1)..(69): Homolog of NCBI NO: 15228776 NR Description: hypothetical protein [Arabidopsis thaliana] gb|AAF09050.1~gene_id:F16J14.10~similar to unknown protein
  misc_feature (1)..(111): Homolog of NCBI NO: 30695655 NR Description: expressed protein [Arabidopsis thaliana]
  misc_feature (1)..(111): Homolog of NCBI NO: 25405692 NR Description: F15I1.18 [imported] - Arabidopsis thaliana
  misc_feature (1)..(70): Homolog of NCBI NO: 34909436 NR Description: OSJNBa0014K08.12 [Oryza sativa (japonica
  misc_feature (1)..(111): Homolog of NCBI NO: 34903632 NR Description: B1046G12.23 [Oryza sativa (japonica
MVRERYMGKWICGLCSEAVKYEVMRTKRLLTTEEAMARHMNMCNKFKSSSPPPNPTGHLISAMRQILRKSLDSPRMLRSMPNSPSKDDQDHHHDCVSNVLSRSDSCFASLT

SEQ ID NO: 105294 - DNA, 1307 bp, Arabidopsis thaliana
  misc_feature (1)..(1307): Ceres Seq. ID no. 13616898
  misc_feature: MA Experiment ID: 108461 Result: Down-regulated in Transcription
  misc_feature: MA Experiment 108461 PARAMETER Experiment Name: At_Germinating_Seeds_cDNA_P Parameter: Age (day) Value: 1 vs. 0
  misc_feature: MA Experiment 108461 PARAMETER Experiment Name: At_Germinating_Seeds_cDNA_P Parameter: Tissue Value: Germinating Seeds
  misc_feature: MA Experiment ID: 108463 Result: Up-regulated in Transcription
  misc_feature: MA Experiment 108463 PARAMETER Experiment Name: At_Germinating_Seeds_cDNA_P Parameter: Age (day) Value: 3 vs. 0
  misc_feature: MA Experiment 108463 PARAMETER Experiment Name: At_Germinating_Seeds_cDNA_P Parameter: Tissue Value: Germinating Seeds
  misc_feature: MA Experiment ID: 108469 Result: Up-regulated in Transcription
  misc_feature: MA Experiment ID: 108561 Result: Up-regulated in Transcription
  misc_feature: MA Experiment 108561 PARAMETER Experiment Name: At_100uM_ABA_cDNA_P Parameter: Timepoint (hr) Value: 6
  misc_feature: MA Experiment 108561 PARAMETER Experiment Name: At_100uM_ABA_cDNA_P Parameter: Tissue Value: Aerial
  misc_feature: MA Experiment 108561 PARAMETER Experiment Name: At_100uM_ABA_cDNA_P Parameter: Treatment Value: 100uM ABA vs. No Treatment
  misc_feature: MA Experiment ID: 108573 Result: Up-regulated in Transcription
  misc_feature: MA Experiment 108573 PARAMETER Experiment Name: At_Drought_cDNA_P Parameter: Timepoint (hr) Value: 6
  misc_feature: MA Experiment 108573 PARAMETER Experiment Name: At_Drought_cDNA_P Parameter: Tissue Value: Aerial
  misc_feature: MA Experiment 108573 PARAMETER Experiment Name: At_Drought_cDNA_P Parameter: Treatment Value: Drought vs. No Drought
  misc_feature: MA Experiment ID: 108579 Result: Down-regulated in Transcription
  misc_feature: MA Experiment 108579 PARAMETER Experiment Name: At_4deg_Cold_cDNA_P Parameter: Temperature (deg C) Value: 4 vs. 22
  misc_feature: MA Experiment 108579 PARAMETER Experiment Name: At_4deg_Cold_cDNA_P Parameter: Timepoint (hr) Value: 6
  misc_feature: MA Experiment 108579 PARAMETER Experiment Name: At_4deg_Cold_cDNA_P Parameter: Tissue Value: Aerial
  misc_feature: MA Experiment ID: 108607 Result: Up-regulated in Transcription
  misc_feature: MA Experiment 108607 PARAMETER Experiment Name: At_100uM_ABA_cDNA_P Parameter: Timepoint (hr) Value: 4
  misc_feature: MA Experiment 108607 PARAMETER Experiment Name: At_100uM_ABA_cDNA_P Parameter: Tissue Value: Aerial
  misc_feature: MA Experiment 108607 PARAMETER Experiment Name: At_100uM_ABA_cDNA_P Parameter: Treatment Value: 100uM ABA vs. No Treatment
  misc_feature: MA Experiment ID: 20000069 Result: Up-regulated in Transcription
  misc_feature: MA Experiment 20000069 PARAMETER Experiment Name: At_100uM_ABA_Mutants_cDNA_P Parameter: Plant Line Value: CS23
  misc_feature: MA Experiment 20000069 PARAMETER Experiment Name: At_100uM_ABA_Mutants_cDNA_P Parameter: Timepoint (hr) Value: 6
  misc_feature: MA Experiment 20000069 PARAMETER Experiment Name: At_100uM_ABA_Mutants_cDNA_P Parameter: Tissue Value: Aerial
  misc_feature: MA Experiment 20000069 PARAMETER Experiment Name: At_100uM_ABA_Mutants_cDNA_P Parameter: Treatment Value: 100uM ABA vs. No Treatment
  misc_feature: MA Experiment ID: 20000070 Result: Up-regulated in Transcription
  misc_feature: MA Experiment 20000070 PARAMETER Experiment Name: At_100uM_ABA_Mutants_cDNA_P Parameter: Plant Line Value: CS24
  misc_feature: MA Experiment 20000070 PARAMETER Experiment Name: At_100uM_ABA_Mutants_cDNA_P Parameter: Timepoint (hr) Value: 6
  misc_feature: MA Experiment 20000070 PARAMETER Experiment Name: At_100uM_ABA_Mutants_cDNA_P Parameter: Tissue Value: Aerial
  misc_feature: MA Experiment 20000070 PARAMETER Experiment Name: At_100uM_ABA_Mutants_cDNA_P Parameter: Treatment Value: 100uM ABA vs. No Treatment
  misc_feature: MA Experiment ID: 20000071 Result: Up-regulated in Transcription
  misc_feature: MA Experiment 20000071 PARAMETER Experiment Name: At_100uM_ABA_Mutants_cDNA_P Parameter: Plant Line Value: CS8104
  misc_feature: MA Experiment 20000071 PARAMETER Experiment Name: At_100uM_ABA_Mutants_cDNA_P Parameter: Timepoint (hr) Value: 6
  misc_feature: MA Experiment 20000071 PARAMETER Experiment Name: At_100uM_ABA_Mutants_cDNA_P Parameter: Tissue Value: Aerial
  misc_feature: MA Experiment 20000071 PARAMETER Experiment Name: At_100uM_ABA_Mutants_cDNA_P Parameter: Treatment Value: 100uM ABA vs. No Treatment
  misc_feature: MA Experiment ID: 20000072 Result: Up-regulated in Transcription
  misc_feature: MA Experiment 20000072 PARAMETER Experiment Name: At_100uM_ABA_Mutants_cDNA_P Parameter: Plant Line Value: CS8105
  misc_feature: MA Experiment 20000072 PARAMETER Experiment Name: At_100uM_ABA_Mutants_cDNA_P Parameter: Timepoint (hr) Value: 6
  misc_feature: MA Experiment 20000072 PARAMETER Experiment Name: At_100uM_ABA_Mutants_cDNA_P Parameter: Tissue Value: Aerial
  misc_feature: MA Experiment 20000072 PARAMETER Experiment Name: At_100uM_ABA_Mutants_cDNA_P Parameter: Treatment Value: 100uM ABA vs. No Treatment
  misc_feature: MA Experiment ID: 20000086 Result: Up-regulated in Transcription
  misc_feature: MA Experiment 20000086 PARAMETER Experiment Name: At_100uM_ABA_Mutants_cDNA_P Parameter: Plant Line Value: CS22
  misc_feature: MA Experiment 20000086 PARAMETER Experiment Name: At_100uM_ABA_Mutants_cDNA_P Parameter: Timepoint (hr) Value: 6
  misc_feature: MA Experiment 20000086 PARAMETER Experiment Name: At_100uM_ABA_Mutants_cDNA_P Parameter: Tissue Value: Aerial
  misc_feature: MA Experiment 20000086 PARAMETER Experiment Name: At_100uM_ABA_Mutants_cDNA_P Parameter: Treatment Value: 100uM ABA vs. No Treatment
  misc_feature: MA Experiment ID: 20000087 Result: Up-regulated in Transcription
  misc_feature: MA Experiment 20000087 PARAMETER Experiment Name: At_100uM_ABA_Mutants_cDNA_P Parameter: Plant Line Value: WS
  misc_feature: MA Experiment 20000087 PARAMETER Experiment Name: At_100uM_ABA_Mutants_cDNA_P Parameter: Timepoint (hr) Value: 6
  misc_feature: MA Experiment 20000087 PARAMETER Experiment Name: At_100uM_ABA_Mutants_cDNA_P Parameter: Tissue Value: Aerial
  misc_feature: MA Experiment 20000087 PARAMETER Experiment Name: At_100uM_ABA_Mutants_cDNA_P Parameter: Treatment Value: 100uM ABA vs. No Treatment
  misc_feature: MA Experiment ID: 20000088 Result: Up-regulated in Transcription
  misc_feature: MA Experiment 20000088 PARAMETER Experiment Name: At_100uM_ABA_Mutants_cDNA_P Parameter: Plant Line Value: Landsberg
  misc_feature: MA Experiment 20000088 PARAMETER Experiment Name: At_100uM_ABA_Mutants_cDNA_P Parameter: Timepoint (hr) Value: 6
  misc_feature: MA Experiment 20000088 PARAMETER Experiment Name: At_100uM_ABA_Mutants_cDNA_P Parameter: Tissue Value: Aerial
  misc_feature: MA Experiment 20000088 PARAMETER Experiment Name: At_100uM_ABA_Mutants_cDNA_P Parameter: Treatment Value: 100uM ABA vs. No Treatment
  misc_feature: MA Experiment ID: 20000089 Result: Up-regulated in Transcription
  misc_feature: MA Experiment ID: 20000090 Result: Up-regulated in Transcription
  misc_feature: MA Experiment ID: 20000111 Result: Down-regulated in Transcription
  misc_feature: MA Experiment 20000111 PARAMETER Experiment Name: At_42deg_Heat_cDNA_P Parameter: Temperature (deg C) Value: 42 vs. 22
  misc_feature: MA Experiment 20000111 PARAMETER Experiment Name: At_42deg_Heat_cDNA_P Parameter: Timepoint (hr) Value: 6
  misc_feature: MA Experiment 20000111 PARAMETER Experiment Name: At_42deg_Heat_cDNA_P Parameter: Tissue Value: Aerial
  misc_feature: MA Experiment ID: 20000113 Result: Down-regulated in Transcription
  misc_feature: MA Experiment 20000113 PARAMETER Experiment Name: At_42deg_Heat_cDNA_P Parameter: Temperature (deg C) Value: 42 vs. 22
  misc_feature: MA Experiment 20000113 PARAMETER Experiment Name: At_42deg_Heat_cDNA_P Parameter: Timepoint (hr) Value: 8
  misc_feature: MA Experiment 20000113 PARAMETER Experiment Name: At_42deg_Heat_cDNA_P Parameter: Tissue Value: Aerial
  misc_feature: MA Experiment ID: 20000117 Result: Up-regulated in Transcription
  misc_feature: MA Experiment 20000117 PARAMETER Experiment Name: At_100uM_ABA_Mutants_cDNA_P Parameter: Plant Line Value: Columbia
  misc_feature: MA Experiment 20000117 PARAMETER Experiment Name: At_100uM_ABA_Mutants_cDNA_P Parameter: Timepoint (hr) Value: 6
  misc_feature: MA Experiment 20000117 PARAMETER Experiment Name: At_100uM_ABA_Mutants_cDNA_P Parameter: Tissue Value: Aerial
  misc_feature: MA Experiment 20000117 PARAMETER Experiment Name: At_100uM_ABA_Mutants_cDNA_P Parameter: Treatment Value: 100uM ABA vs. No Treatment
  misc_feature: MA Experiment ID: 20000166 Result: Up-regulated in Transcription
  misc_feature: MA Experiment 20000166 PARAMETER Experiment Name: At_100uM_ABA_P Parameter: Age (day) Value: 14
  misc_feature: MA Experiment 20000166 PARAMETER Experiment Name: At_100uM_ABA_P Parameter: Organism Value: A. thaliana
  misc_feature: MA Experiment 20000166 PARAMETER Experiment Name: At_100uM_ABA_P Parameter: Plant Line Value: WS
  misc_feature: MA Experiment 20000166 PARAMETER Experiment Name: At_100uM_ABA_P Parameter: Timepoint (hr) Value: 1
  misc_feature: MA Experiment 20000166 PARAMETER Experiment Name: At_100uM_ABA_P Parameter: Tissue Value: Aerial
  misc_feature: MA Experiment 20000166 PARAMETER Experiment Name: At_100uM_ABA_P Parameter: Treatment Value: 100uM ABA vs. No Treatment
  misc_feature: MA Experiment ID: 20000173 Result: Down-regulated in Transcription
  misc_feature: MA Experiment 20000173 PARAMETER Experiment Name: At_42deg_Heat_P Parameter: Age (day) Value: 14
  misc_feature: MA Experiment 20000173 PARAMETER Experiment Name: At_42deg_Heat_P Parameter: Organism Value: A. thaliana
  misc_feature: MA Experiment 20000173 PARAMETER Experiment Name: At_42deg_Heat_P Parameter: Plant Line Value: WS
  misc_feature: MA Experiment 20000173 PARAMETER Experiment Name: At_42deg_Heat_P Parameter: Temperature (deg C) Value: 42 vs. 22
  misc_feature: MA Experiment 20000173 PARAMETER Experiment Name: At_42deg_Heat_P Parameter: Timepoint (hr) Value: 6
  misc_feature: MA Experiment 20000173 PARAMETER Experiment Name: At_42deg_Heat_P Parameter: Tissue Value: Aerial
  misc_feature: MA Experiment ID: 20000179 Result: Down-regulated in Transcription
  misc_feature: MA Experiment 20000179 PARAMETER Experiment Name: At_Germinating_Seeds_P Parameter: Age (hr) Value: 6 vs. 0
  misc_feature: MA Experiment 20000179 PARAMETER Experiment Name: At_Germinating_Seeds_P Parameter: Tissue Value: Germinating Seeds
  misc_feature: MA Experiment ID: 20000184 Result: Down-regulated in Transcription
  misc_feature: MA Experiment 20000184 PARAMETER Experiment Name: At_Shoots__P Parameter: Age (day) Value: 7
  misc_feature: MA Experiment 20000184 PARAMETER Experiment Name: At_Shoots__P Parameter: Tissue Value: Shoots vs. Whole Plant
  misc_feature: MA Experiment ID: 20000224 Result: Up-regulated in Transcription
  misc_feature: MA Experiment ID: 20000234 Result: Down-regulated in Transcription
  misc_feature: MA Experiment 20000234 PARAMETER Experiment Name: At_Siliques_P Parameter: Age (day) Value: 21
  misc_feature: MA Experiment 20000234 PARAMETER Experiment Name: At_Siliques_P Parameter: Organism Value: A. thaliana
  misc_feature: MA Experiment 20000234 PARAMETER Experiment Name: At_Siliques_P Parameter: Plant Line Value: WS
  misc_feature: MA Experiment 20000234 PARAMETER Experiment Name: At_Siliques_P Parameter: Tissue Value: Less Than 5mm Siliques vs. Whole Plant
  misc_feature: MA Experiment ID: 20000235 Result: Down-regulated in Transcription
  misc_feature: MA Experiment 20000235 PARAMETER Experiment Name: At_Siliques_P Parameter: Age (day) Value: 21
  misc_feature: MA Experiment 20000235 PARAMETER Experiment Name: At_Siliques_P Parameter: Organism Value: A. thaliana
  misc_feature: MA Experiment 20000235 PARAMETER Experiment Name: At_Siliques_P Parameter: Plant Line Value: WS
  misc_feature: MA Experiment 20000235 PARAMETER Experiment Name: At_Siliques_P Parameter: Tissue Value: 5-10mm Siliques vs. Whole Plant
  misc_feature: MA Experiment ID: 20000286 Result: Down-regulated in Transcription
  misc_feature: MA Experiment 20000286 PARAMETER Experiment Name: At_Open_Flower_P Parameter: Age (day) Value: 21
  misc_feature: MA Experiment 20000286 PARAMETER Experiment Name: At_Open_Flower_P Parameter: Plant Line Value: WS
  misc_feature: MA Experiment 20000286 PARAMETER Experiment Name: At_Open_Flower_P Parameter: Tissue Value: Half Open vs. Whole Plant
  misc_feature: MA Experiment ID: 20000437 Result: Up-regulated in Transcription
  misc_feature: MA Experiment 20000437 PARAMETER Experiment Name: At_Drought_P Parameter: Age (day) Value: 8
  misc_feature: MA Experiment 20000437 PARAMETER Experiment Name: At_Drought_P Parameter: Organism Value: A. thaliana
  misc_feature: MA Experiment 20000437 PARAMETER Experiment Name: At_Drought_P Parameter: Plant Line Value: WS
  misc_feature: MA Experiment 20000437 PARAMETER Experiment Name: At_Drought_P Parameter: Timepoint (hr) Value: 24
  misc_feature: MA Experiment 20000437 PARAMETER Experiment Name: At_Drought_P Parameter: Tissue Value: Whole Plant
  misc_feature: MA Experiment 20000437 PARAMETER Experiment Name: At_Drought_P Parameter: Treatment Value: Drought vs. No Drought
  misc_feature: MA Experiment ID: 20001911 Result: Up-regulated in Transcription
  misc_feature: MA Experiment 20001911 PARAMETER Experiment Name: At_Drought_Reproduction_P Parameter: Age (day) Value: 40
  misc_feature: MA Experiment 20001911 PARAMETER Experiment Name: At_Drought_Reproduction_P Parameter: Organism Value: A. thaliana
  misc_feature: MA Experiment 20001911 PARAMETER Experiment Name: At_Drought_Reproduction_P Parameter: Plant Line Value: WS
  misc_feature: MA Experiment 20001911 PARAMETER Experiment Name: At_Drought_Reproduction_P Parameter: Timepoint (day) Value: 10
  misc_feature: MA Experiment 20001911 PARAMETER Experiment Name: At_Drought_Reproduction_P Parameter: Tissue Value: Flowers
  misc_feature: MA Experiment 20001911 PARAMETER Experiment Name: At_Drought_Reproduction_P Parameter: Treatment Value: Drought vs. No Drought
aaaattgattactctgttttggttttggatcagatcaaccaaaggaagcgaagaagaagaagactttatacactctcgacgctattgatttcgtctgtgcagttttgtttctctatcagttagttttaaagatgagttcttcagagagtgtggaaaacgagtgcatgtgttgggctgcaagagatccatctggtcttctttctcctcatactatcactcgcaggtctgttacaactgacgatgtttcactcacaatcactcattgtggagtgtgttacgctgatgttatctggagtagaaaccaacatggagactccaagtaccctttggttcctgggcatgagattgctggaatagtgactaaggttgggcctaatgttcaacgattcaaagttggagaccatgttggtgttggaacgtatgttaactcctgcagggagtgtgaatattgtaatgaaggacaagaagttaattgtgcgaaaggagtttttactttcaatggcattgatcatgatggctctgttactaaaggaggctactctagtcacattgttgttcatgaaaggtactgctacaagatacctgtggactatcccttggaatcagctgcaccattactctgtgctggaatcacggtttatgctcctatgatgcgtcacaatatgaatcaacctggtaaatctcttggggtgatcgggctaggtggtcttggacacatggcggttaagtttggcaaggcttttggacttagtgttacggtttttagcaccagcatttccaagaaagaagaagctttgaatctgctaggagctgagaatttcgttatctcatctgaccatgaccagatgaaggcactagagaaatctctagactttctagttgacacagcatctggtgatcacgcgtttgatccttacatgtctctcttgaagattgctggaacttatgtattggttggtttcccaagtgaaattaaaatcagtcctgccaatctcaatcttggtatgagaatgctcgctggaagtgtaaccggggggaccaaaataacacagcaaatgttagatttctgtgcagctcataagatttatccaaacatagaggtgattcccattcaaaagataaacgaagctctcgaaagagtggtgaagaaggacatcaagtaccgtttcgtgattgacatcaagaactccctcaaatagatgttgctcaaaggaaggaataatggagtctgtaataagagaataatactcactgctacaatctttattacgtattttctcgtttttcattagtaaagcaaataaatt

SEQ ID NO: 105295 - protein, 355 aa, Arabidopsis thaliana; identical to SEQ ID NO: 23334
  peptide (1)..(355): Ceres Seq. ID no. 13616899
  misc_feature (1)..(355): Homolog of NCBI NO: 15218564 NR Description: cinnamyl-alcohol dehydrogenase (CAD), putative
  misc_feature (3)..(355): Homolog of NCBI NO: 37532016 NR Description: putative cinnamyl alcohol dehydrogenase [Oryza
  misc_feature (1)..(354): Homolog of NCBI NO: 22475166 NR Description: putative sinapyl alcohol dehydrogenase [Populus
  misc_feature (14)..(354): Homolog of NCBI NO: 3913193 NR Description: Probable mannitol dehydrogenase 1 (NAD-dependent
  misc_feature (14)..(353): Homolog of NCBI NO: 10720088 NR Description: Probable mannitol dehydrogenase (NAD-dependent
  misc_feature (15)..(354): Homolog of NCBI NO: 19849248 NR Description: cinnamyl alcohol dehydrogenase [Lolium perenne]
  misc_feature (1)..(353): Homolog of NCBI NO: 10719915 NR Description: Cinnamyl-alcohol dehydrogenase 2 (CAD 2)
  misc_feature (1)..(353): Homolog of NCBI NO: 584872 NR Description: Cinnamyl-alcohol dehydrogenase 7/8 (CAD 7/8)
  misc_feature (14)..(355): Homolog of NCBI NO: 38344562 NR Description: OSJNBa0065B15.8 [Oryza sativa (japonica
  misc_feature (1)..(355): Homolog of NCBI NO: 33519154 NR Description: 10-hydroxygeraniol oxidoreductase [Camptotheca

SEQ ID NO: 105296 - protein, 344 aa, Arabidopsis thaliana; identical to SEQ ID NO: 23335
  peptide (1)..(344): Ceres Seq. ID no. 13616900
  misc_feature (1)..(344): Homolog of NCBI NO: 15218564 NR Description: cinnamyl-alcohol dehydrogenase (CAD), putative
  misc_feature (1)..(344): Homolog of NCBI NO: 37532016 NR Description: putative cinnamyl alcohol dehydrogenase [Oryza
  misc_feature (1)..(343): Homolog of NCBI NO: 22475166 NR Description: putative sinapyl alcohol dehydrogenase [Populus
  misc_feature (3)..(343): Homolog of NCBI NO: 3913193 NR Description: Probable mannitol dehydrogenase 1 (NAD-dependent
  misc_feature (3)..(342): Homolog of NCBI NO: 10720088 NR Description: Probable mannitol dehydrogenase (NAD-dependent
  misc_feature (4)..(343): Homolog of NCBI NO: 19849248 NR Description: cinnamyl alcohol dehydrogenase [Lolium perenne]
  misc_feature (1)..(342): Homolog of NCBI NO: 10719915 NR Description: Cinnamyl-alcohol dehydrogenase 2 (CAD 2)
  misc_feature (1)..(342): Homolog of NCBI NO: 584872 NR Description: Cinnamyl-alcohol dehydrogenase 7/8 (CAD 7/8)
  misc_feature (3)..(344): Homolog of NCBI NO: 38344562 NR Description: OSJNBa0065B15.8 [Oryza sativa (japonica
  misc_feature (1)..(344): Homolog of NCBI NO: 33519154 NR Description: 10-hydroxygeraniol oxidoreductase [Camptotheca

SEQ ID NO: 105297 - protein, 183 aa, Arabidopsis thaliana; identical to SEQ ID NO: 23336
  peptide (1)..(183): Ceres Seq. ID no. 13616901
  misc_feature (1)..(183): Homolog of NCBI NO: 15218564 NR Description: cinnamyl-alcohol dehydrogenase (CAD), putative
  misc_feature (1)..(183): Homolog of NCBI NO: 37532016 NR Description: putative cinnamyl alcohol dehydrogenase [Oryza
  misc_feature (1)..(182): Homolog of NCBI NO: 22475166 NR Description: putative sinapyl alcohol dehydrogenase [Populus
  misc_feature (1)..(182): Homolog of NCBI NO: 3913193 NR Description: Probable mannitol dehydrogenase 1 (NAD-dependent
  misc_feature (1)..(181): Homolog of NCBI NO: 10720088 NR Description: Probable mannitol dehydrogenase (NAD-dependent
  misc_feature (1)..(182): Homolog of NCBI NO: 19849248 NR Description: cinnamyl alcohol dehydrogenase [Lolium perenne]
  misc_feature (1)..(181): Homolog of NCBI NO: 10719915 NR Description: Cinnamyl-alcohol dehydrogenase 2 (CAD 2)
  misc_feature (1)..(181): Homolog of NCBI NO: 584872 NR Description: Cinnamyl-alcohol dehydrogenase 7/8 (CAD 7/8)
  misc_feature (1)..(183): Homolog of NCBI NO: 38344562 NR Description: OSJNBa0065B15.8 [Oryza sativa (japonica
  misc_feature (1)..(183): Homolog of NCBI NO: 33519154 NR Description: 10-hydroxygeraniol oxidoreductase [Camptotheca

SEQ ID NO: 105298 - DNA, 953 bp, Arabidopsis thaliana
  misc_feature (1)..(953): Ceres Seq. ID no. 13616906
  misc_feature: MA Experiment ID: 108434 Result: Down-regulated in Transcription
  misc_feature: MA Experiment 108434 PARAMETER Experiment Name: At_Root_Tips_cDNA_P Parameter: Tissue Value: Root Tips
  misc_feature: MA Experiment ID: 108435 Result: Down-regulated in Transcription
  misc_feature: MA Experiment 108435 PARAMETER Experiment Name: At_stm_Mutants_cDNA_P Parameter: Plant Line Value: wt Landsburg vs stm
  misc_feature: MA Experiment 108435 PARAMETER Experiment Name: At_stm_Mutants_cDNA_P Parameter: Tissue Value: Shoot Apical Meristem Region
  misc_feature: MA Experiment ID: 108488 Result: Down-regulated in Transcription
  misc_feature: MA Experiment ID: 20000069 Result: Up-regulated in Transcription
  misc_feature: MA Experiment 20000069 PARAMETER Experiment Name: At_100uM_ABA_Mutants_cDNA_P Parameter: Plant Line Value: CS23
  misc_feature: MA Experiment 20000069 PARAMETER Experiment Name: At_100uM_ABA_Mutants_cDNA_P Parameter: Timepoint (hr) Value: 6
  misc_feature: MA Experiment 20000069 PARAMETER Experiment Name: At_100uM_ABA_Mutants_cDNA_P Parameter: Tissue Value: Aerial
  misc_feature: MA Experiment 20000069 PARAMETER Experiment Name: At_100uM_ABA_Mutants_cDNA_P Parameter: Treatment Value: 100uM ABA vs. No Treatment
  misc_feature: MA Experiment ID: 20000072 Result: Up-regulated in Transcription
  misc_feature: MA Experiment 20000072 PARAMETER Experiment Name: At_100uM_ABA_Mutants_cDNA_P Parameter: Plant Line Value: CS8105
  misc_feature: MA Experiment 20000072 PARAMETER Experiment Name: At_100uM_ABA_Mutants_cDNA_P Parameter: Timepoint (hr) Value: 6
  misc_feature: MA Experiment 20000072 PARAMETER Experiment Name: At_100uM_ABA_Mutants_cDNA_P Parameter: Tissue Value: Aerial
  misc_feature: MA Experiment 20000072 PARAMETER Experiment Name: At_100uM_ABA_Mutants_cDNA_P Parameter: Treatment Value: 100uM ABA vs. No Treatment
  misc_feature: MA Experiment ID: 20000184 Result: Down-regulated in Transcription
  misc_feature: MA Experiment 20000184 PARAMETER Experiment Name: At_Shoots__P Parameter: Age (day) Value: 7
  misc_feature: MA Experiment 20000184 PARAMETER Experiment Name: At_Shoots__P Parameter: Tissue Value: Shoots vs. Whole Plant
  misc_feature: MA Experiment ID: 20000224 Result: Down-regulated in Transcription
  misc_feature: MA Experiment ID: 20000227 Result: Down-regulated in Transcription
  misc_feature: MA Experiment 20000227 PARAMETER Experiment Name: At_Root-Tips-vs-Tops_P Parameter: Tissue Value: Root Tips vs. Root Tops
  misc_feature: MA Experiment ID: 20000234 Result: Down-regulated in Transcription
  misc_feature: MA Experiment 20000234 PARAMETER Experiment Name: At_Siliques_P Parameter: Age (day) Value: 21
  misc_feature: MA Experiment 20000234 PARAMETER Experiment Name: At_Siliques_P Parameter: Organism Value: A. thaliana
  misc_feature: MA Experiment 20000234 PARAMETER Experiment Name: At_Siliques_P Parameter: Plant Line Value: WS
  misc_feature: MA Experiment 20000234 PARAMETER Experiment Name: At_Siliques_P Parameter: Tissue Value: Less Than 5mm Siliques vs. Whole Plant
atcaacgcgtcgagatattttccccaaatacagagaaaccctaaagtctctgtttttgagaatttttctaccgatagatccaagcgaattgatctagaggaattgatccaacatgggtaacacagataagctgatgaatcagatattcgatttgaaatttacgtcaaagtctctgcaaaggcaatcaaggaagtgtgagaaggaagagaaagcagagaaattgaaggtgaagaaggctatcgagaagggtaatatggatggtgctcggatctacgctgagaacgccattcgtaagcgtagcgagcagatgaactatctccgtctcgcttctcgccttgacgctgttgttgctcgtcttgatactcaggctaagatgaccaccatcaccaaatccatgaccaatatcgtcaaatcccttgagtcttctcttgccacagggaatctacagaagatgtcagagacaatggattcattcgagaagcagtttgtgaacatggaggtccaagctgagttcatggagaatgctatggctggttcaacttcattgtccactccagaaggcgaagtcaacagccttatgcagcaggtggcagatgactatggtttggaagtctctgtggggcttcctcagcctgctggtcatgccattcctactaagactgaggagaaagtcgatgaggatgatttgtcgaggaggcttgcggagcttaaagccagaggataaatgcgctaaccaacattcatgcttggattacctgccactttgcatgcgatccttatcgaattgttgcttctattatccgcaaacacgggcgtatttgtgtatattgctcactttgaaatatgctttgtttataactttatataaaaaaccttcgtgtgtttttagtttttaccatttgaatgatatgctttccttttgagttgttcattaaagagtgttttgctcagtc

SEQ ID NO: 105299 - protein, 203 aa, Arabidopsis thaliana; identical to SEQ ID NO: 41284
  peptide (1)..(203): Ceres Seq. ID no. 13616907
  misc_feature (9)..(179): Pfam Name: SNF7 Pfam Description: SNF7
  misc_feature (1)..(203): Homolog of NCBI NO: 18410249 NR Description: developmental protein DG1118 -related
  misc_feature (1)..(203): Homolog of NCBI NO: 21537090 NR Description: developmental protein, putative [Arabidopsis
  misc_feature (1)..(203): Homolog of NCBI NO: 15220819 NR Description: developmental protein -related [Arabidopsis >gi|21553734|gb|AAM62827.1| developmental protein, putative thaliana] >gi|26451738|dbj|BAC42964.1| unknown protein
  misc_feature (1)..(202): Homolog of NCBI NO: 25518422 NR Description: hypothetical protein F11A6.7 - Arabidopsis >gi|9802746|gb|AAF99815.1|AC034257_7 Similar to developmental
  misc_feature (1)..(203): Homolog of NCBI NO: 28916459 NR Description: putative developmental protein [Nicotiana
  misc_feature (1)..(203): Homolog of NCBI NO: 30270581 NR Description: superal1 [Zea mays]
  misc_feature (1)..(203): Homolog of NCBI NO: 29367557 NR Description: development protein-like protein [Oryza sativa
  misc_feature (9)..(202): Homolog of NCBI NO: 3789911 NR Description: developmental protein DG1118 [Dictyostelium
  misc_feature (11)..(200): Homolog of NCBI NO: 28277870 NR Description: Similar to RIKEN cDNA 2810405I11 gene [Danio
  misc_feature (11)..(200): Homolog of NCBI NO: 9885435 NR Description: CHMP1.5 [Homo sapiens]

SEQ ID NO: 105300 - protein, 196 aa, Arabidopsis thaliana; identical to SEQ ID NO: 41285
  peptide (1)..(196): Ceres Seq. ID no. 13616908
  misc_feature (2)..(172): Pfam Name: SNF7 Pfam Description: SNF7
  misc_feature (1)..(196): Homolog of NCBI NO: 18410249 NR Description: developmental protein DG1118 -related
  misc_feature (1)..(196): Homolog of NCBI NO: 21537090 NR Description: developmental protein, putative [Arabidopsis
  misc_feature (1)..(196): Homolog of NCBI NO: 15220819 NR Description: developmental protein -related [Arabidopsis >gi|21553734|gb|AAM62827.1| developmental protein, putative thaliana] >gi|26451738|dbj|BAC42964.1| unknown protein
  misc_feature (1)..(195): Homolog of NCBI NO: 25518422 NR Description: hypothetical protein F11A6.7 - Arabidopsis >gi|9802746|gb|AAF99815.1|AC034257_7 Similar to developmental
  misc_feature (1)..(196): Homolog of NCBI NO: 28916459 NR Description: putative developmental protein [Nicotiana
  misc_feature (1)..(196): Homolog of NCBI NO: 30270581 NR Description: superal1 [Zea mays]
  misc_feature (1)..(196): Homolog of NCBI NO: 29367557 NR Description: development protein-like protein [Oryza sativa
  misc_feature (2)..(195): Homolog of NCBI NO: 3789911 NR Description: developmental protein DG1118 [Dictyostelium
  misc_feature (4)..(193): Homolog of NCBI NO: 28277870 NR Description: Similar to RIKEN cDNA 2810405I11 gene [Danio
  misc_feature (4)..(193): Homolog of NCBI NO: 9885435 NR Description: CHMP1.5 [Homo sapiens]

SEQ ID NO: 105301 - protein, 156 aa, Arabidopsis thaliana; identical to SEQ ID NO: 41286
  peptide (1)..(156): Ceres Seq. ID no. 13616909
  misc_feature (1)..(132): Pfam Name: SNF7 Pfam Description: SNF7
  misc_feature (1)..(156): Homolog of NCBI NO: 18410249 NR Description: developmental protein DG1118 -related
  misc_feature (1)..(156): Homolog of NCBI NO: 21537090 NR Description: developmental protein, putative [Arabidopsis
  misc_feature (1)..(156): Homolog of NCBI NO: 15220819 NR Description: developmental protein -related [Arabidopsis >gi|21553734|gb|AAM62827.1| developmental protein, putative thaliana] >gi|26451738|dbj|BAC42964.1| unknown protein
  misc_feature (1)..(155): Homolog of NCBI NO: 25518422 NR Description: hypothetical protein F11A6.7 - Arabidopsis >gi|9802746|gb|AAF99815.1|AC034257_7 Similar to developmental
  misc_feature (1)..(156): Homolog of NCBI NO: 28916459 NR Description: putative developmental protein [Nicotiana
  misc_feature (1)..(156): Homolog of NCBI NO: 30270581 NR Description: superal1 [Zea mays]
  misc_feature (1)..(156): Homolog of NCBI NO: 29367557 NR Description: development protein-like protein [Oryza sativa
  misc_feature (1)..(155): Homolog of NCBI NO: 3789911 NR Description: developmental protein DG1118 [Dictyostelium
  misc_feature (1)..(153): Homolog of NCBI NO: 28277870 NR Description: Similar to RIKEN cDNA 2810405I11 gene [Danio
  misc_feature (1)..(153): Homolog of NCBI NO: 9885435 NR Description: CHMP1.5 [Homo sapiens]

SEQ ID NO: 105302 - DNA, 1005 bp, Arabidopsis thaliana
  misc_feature (1)..(1005): Ceres Seq. ID no. 13616934
  misc_feature: MA Experiment ID: 20000794 Result: Down-regulated in Transcription
  misc_feature: MA Experiment 20000794 PARAMETER Experiment Name: At_Petals_P Parameter: Age (day) Value: 23-25 days
  misc_feature: MA Experiment 20000794 PARAMETER Experiment Name: At_Petals_P Parameter: Plant Line Value: WS
  misc_feature: MA Experiment 20000794 PARAMETER Experiment Name: At_Petals_P Parameter: Tissue Value: Petals vs. Whole plant
aatcaaatctctgagctttcagatatactctgatagagaagaagaagaagaagaagagatcagctgagcaacaatggccaccgcgatacctctcttcgcctctttcaagtatgccgatagtctcaccgtcgttggaatctctttctgcacggcgttggtctgcgaagcaatctcatggatcctaatctatcgcacaagctcttacaaatcgttgaaatcttccattgacaaagcctctaagaagcttgagacgatgaagacagataatccttcctcgaagctaacaaacaagaaatcgaagacgaagaagatagatcgcgttgaatccagcttaaaggaatcgagcagagatctatcactcttcaagtttaaatctggtgccgttgtggctttggttctctttgtcgtgtttggattgttgaattcgcttttcgaagggaaagtggtagcgaagcttccgtttcatccgattacgattgtgaggaagatgagtcatagaggattgaaaggcgatgattccactgattgttccatggcttttctttatctgctttgttctattagtataaggactaatctgcagaagttcttgggtttctctccacctagaggagctgctggtgctggtggtttgttcccaatgcctgatccaaagaccaattgatcaggtttgatctgatgatgaattggattctggattcttagctcgttgttactctgaaattttcatagataacttcaatgctctgatgtagtggtgttgttttcagttcgtttgatgagaaacactttcaaagtttcgagttttgagttttcttctagtatgaggtttggatttggatcccttaacatgatctactccttttcaaattcagtcttgattattgtgtgttcaagtccttttcatatgctttgacatctttctaatcatttgtacaccaaaaggcttgagttttcatgcgtatggattgtttggagactgaaatgagaggttagtgaaagatg

SEQ ID NO: 105303 - protein, 196 aa, Arabidopsis thaliana; identical to SEQ ID NO: 34750
  peptide (1)..(196): Ceres Seq. ID no. 13616935
  misc_feature (1)..(196): Homolog of NCBI NO: 15240119 NR Description: expressed protein [Arabidopsis thaliana] dbj|BAA86974.1~gene_id:F15M7.19~similar to unknown protein thaliana] >gi|14532446|gb|AAK63951.1| AT5g06660/F15M7_19
  misc_feature (1)..(196): Homolog of NCBI NO: 21554161 NR Description: unknown [Arabidopsis thaliana]
  misc_feature (1)..(196): Homolog of NCBI NO: 18399454 NR Description: expressed protein [Arabidopsis thaliana]
  misc_feature (1)..(196): Homolog of NCBI NO: 21553820 NR Description: unknown [Arabidopsis thaliana]
  misc_feature (10)..(193): Homolog of NCBI NO: 3283893 NR Description: unknown [Homo sapiens]
  misc_feature (10)..(193): Homolog of NCBI NO: 23956188 NR Description: RIKEN cDNA 1190006A08 [Mus musculus] putative membrane protein [Homo sapiens] membrane protein [Homo sapiens]
  misc_feature (14)..(182): Homolog of NCBI NO: 39587169 NR Description: Hypothetical protein CBG00622 [Caenorhabditis
  misc_feature (5)..(191): Homolog of NCBI NO: 31238723 NR Description: ENSANGP00000016559 [Anopheles gambiae]
  misc_feature (13)..(191): Homolog of NCBI NO: 24585112 NR Description: CG10470-PA [Drosophila melanogaster]
  misc_feature (19)..(193): Homolog of NCBI NO: 33328806 NR Description: meg-2-like protein [Rattus norvegicus]

SEQ ID NO: 105304 - protein, 136 aa, Arabidopsis thaliana; identical to SEQ ID NO: 34751
  peptide (1)..(136): Ceres Seq. ID no. 13616936
  misc_feature (1)..(136): Homolog of NCBI NO: 15240119 NR Description: expressed protein [Arabidopsis thaliana] dbj|BAA86974.1~gene_id:F15M7.19~similar to unknown protein thaliana] >gi|14532446|gb|AAK63951.1| AT5g06660/F15M7_19
  misc_feature (1)..(136): Homolog of NCBI NO: 21554161 NR Description: unknown [Arabidopsis thaliana]
  misc_feature (1)..(136): Homolog of NCBI NO: 18399454 NR Description: expressed protein [Arabidopsis thaliana]
  misc_feature (1)..(136): Homolog of NCBI NO: 21553820 NR Description: unknown [Arabidopsis thaliana]
  misc_feature (1)..(133): Homolog of NCBI NO: 3283893 NR Description: unknown [Homo sapiens]
  misc_feature (1)..(133): Homolog of NCBI NO: 23956188 NR Description: RIKEN cDNA 1190006A08 [Mus musculus] putative membrane protein [Homo sapiens] membrane protein [Homo sapiens]
  misc_feature (1)..(122): Homolog of NCBI NO: 39587169 NR Description: Hypothetical protein CBG00622 [Caenorhabditis
  misc_feature (1)..(131): Homolog of NCBI NO: 31238723 NR Description: ENSANGP00000016559 [Anopheles gambiae]
  misc_feature (1)..(131): Homolog of NCBI NO: 24585112 NR Description: CG10470-PA [Drosophila melanogaster]
  misc_feature (1)..(133): Homolog of NCBI NO: 33328806 NR Description: meg-2-like protein [Rattus norvegicus]

SEQ ID NO: 105305 - DNA, 1294 bp, Arabidopsis thaliana
  misc_feature (1)..(1294): Ceres Seq. ID no. 13616941
  misc_feature: MA Experiment ID: 108434 Result: Down-regulated in Transcription
  misc_feature: MA Experiment 108434 PARAMETER Experiment Name: At_Root_Tips_cDNA_P Parameter: Tissue Value: Root Tips
  misc_feature: MA Experiment ID: 108594 Result: Up-regulated in Transcription
  misc_feature: MA Experiment 108594 PARAMETER Experiment Name: At_Ler-rhl_Root_cDNA_P Parameter: Plant Line Value: null
  misc_feature: MA Experiment ID: 20000184 Result: Down-regulated in Transcription
  misc_feature: MA Experiment 20000184 PARAMETER Experiment Name: At_Shoots__P Parameter: Age (day) Value: 7
  misc_feature: MA Experiment 20000184 PARAMETER Experiment Name: At_Shoots__P Parameter: Tissue Value: Shoots vs. Whole Plant
  misc_feature: MA Experiment ID: 20000185 Result: Down-regulated in Transcription
  misc_feature: MA Experiment 20000185 PARAMETER Experiment Name: At_Roots__P Parameter: Age (day) Value: 7 vs. 21
  misc_feature: MA Experiment 20000185 PARAMETER Experiment Name: At_Roots__P Parameter: Organism Value: A. thaliana
  misc_feature: MA Experiment 20000185 PARAMETER Experiment Name: At_Roots__P Parameter: Tissue Value: Roots vs. Whole Plant
  misc_feature: MA Experiment ID: 20000227 Result: Down-regulated in Transcription
  misc_feature: MA Experiment 20000227 PARAMETER Experiment Name: At_Root-Tips-vs-Tops_P Parameter: Tissue Value: Root Tips vs. Root Tops
  misc_feature: MA Experiment ID: 20000265 Result: Down-regulated in Transcription
  misc_feature: MA Experiment 20000265 PARAMETER Experiment Name: At_Open_Flower_P Parameter: Age (day) Value: 21
  misc_feature: MA Experiment 20000265 PARAMETER Experiment Name: At_Open_Flower_P Parameter: Plant Line Value: WS
  misc_feature: MA Experiment 20000265 PARAMETER Experiment Name: At_Open_Flower_P Parameter: Tissue Value: Closed Flower vs. Whole Plant
  misc_feature: MA Experiment ID: 20000438 Result: Down-regulated in Transcription
  misc_feature: MA Experiment 20000438 PARAMETER Experiment Name: At_Shoots__P Parameter: Age (day) Value: 14
  misc_feature: MA Experiment 20000438 PARAMETER Experiment Name: At_Shoots__P Parameter: Tissue Value: Shoots vs. Whole Plant
  misc_feature: MA Experiment ID: 20000439 Result: Down-regulated in Transcription
  misc_feature: MA Experiment 20000439 PARAMETER Experiment Name: At_Roots__P Parameter: Age (day) Value: 14 vs. 21
  misc_feature: MA Experiment 20000439 PARAMETER Experiment Name: At_Roots__P Parameter: Organism Value: A. thaliana
  misc_feature: MA Experiment 20000439 PARAMETER Experiment Name: At_Roots__P Parameter: Tissue Value: Roots vs. Whole Plant
  misc_feature: MA Experiment ID: 20000451 Result: Up-regulated in Transcription
  misc_feature: MA Experiment 20000451 PARAMETER Experiment Name: At_CS6879_Shoots-Roots_P Parameter: Age (day) Value: 14
  misc_feature: MA Experiment 20000451 PARAMETER Experiment Name: At_CS6879_Shoots-Roots_P Parameter: Organism Value: A. thaliana
  misc_feature: MA Experiment 20000451 PARAMETER Experiment Name: At_CS6879_Shoots-Roots_P Parameter: Plant Line Value: CS6879 vs. WS
  misc_feature: MA Experiment 20000451 PARAMETER Experiment Name: At_CS6879_Shoots-Roots_P Parameter: Tissue Value: Roots
  misc_feature: MA Experiment ID: 20000495 Result: Up-regulated in Transcription
  misc_feature: MA Experiment 20000495 PARAMETER Experiment Name: At_Guard_Cells_P Parameter: Harvest Date Value: 8/2/2002
  misc_feature: MA Experiment 20000495 PARAMETER Experiment Name: At_Guard_Cells_P Parameter: Organism Value: A. thaliana
  misc_feature: MA Experiment 20000495 PARAMETER Experiment Name: At_Guard_Cells_P Parameter: Tissue Value: Guard Cells vs. Leaves
  misc_feature: MA Experiment ID: 20000527 Result: Down-regulated in Transcription
  misc_feature: MA Experiment 20000527 PARAMETER Experiment Name: At_10percent_PEG_P Parameter: Age (day) Value: 20
  misc_feature: MA Experiment 20000527 PARAMETER Experiment Name: At_10percent_PEG_P Parameter: Organism Value: A. thaliana
  misc_feature: MA Experiment 20000527 PARAMETER Experiment Name: At_10percent_PEG_P Parameter: Plant Line Value: WS
  misc_feature: MA Experiment 20000527 PARAMETER Experiment Name: At_10percent_PEG_P Parameter: Timepoint (day) Value: 20
  misc_feature: MA Experiment 20000527 PARAMETER Experiment Name: At_10percent_PEG_P Parameter: Tissue Value: Whole Plant
  misc_feature: MA Experiment 20000527 PARAMETER Experiment Name: At_10percent_PEG_P Parameter: Treatment Value: 10percent PEG vs. No Treatment
  misc_feature: MA Experiment ID: 20001248 Result: Down-regulated in Transcription
  misc_feature: MA Experiment 20001248 PARAMETER Experiment Name: At_Far-red-induction_P Parameter: Age (day) Value: 7
  misc_feature: MA Experiment 20001248 PARAMETER Experiment Name: At_Far-red-induction_P Parameter: Light Value: Far-red vs. White
  misc_feature: MA Experiment 20001248 PARAMETER Experiment Name: At_Far-red-induction_P Parameter: Organism Value: A. thaliana
  misc_feature: MA Experiment 20001248 PARAMETER Experiment Name: At_Far-red-induction_P Parameter: Plant Line Value: Columbia
  misc_feature: MA Experiment 20001248 PARAMETER Experiment Name: At_Far-red-induction_P Parameter: Timepoint (hr) Value: 4
  misc_feature: MA Experiment 20001248 PARAMETER Experiment Name: At_Far-red-induction_P Parameter: Tissue Value: Whole Plant
  misc_feature: MA Experiment ID: 20001556 Result: Down-regulated in Transcription
  misc_feature: MA Experiment 20001556 PARAMETER Experiment Name: At_Drought_Soil_Dry_P Parameter: Age (day) Value: 26
  misc_feature: MA Experiment 20001556 PARAMETER Experiment Name: At_Drought_Soil_Dry_P Parameter: Organism Value: A. thaliana
  misc_feature: MA Experiment 20001556 PARAMETER Experiment Name: At_Drought_Soil_Dry_P Parameter: Plant Line Value: WS
  misc_feature: MA Experiment 20001556 PARAMETER Experiment Name: At_Drought_Soil_Dry_P Parameter: Post Timepoint (hr) Value: None
  misc_feature: MA Experiment 20001556 PARAMETER Experiment Name: At_Drought_Soil_Dry_P Parameter: Post-Treatment Value: None
  misc_feature: MA Experiment 20001556 PARAMETER Experiment Name: At_Drought_Soil_Dry_P Parameter: Timepoint (day) Value: 12
  misc_feature: MA Experiment 20001556 PARAMETER Experiment Name: At_Drought_Soil_Dry_P Parameter: Treatment Value: Drought vs. No Drought
  misc_feature: MA Experiment ID: 20001558 Result: Up-regulated in Transcription
  misc_feature: MA Experiment 20001558 PARAMETER Experiment Name: At_Drought_Soil_Dry_P Parameter: Age (day) Value: 27
  misc_feature: MA Experiment 20001558 PARAMETER Experiment Name: At_Drought_Soil_Dry_P Parameter: Organism Value: A. thaliana
  misc_feature: MA Experiment 20001558 PARAMETER Experiment Name: At_Drought_Soil_Dry_P Parameter: Plant Line Value: WS
  misc_feature: MA Experiment 20001558 PARAMETER Experiment Name: At_Drought_Soil_Dry_P Parameter: Post Timepoint (hr) Value: 6
  misc_feature: MA Experiment 20001558 PARAMETER Experiment Name: At_Drought_Soil_Dry_P Parameter: Post-Treatment Value: Re-Water vs. No Drought
  misc_feature: MA Experiment 20001558 PARAMETER Experiment Name: At_Drought_Soil_Dry_P Parameter: Timepoint (day) Value: 13
  misc_feature: MA Experiment 20001558 PARAMETER Experiment Name: At_Drought_Soil_Dry_P Parameter: Treatment Value: Drought vs. No Drought
  misc_feature: MA Experiment ID: 20001907 Result: Down-regulated in Transcription
  misc_feature: MA Experiment 20001907 PARAMETER Experiment Name: At_Drought_Reproduction_P Parameter: Age (day) Value: 37
  misc_feature: MA Experiment 20001907 PARAMETER Experiment Name: At_Drought_Reproduction_P Parameter: Organism Value: A. thaliana
  misc_feature: MA Experiment 20001907 PARAMETER Experiment Name: At_Drought_Reproduction_P Parameter: Plant Line Value: WS
  misc_feature: MA Experiment 20001907 PARAMETER Experiment Name: At_Drought_Reproduction_P Parameter: Timepoint (day) Value: 7
  misc_feature: MA Experiment 20001907 PARAMETER Experiment Name: At_Drought_Reproduction_P Parameter: Tissue Value: Siliques
  misc_feature: MA Experiment 20001907 PARAMETER Experiment Name: At_Drought_Reproduction_P Parameter: Treatment Value: Drought vs. No Drought
atgatcagtcaagaaatacgcgtttaatcgactttttctctctatatatacaattctttcaaaatgatcaaacatagtcataagttccgcaccaatcagtggaaataactaatcaaaactctgtatcatcgttttcaaaacctaattaatggctgtaacaaatcttcctacttgtgatggtttgttcattatcagtcttattgtcatcgtttcttcaatatttgggacatcatctgcgcaactaaacgcaacattttactctgggacttgtcccaacgcctctgccatcgtacgcagcactattcagcaagctcttcaatccgatacaagaatcggagccagcctcatccgccttcattttcatgactgttttgttaatggatgtgatgcatcgatcttgcttgacgacactggaagcatccagagcgagaagaacgctggtccgaatgtaaactcagctagaggattcaacgttgttgataatatcaagactgccctcgaaaacgcttgccctggtgttgtctcttgctctgacgttttagcccttgcctctgaggcttctgtgtctttggcaggagggccatcatggactgtattattaggaagaagagatagtctcacggccaacctcgccggtgcaaattcgtccattccttctcccatcgaaagcctaagcaacatcacatttaaattttcggctgtcgggcttaatacaaacgatctggtagccttatctggtgcgcatacgttcgggcgtgctcgatgtggagtattcaacaacagactatttaacttcagcgggacaggaaatcccgatccaactctaaactcaacgcttctgagcactcttcaacagctatgtcctcaaaacggtagcgcatcaacgatcaccaatcttgatttgagcacaccagatgcgttcgataacaattacttcgccaaccttcagagcaacgatggacttcttcagtcagaccaagagctgttctctaccaccggttcatccaccatcgcgattgttacttcgttcgcaagtaaccagactctgttttttcaggcctttgcacagtccatgatcaatatggggaatattagtcccttgactgggagtaatggagagattaggttagactgtaagaaggttaatggaagttgatttccttaaagctcattttctttgaaaaaacattggcaagctttggttgaataatttttgttatcataatcacatcaaatctgtattgcacttaaatcattctaagcaaatttatgataaatgaaattaaatcaaaac

SEQ ID NO: 105306 - protein, 335 aa, Arabidopsis thaliana; identical to SEQ ID NO: 24060
  peptide (1)..(335): Ceres Seq. ID no. 13616942
  misc_feature (48)..(297): Pfam Name: Peroxidase Pfam Description: Peroxidase
  misc_feature (1)..(335): Homolog of NCBI NO: 15240140 NR Description: peroxidase, putative [Arabidopsis thaliana] Peroxidase 53 precursor (Atperox P53) (ATPA2) peroxidase [Arabidopsis thaliana] >gi|9759300|dbj|BAB09806.1|
  misc_feature (1)..(335): Homolog of NCBI NO: 21593262 NR Description: peroxidase [Arabidopsis thaliana]
  misc_feature (31)..(335): Homolog of NCBI NO: 11513747 NR Description: Chain A, Arabidopsis Thaliana Peroxidase A2
  misc_feature (31)..(335): Homolog of NCBI NO: 1730490 NR Description: Peroxidase A2
  misc_feature (1)..(334): Homolog of NCBI NO: 15240141 NR Description: peroxidase, putative [Arabidopsis thaliana] Peroxidase 54 precursor (Atperox P54) (ATP29a) peroxidase [Arabidopsis thaliana] >gi|26452668|dbj|BAC43417.1|
  misc_feature (1)..(334): Homolog of NCBI NO: 21594792 NR Description: peroxidase [Arabidopsis thaliana]
  misc_feature (12)..(333): Homolog of NCBI NO: 8546851 NR Description: peroxidase [Ipomoea batatas]
  misc_feature (14)..(335): Homolog of NCBI NO: 5002348 NR Description: peroxidase 5 precursor [Phaseolus vulgaris]
  misc_feature (30)..(335): Homolog of NCBI NO: 1279654 NR Description: peroxidase [Populus balsamifera subsp.
  misc_feature (14)..(333): Homolog of NCBI NO: 2129513 NR Description: peroxidase (EC 1.11.1.7) A3a precursor - Japanese

SEQ ID NO: 105307 - DNA, 1351 bp, Arabidopsis thaliana
  misc_feature (1)..(1351): Ceres Seq. ID no. 13616943
  misc_feature: MA Experiment ID: 108434 Result: Down-regulated in Transcription
  misc_feature: MA Experiment 108434 PARAMETER Experiment Name: At_Root_Tips_cDNA_P Parameter: Tissue Value: Root Tips
  misc_feature: MA Experiment ID: 108561 Result: Up-regulated in Transcription
  misc_feature: MA Experiment 108561 PARAMETER Experiment Name: At_100uM_ABA_cDNA_P Parameter: Timepoint (hr) Value: 6
  misc_feature: MA Experiment 108561 PARAMETER Experiment Name: At_100uM_ABA_cDNA_P Parameter: Tissue Value: Aerial
  misc_feature: MA Experiment 108561 PARAMETER Experiment Name: At_100uM_ABA_cDNA_P Parameter: Treatment Value: 100uM ABA vs. No Treatment
  misc_feature: MA Experiment ID: 20000185 Result: Up-regulated in Transcription
  misc_feature: MA Experiment 20000185 PARAMETER Experiment Name: At_Roots__P Parameter: Age (day) Value: 7 vs. 21
  misc_feature: MA Experiment 20000185 PARAMETER Experiment Name: At_Roots__P Parameter: Organism Value: A. thaliana
  misc_feature: MA Experiment 20000185 PARAMETER Experiment Name: At_Roots__P Parameter: Tissue Value: Roots vs. Whole Plant
  misc_feature: MA Experiment ID: 20000437 Result: Up-regulated in Transcription
  misc_feature: MA Experiment 20000437 PARAMETER Experiment Name: At_Drought_P Parameter: Age (day) Value: 8
  misc_feature: MA Experiment 20000437 PARAMETER Experiment Name: At_Drought_P Parameter: Organism Value: A. thaliana
  misc_feature: MA Experiment 20000437 PARAMETER Experiment Name: At_Drought_P Parameter: Plant Line Value: WS
  misc_feature: MA Experiment 20000437 PARAMETER Experiment Name: At_Drought_P Parameter: Timepoint (hr) Value: 24
  misc_feature: MA Experiment 20000437 PARAMETER Experiment Name: At_Drought_P Parameter: Tissue Value: Whole Plant
  misc_feature: MA Experiment 20000437 PARAMETER Experiment Name: At_Drought_P Parameter: Treatment Value: Drought vs. No Drought
  misc_feature: MA Experiment ID: 20000439 Result: Up-regulated in Transcription
  misc_feature: MA Experiment 20000439 PARAMETER Experiment Name: At_Roots__P Parameter: Age (day) Value: 14 vs. 21
  misc_feature: MA Experiment 20000439 PARAMETER Experiment Name: At_Roots__P Parameter: Organism Value: A. thaliana
  misc_feature: MA Experiment 20000439 PARAMETER Experiment Name: At_Roots__P Parameter: Tissue Value: Roots vs. Whole Plant
  misc_feature: MA Experiment ID: 20000451 Result: Up-regulated in Transcription
  misc_feature: MA Experiment 20000451 PARAMETER Experiment Name: At_CS6879_Shoots-Roots_P Parameter: Age (day) Value: 14
  misc_feature: MA Experiment 20000451 PARAMETER Experiment Name: At_CS6879_Shoots-Roots_P Parameter: Organism Value: A. thaliana
  misc_feature: MA Experiment 20000451 PARAMETER Experiment Name: At_CS6879_Shoots-Roots_P Parameter: Plant Line Value: CS6879 vs. WS
  misc_feature: MA Experiment 20000451 PARAMETER Experiment Name: At_CS6879_Shoots-Roots_P Parameter: Tissue Value: Roots
  misc_feature: MA Experiment ID: 20001451 Result: Up-regulated in Transcription
  misc_feature: MA Experiment 20001451 PARAMETER Experiment Name: At_Far-red-induction_P Parameter: Age (day) Value: 7
  misc_feature: MA Experiment 20001451 PARAMETER Experiment Name: At_Far-red-induction_P Parameter: Light Value: Far-red vs. White
  misc_feature: MA Experiment 20001451 PARAMETER Experiment Name: At_Far-red-induction_P Parameter: Organism Value: A. thaliana
  misc_feature: MA Experiment 20001451 PARAMETER Experiment Name: At_Far-red-induction_P Parameter: Plant Line Value: Columbia
  misc_feature: MA Experiment 20001451 PARAMETER Experiment Name: At_Far-red-induction_P Parameter: Timepoint (hr) Value: 24
  misc_feature: MA Experiment 20001451 PARAMETER Experiment Name: At_Far-red-induction_P Parameter: Tissue Value: Whole Plant
aatcagtaaaacgaaaagctaatccaaaactctttaattatttgcaacaactgatcaatggctgtaacaagctcttcttctacttgtgatggtttcttcatcatcagccttattgttatcgtttcttcattgtttgggacatcatctgcgcagttaaacgcaacgttttactcaggcacatgccctaacgcctctgccatcgttcgcagcactattcagcaagctcttcaatccgatgcaagaatcggaggcagcctaatccgccttcattttcacgactgttttgttaatggttgcgatgggtcgctcttgcttgacgacacttcaagcatccagagcgagaagaacgctcctgccaatgcaaactcaactagaggattcaatgttgtcgatagtatcaagacagccctcgagaatgcttgtccgggcattgtttcttgctctgacattttagctcttgcctcagaggcctctgtgtctttggcaggaggaccttcatggactgtgttattaggaagaagagatggtctcaccgcaaacttgtctggagccaattcgtctcttccctctcccttcgaaggccttaacaacatcacatcaaaatttgtagctgtcgggctaaagacaaccgatgtagtatccttgtctggagcgcatacgtttgggcgtggtcaatgcgtaacgttcaacaatagactattcaacttcaacgggacaggaaaccccgacccgactctgaactcaacacttctcagcagtcttcaacagctatgtcctcaaaacggcagcaatacagggatcaccaatctcgatctgagcacacctgatgcgttcgataacaattacttcacgaaccttcagagtaacaatgggcttctccagtcagaccaggaactgttctcaaacaccggttcagccaccgtcccgattgttaattcctttgcaagtaaccagaccctgttttttgaggcgtttgttcagtctatgatcaagatggggaacattagtcccttgactgggagtagtggagagattagacaagactgtaaggtggttaatggacagtcatcagccactgaagcaggggacattcagttacaatctgacggaccagtgagtgtagcagatatgtgaacaacgatgagatcagtttcaccgtttgtttatcatatatgaataataactcctaggccgaatcatttttgtgaaaaaaataagtttggttgaggagaaaataagtgagtggtagggttgtgttttacacttttgaaaattttaatattctaaaacattattatgcctaaatacatgcatgcatgtataacgtctatcgttttgatacattttgtgg

SEQ ID NO: 105308 - protein, 358 aa, Arabidopsis thaliana; identical to SEQ ID NO: 27751
  peptide (1)..(358): Ceres Seq. ID no. 13616944
  misc_feature (49)..(298): Pfam Name: Peroxidase Pfam Description: Peroxidase
  misc_feature (1)..(358): Homolog of NCBI NO: 15240141 NR Description: peroxidase, putative [Arabidopsis thaliana] Peroxidase 54 precursor (Atperox P54) (ATP29a) peroxidase [Arabidopsis thaliana] >gi|26452668|dbj|BAC43417.1|
  misc_feature (1)..(358): Homolog of NCBI NO: 21594792 NR Description: peroxidase [Arabidopsis thaliana]
  misc_feature (1)..(335): Homolog of NCBI NO: 21593262 NR Description: peroxidase [Arabidopsis thaliana]
  misc_feature (1)..(335): Homolog of NCBI NO: 15240140 NR Description: peroxidase, putative [Arabidopsis thaliana] Peroxidase 53 precursor (Atperox P53) (ATPA2) peroxidase [Arabidopsis thaliana] >gi|9759300|dbj|BAB09806.1|
  misc_feature (32)..(335): Homolog of NCBI NO: 11513747 NR Description: Chain A, Arabidopsis Thaliana Peroxidase A2
  misc_feature (32)..(335): Homolog of NCBI NO: 1730490 NR Description: Peroxidase A2
  misc_feature (15)..(334): Homolog of NCBI NO: 8546851 NR Description: peroxidase [Ipomoea batatas]
  misc_feature (13)..(335): Homolog of NCBI NO: 5002348 NR Description: peroxidase 5 precursor [Phaseolus vulgaris]
  misc_feature (71)..(324): Homolog of NCBI NO: 38261094 NR Description: peroxidase [Brassica napus]
  misc_feature (31)..(339): Homolog of NCBI NO: 1279654 NR Description: peroxidase [Populus balsamifera subsp.

SEQ ID NO: 105309 - DNA, 1446 bp, Arabidopsis thaliana
  misc_feature (1)..(1446): Ceres Seq. ID no. 13616945
  misc_feature: MA Experiment ID: 108569 Result: Up-regulated in Transcription
  misc_feature: MA Experiment 108569 PARAMETER Experiment Name: At_0.001%_MeJA__cDNA_P Parameter: Timepoint (hr) Value: 6
  misc_feature: MA Experiment 108569 PARAMETER Experiment Name: At_0.001%_MeJA__cDNA_P Parameter: Tissue Value: Aerial
  misc_feature: MA Experiment 108569 PARAMETER Experiment Name: At_0.001%_MeJA__cDNA_P Parameter: Treatment Value: 0.001% MeJA vs. No Treatment
  misc_feature: MA Experiment ID: 108585 Result: Up-regulated in Transcription
  misc_feature: MA Experiment 108585 PARAMETER Experiment Name: At_5mM_NaNP_cDNA_P Parameter: Timepoint (hr) Value: 6
  misc_feature: MA Experiment 108585 PARAMETER Experiment Name: At_5mM_NaNP_cDNA_P Parameter: Tissue Value: Aerial
  misc_feature: MA Experiment 108585 PARAMETER Experiment Name: At_5mM_NaNP_cDNA_P Parameter: Treatment Value: null
  misc_feature: MA Experiment ID: 108668 Result: Up-regulated in Transcription
  misc_feature: MA Experiment 108668 PARAMETER Experiment Name: At_2mM_SA_cDNA_P Parameter: Plant Line Value: WS
  misc_feature: MA Experiment 108668 PARAMETER Experiment Name: At_2mM_SA_cDNA_P Parameter: Timepoint (hr) Value: 6
  misc_feature: MA Experiment 108668 PARAMETER Experiment Name: At_2mM_SA_cDNA_P Parameter: Treatment Value: 2mM SA vs. No Treatment
  misc_feature: MA Experiment ID: 20000171 Result: Up-regulated in Transcription
  misc_feature: MA Experiment 20000171 PARAMETER Experiment Name: At_42deg_Heat_P Parameter: Age (day) Value: 14
  misc_feature: MA Experiment 20000171 PARAMETER Experiment Name: At_42deg_Heat_P Parameter: Organism Value: A. thaliana
  misc_feature: MA Experiment 20000171 PARAMETER Experiment Name: At_42deg_Heat_P Parameter: Plant Line Value: WS
  misc_feature: MA Experiment 20000171 PARAMETER Experiment Name: At_42deg_Heat_P Parameter: Temperature (deg C) Value: 42 vs. 22
  misc_feature: MA Experiment 20000171 PARAMETER Experiment Name: At_42deg_Heat_P Parameter: Timepoint (hr) Value: 1
  misc_feature: MA Experiment 20000171 PARAMETER Experiment Name: At_42deg_Heat_P Parameter: Tissue Value: Aerial
  misc_feature: MA Experiment ID: 20000182 Result: Up-regulated in Transcription
  misc_feature: MA Experiment 20000182 PARAMETER Experiment Name: At_2mM_SA_P Parameter: Age (day) Value: 14
  misc_feature: MA Experiment 20000182 PARAMETER Experiment Name: At_2mM_SA_P Parameter: Organism Value: A. thaliana
  misc_feature: MA Experiment 20000182 PARAMETER Experiment Name: At_2mM_SA_P Parameter: Plant Line Value: WS
  misc_feature: MA Experiment 20000182 PARAMETER Experiment Name: At_2mM_SA_P Parameter: Timepoint (hr) Value: 6
  misc_feature: MA Experiment 20000182 PARAMETER Experiment Name: At_2mM_SA_P Parameter: Tissue Value: Aerial
  misc_feature: MA Experiment 20000182 PARAMETER Experiment Name: At_2mM_SA_P Parameter: Treatment Value: 2mM SA vs. No Treatment
  misc_feature: MA Experiment ID: 20000184 Result: Down-regulated in Transcription
  misc_feature: MA Experiment 20000184 PARAMETER Experiment Name: At_Shoots__P Parameter: Age (day) Value: 7
  misc_feature: MA Experiment 20000184 PARAMETER Experiment Name: At_Shoots__P Parameter: Tissue Value: Shoots vs. Whole Plant
  misc_feature: MA Experiment ID: 20000185 Result: Up-regulated in Transcription
  misc_feature: MA Experiment 20000185 PARAMETER Experiment Name: At_Roots__P Parameter: Age (day) Value: 7 vs. 21
  misc_feature: MA Experiment 20000185 PARAMETER Experiment Name: At_Roots__P Parameter: Organism Value: A. thaliana
  misc_feature: MA Experiment 20000185 PARAMETER Experiment Name: At_Roots__P Parameter: Tissue Value: Roots vs. Whole Plant
  misc_feature: MA Experiment ID: 20000437 Result: Up-regulated in Transcription
  misc_feature: MA Experiment 20000437 PARAMETER Experiment Name: At_Drought_P Parameter: Age (day) Value: 8
  misc_feature: MA Experiment 20000437 PARAMETER Experiment Name: At_Drought_P Parameter: Organism Value: A. thaliana
  misc_feature: MA Experiment 20000437 PARAMETER Experiment Name: At_Drought_P Parameter: Plant Line Value: WS
  misc_feature: MA Experiment 20000437 PARAMETER Experiment Name: At_Drought_P Parameter: Timepoint (hr) Value: 24
  misc_feature: MA Experiment 20000437 PARAMETER Experiment Name: At_Drought_P Parameter: Tissue Value: Whole Plant
  misc_feature: MA Experiment 20000437 PARAMETER Experiment Name: At_Drought_P Parameter: Treatment Value: Drought vs. No Drought
  misc_feature: MA Experiment ID: 20000438 Result: Down-regulated in Transcription
  misc_feature: MA Experiment 20000438 PARAMETER Experiment Name: At_Shoots__P Parameter: Age (day) Value: 14
  misc_feature: MA Experiment 20000438 PARAMETER Experiment Name: At_Shoots__P Parameter: Tissue Value: Shoots vs. Whole Plant
  misc_feature: MA Experiment ID: 20000794 Result: Down-regulated in Transcription
  misc_feature: MA Experiment 20000794 PARAMETER Experiment Name: At_Petals_P Parameter: Age (day) Value: 23-25 days
  misc_feature: MA Experiment 20000794 PARAMETER Experiment Name: At_Petals_P Parameter: Plant Line Value: WS
  misc_feature: MA Experiment 20000794 PARAMETER Experiment Name: At_Petals_P Parameter: Tissue Value: Petals vs. Whole plant
  misc_feature: MA Experiment ID: 20001557 Result: Down-regulated in Transcription
  misc_feature: MA Experiment 20001557 PARAMETER Experiment Name: At_Drought_Soil_Dry_P Parameter: Age (day) Value: 27
  misc_feature: MA Experiment 20001557 PARAMETER Experiment Name: At_Drought_Soil_Dry_P Parameter: Organism Value: A. thaliana
  misc_feature: MA Experiment 20001557 PARAMETER Experiment Name: At_Drought_Soil_Dry_P Parameter: Plant Line Value: WS
  misc_feature: MA Experiment 20001557 PARAMETER Experiment Name: At_Drought_Soil_Dry_P Parameter: Post Timepoint (hr) Value: 3
  misc_feature: MA Experiment 20001557 PARAMETER Experiment Name: At_Drought_Soil_Dry_P Parameter: Post-Treatment Value: Re-Water vs. No Drought
  misc_feature: MA Experiment 20001557 PARAMETER Experiment Name: At_Drought_Soil_Dry_P Parameter: Timepoint (day) Value: 13
  misc_feature: MA Experiment 20001557 PARAMETER Experiment Name: At_Drought_Soil_Dry_P Parameter: Treatment Value: Drought vs. No Drought
aaaaatctcacattttttttcttcagtttcatctaaaaagattcaattcatatcgaaaataaaaaaggaacaaactttgctttttgttttcgcaatctccgattcgttaactcgttttctctcttcacctgtttcaagcttttcgatccaacaaatcacgagattcctctttccggtgtggtctccggcgacctaaaataaagagttaattctcgtggtcgtggagagcaaatgagggatgttctcctggttagcgagaatggctcttttttgtttacgacctatgcggcgatacggtcgtatgaacagagatgatgacgatgatgatgatcacgacggtgactcttcttcctccggtgactcccttctttggtctagagaactcgagagacattctttcggagatttctctattgctgttgtgcaagctaacgaggttattgaagatcatagtcaagtcgagactggaaacggtgccgttttcgtcggagtttacgatggtcatggtggtcctgaagcttctagatacatctctgatcatctcttttctcatttgatgagagtttcgagagaaaggagttgtatttcagaggaggctttaagagctgcattttctgctactgaggaagggtttctcacgcttgtgcgaaggacttgcgggttgaaaccgttgattgcagctgttggatcttgttgtttggttggagttatttggaaagggactttgcttatcgctaatgttggtgattctcgtgctgtgcttggttccatgggtagtaataataataggtcaaacaagattgtagctgagcaactgactagtgatcacaatgctgctttggaagaagttagacaagagcttaggtcgttgcatcctgatgattcacatatcgttgtccttaaacatggtgtgtggcgcatcaaaggcatcattcaggtatctagatcaataggggatgcatatttaaagcgcccagagttctcacttgacccttcatttccgcggttccatctcgctgaagaactacaaagacctgttttatcagcagagccttgtgtctacacaagagtcttacaaacaagtgacaagtttgtgatattcgcatcagatggactctgggaacaaatgaccaaccagcaagctgtagagatagtgaataaacacccccgtcctggaatagcgagaaggctggtgagaagagcgataaccatagctgcgaaaaagagagagatgaattacgatgatttgaagaaagtggagagaggagtgaggagattctttcatgatgatataacagtggttgtgatattcatagacaatgagcttcttatggtggagaaagctactgttcctgaattgtccattaaaggtttttctcataccgttggaccttccaagttcagtatcttcctctcttagacatttttgttacatttctttacttt

SEQ ID NO: 105310 - protein, 393 aa, Arabidopsis thaliana; identical to SEQ ID NO: 40665
  peptide (1)..(393): Ceres Seq. ID no. 13616946
  misc_feature (33)..(331): Pfam Name: Protein phosphatase 2C Pfam Description: Protein phosphatase 2C
  misc_feature (1)..(393): Homolog of NCBI NO: 18415301 NR Description: protein phosphatase 2C-related [Arabidopsis >gi|28393554|gb|AAO42197.1| putative protein phosphatase 2C thaliana] >gi|28973115|gb|AAO63882.1| putative protein
  misc_feature (1)..(393): Homolog of NCBI NO: 21536936 NR Description: protein phosphatase 2C-like [Arabidopsis thaliana]
  misc_feature (8)..(393): Homolog of NCBI NO: 9759303 NR Description: protein phosphatase 2C-like [Arabidopsis thaliana]
  misc_feature (1)..(389): Homolog of NCBI NO: 38346816 NR Description: OSJNBa0088A01.23 [Oryza sativa (japonica
  misc_feature (35)..(387): Homolog of NCBI NO: 20340237 NR Description: protein phosphatase 2c-like protein
  misc_feature (35)..(387): Homolog of NCBI NO: 15239244 NR Description: protein phosphatase 2C-related protein
  misc_feature (35)..(387): Homolog of NCBI NO: 11282001 NR Description: protein phosphatase 2C-like protein - Arabidopsis
  misc_feature (35)..(391): Homolog of NCBI NO: 13357263 NR Description: putative protein phosphatase 2C [Oryza sativa
  misc_feature (35)..(391): Homolog of NCBI NO: 37536574 NR Description: putative protein phosphatase 2C [Oryza sativa
  misc_feature (24)..(378): Homolog of NCBI NO: 7768153 NR Description: protein phosphatase 2C (PP2C) [Fagus sylvatica]

SEQ ID NO: 105311 - protein, 386 aa, Arabidopsis thaliana; identical to SEQ ID NO: 40666
  peptide (1)..(386): Ceres Seq. ID no. 13616947
  misc_feature (26)..(324): Pfam Name: Protein phosphatase 2C Pfam Description: Protein phosphatase 2C
  misc_feature (1)..(386): Homolog of NCBI NO: 18415301 NR Description: protein phosphatase 2C-related [Arabidopsis >gi|28393554|gb|AAO42197.1| putative protein phosphatase 2C thaliana] >gi|28973115|gb|AAO63882.1| putative protein
  misc_feature (1)..(386): Homolog of NCBI NO: 21536936 NR Description: protein phosphatase 2C-like [Arabidopsis thaliana]
  misc_feature (1)..(386): Homolog of NCBI NO: 9759303 NR Description: protein phosphatase 2C-like [Arabidopsis thaliana]
  misc_feature (1)..(382): Homolog of NCBI NO: 38346816 NR Description: OSJNBa0088A01.23 [Oryza sativa (japonica
  misc_feature (28)..(380): Homolog of NCBI NO: 20340237 NR Description: protein phosphatase 2c-like protein
  misc_feature (28)..(380): Homolog of NCBI NO: 15239244 NR Description: protein phosphatase 2C-related protein
  misc_feature (28)..(380): Homolog of NCBI NO: 11282001 NR Description: protein phosphatase 2C-like protein - Arabidopsis
  misc_feature (28)..(384): Homolog of NCBI NO: 13357263 NR Description: putative protein phosphatase 2C [Oryza sativa
  misc_feature (28)..(384): Homolog of NCBI NO: 37536574 NR Description: putative protein phosphatase 2C [Oryza sativa
  misc_feature (17)..(371): Homolog of NCBI NO: 7768153 NR Description: protein phosphatase 2C (PP2C) [Fagus sylvatica]

SEQ ID NO: 105312 - protein, 378 aa, Arabidopsis thaliana; identical to SEQ ID NO: 40667
  peptide (1)..(378): Ceres Seq. ID no. 13616948
  misc_feature (18)..(316): Pfam Name: Protein phosphatase 2C Pfam Description: Protein phosphatase 2C
  misc_feature (1)..(378): Homolog of NCBI NO: 18415301 NR Description: protein phosphatase 2C-related [Arabidopsis >gi|28393554|gb|AAO42197.1| putative protein phosphatase 2C thaliana] >gi|28973115|gb|AAO63882.1| putative protein
  misc_feature (1)..(378): Homolog of NCBI NO: 21536936 NR Description: protein phosphatase 2C-like [Arabidopsis thaliana]
  misc_feature (1)..(378): Homolog of NCBI NO: 9759303 NR Description: protein phosphatase 2C-like [Arabidopsis thaliana]
  misc_feature (1)..(374): Homolog of NCBI NO: 38346816 NR Description: OSJNBa0088A01.23 [Oryza sativa (japonica
  misc_feature (20)..(372): Homolog of NCBI NO: 20340237 NR Description: protein phosphatase 2c-like protein
  misc_feature (20)..(372): Homolog of NCBI NO: 15239244 NR Description: protein phosphatase 2C-related protein
  misc_feature (20)..(372): Homolog of NCBI NO: 11282001 NR Description: protein phosphatase 2C-like protein - Arabidopsis
  misc_feature (20)..(376): Homolog of NCBI NO: 13357263 NR Description: putative protein phosphatase 2C [Oryza sativa
  misc_feature (20)..(376): Homolog of NCBI NO: 37536574 NR Description: putative protein phosphatase 2C [Oryza sativa
  misc_feature (9)..(363): Homolog of NCBI NO: 7768153 NR Description: protein phosphatase 2C (PP2C) [Fagus sylvatica]

SEQ ID NO: 105313 - DNA, 1118 bp, Arabidopsis thaliana
  misc_feature (1)..(1118): Ceres Seq. ID no. 13616953
  misc_feature: MA Experiment ID: 108577 Result: Down-regulated in Transcription
  misc_feature: MA Experiment 108577 PARAMETER Experiment Name: At_42deg_Heat_cDNA_P Parameter: Temperature (deg C) Value: 42 vs. 22
  misc_feature: MA Experiment 108577 PARAMETER Experiment Name: At_42deg_Heat_cDNA_P Parameter: Timepoint (hr) Value: 6
  misc_feature: MA Experiment 108577 PARAMETER Experiment Name: At_42deg_Heat_cDNA_P Parameter: Tissue Value: Aerial
  misc_feature: MA Experiment ID: 20000179 Result: Up-regulated in Transcription
  misc_feature: MA Experiment 20000179 PARAMETER Experiment Name: At_Germinating_Seeds_P Parameter: Age (hr) Value: 6 vs. 0
  misc_feature: MA Experiment 20000179 PARAMETER Experiment Name: At_Germinating_Seeds_P Parameter: Tissue Value: Germinating Seeds
  misc_feature: MA Experiment ID: 20000180 Result: Up-regulated in Transcription
  misc_feature: MA Experiment 20000180 PARAMETER Experiment Name: At_Germinating_Seeds_P Parameter: Age (hr) Value: 24 vs. 0
  misc_feature: MA Experiment 20000180 PARAMETER Experiment Name: At_Germinating_Seeds_P Parameter: Tissue Value: Germinating Seeds
atttatattgttgagctgtgtgtgtggagatgatgatgatgatgataaacccaatagaattttaaaaggataagaatcgcaaagctcatatcacaaaactttgagatctcatttcatctttcttcgattctacctactccgattcaatcgatcttatcgagacatggatgctcgtaagagaggacgccctgaagctgctgcctctcacaactccaatggcggattcaagaggtctaagcaagagatggaatcaatttcaactggtttaggaagcaaatccaagccatgcactaaatttttcagcacttctggatgtccatttggtgacaattgccacttcttgcactatgtgcccggtgggtacaatgctgcagcgcagatgacaaatctccgaccaccggtttctcaagtttccagaaatatgcaaggatctggtggtcccggcggcagattctcagggagaggagatccaggatcaggccctgtttcaatctttggtgcttctacttccaagatcagtgtagatgcttctttagccggtgccatcattggaaaaggtggaatccattccaaacagatatgccgtgaaacaggagcaaaattatcgattaaagatcatgaaagagacccaaacttgaagattatcgagctggaaggaacatttgaacagatcaatgtagcgagtgggatggtgagagagcttatagggaggcttggatcagtgaagaaacctcaagggattggtggtcctgaagggaaaccacatcctgggagcaactacaaaaccaagatctgtgataggtactctaaagggaactgtacatatggagatagatgccattttgctcatggtgaatctgagctgcgcaggtcaggaatcgcttagttatgtctttagactcttgagaacagattatgcattgttagctccattatcattgtgactttttgctctctctttttgttttatcaatttgttttatgcgactcgctttgaaaactttagcccattctgtattgagctctgaagattcgacgagttctgtaagttaccgatcacagttaaaagactttgatatgttaaaacccttatattacagctacatactatttttgtc

SEQ ID NO: 105314 - protein, 240 aa, Arabidopsis thaliana
  peptide (1)..(240): Ceres Seq. ID no. 13616954
  misc_feature (117)..(165): Pfam Name: KH domain Pfam Description: KH domain
  misc_feature (1)..(240): Homolog of NCBI NO: 15240145 NR Description: KH domain/zinc finger protein [Arabidopsis >gi|9759305|dbj|BAB09811.1| contains similarity to unknown [Arabidopsis thaliana] >gi|26451009|dbj|BAC42611.1| unknown
  misc_feature (1)..(240): Homolog of NCBI NO: 21555233 NR Description: unknown [Arabidopsis thaliana]
  misc_feature (1)..(239): Homolog of NCBI NO: 18399496 NR Description: KH domain/zinc finger protein [Arabidopsis
  misc_feature (23)..(239): Homolog of NCBI NO: 9294110 NR Description: contains similarity to unknown
  misc_feature (38)..(240): Homolog of NCBI NO: 5441893 NR Description: ESTs C99174(E10437),D22295(C10709) correspond to region of the predicted gene.~Similar to Arabidopsis thaliana BAC
  misc_feature (38)..(240): Homolog of NCBI NO: 32488659 NR Description: OSJNBa0087O24.9 [Oryza sativa (japonica
  misc_feature (1)..(95): Homolog of NCBI NO: 5441893 NR Description: ESTs C99174(E10437),D22295(C10709) correspond to region of the predicted gene.~Similar to Arabidopsis thaliana BAC
  misc_feature (3)..(79): Homolog of NCBI NO: 32488659 NR Description: OSJNBa0087O24.9 [Oryza sativa (japonica
  misc_feature (33)..(98): Homolog of NCBI NO: 34905220 NR Description: P0672D01.12 [Oryza sativa (japonica >gi|29467558|dbj|BAC66728.1| putative zinc finger protein [Oryza
  misc_feature (195)..(238): Homolog of NCBI NO: 34905220 NR Description: P0672D01.12 [Oryza sativa (japonica >gi|29467558|dbj|BAC66728.1| putative zinc finger protein [Oryza
MDARKRGRPEAAASHNSNGGFKRSKQEMESISTGLGSKSKPCTKFFSTSGCPFGDNCHFLHYVPGGYNAAAQMTNLRPPVSQVSRNMQGSGGPGGRFSGRGDPGSGPVSIFGASTSKISVDASLAGAIIGKGGIHSKQICRETGAKLSIKDHERDPNLKIIELEGTFEQINVASGMVRELIGRLGSVKKPQGIGGPEGKPHPGSNYKTKICDRYSKGNCTYGDRCHFAHGESELRRSGIA

SEQ ID NO: 105315 - protein, 213 aa, Arabidopsis thaliana
  peptide (1)..(213): Ceres Seq. ID no. 13616955
  misc_feature (90)..(138): Pfam Name: KH domain Pfam Description: KH domain
  misc_feature (1)..(213): Homolog of NCBI NO: 15240145 NR Description: KH domain/zinc finger protein [Arabidopsis >gi|9759305|dbj|BAB09811.1| contains similarity to unknown [Arabidopsis thaliana] >gi|26451009|dbj|BAC42611.1| unknown
  misc_feature (1)..(213): Homolog of NCBI NO: 21555233 NR Description: unknown [Arabidopsis thaliana]
  misc_feature (1)..(212): Homolog of NCBI NO: 18399496 NR Description: KH domain/zinc finger protein [Arabidopsis
  misc_feature (1)..(212): Homolog of NCBI NO: 9294110 NR Description: contains similarity to unknown
  misc_feature (11)..(213): Homolog of NCBI NO: 5441893 NR Description: ESTs C99174(E10437),D22295(C10709) correspond to region of the predicted gene.~Similar to Arabidopsis thaliana BAC
  misc_feature (11)..(213): Homolog of NCBI NO: 32488659 NR Description: OSJNBa0087O24.9 [Oryza sativa (japonica
  misc_feature (1)..(68): Homolog of NCBI NO: 5441893 NR Description: ESTs C99174(E10437),D22295(C10709) correspond to region of the predicted gene.~Similar to Arabidopsis thaliana BAC
  misc_feature (1)..(52): Homolog of NCBI NO: 32488659 NR Description: OSJNBa0087O24.9 [Oryza sativa (japonica
  misc_feature (6)..(71): Homolog of NCBI NO: 34905220 NR Description: P0672D01.12 [Oryza sativa (japonica >gi|29467558|dbj|BAC66728.1| putative zinc finger protein [Oryza
  misc_feature (168)..(211): Homolog of NCBI NO: 34905220 NR Description: P0672D01.12 [Oryza sativa (japonica >gi|29467558|dbj|BAC66728.1| putative zinc finger protein [Oryza
MESISTGLGSKSKPCTKFFSTSGCPFGDNCHFLHYVPGGYNAAAQMTNLRPPVSQVSRNMQGSGGPGGRFSGRGDPGSGPVSIFGASTSKISVDASLAGAIIGKGGIHSKQICRETGAKLSIKDHERDPNLKIIELEGTFEQINVASGMVRELIGRLGSVKKPQGIGGPEGKPHPGSNYKTKICDRYSKGNCTYGDRCHFAHGESELRRSGIA

SEQ ID NO: 105316 - protein, 168 aa, Arabidopsis thaliana
  peptide (1)..(168): Ceres Seq. ID no. 13616956
  misc_feature (45)..(93): Pfam Name: KH domain Pfam Description: KH domain
  misc_feature (1)..(168): Homolog of NCBI NO: 15240145 NR Description: KH domain/zinc finger protein [Arabidopsis >gi|9759305|dbj|BAB09811.1| contains similarity to unknown [Arabidopsis thaliana] >gi|26451009|dbj|BAC42611.1| unknown
  misc_feature (1)..(168): Homolog of NCBI NO: 21555233 NR Description: unknown [Arabidopsis thaliana]
  misc_feature (1)..(167): Homolog of NCBI NO: 18399496 NR Description: KH domain/zinc finger protein [Arabidopsis
  misc_feature (1)..(167): Homolog of NCBI NO: 9294110 NR Description: contains similarity to unknown
  misc_feature (1)..(168): Homolog of NCBI NO: 5441893 NR Description: ESTs C99174(E10437),D22295(C10709) correspond to region of the predicted gene.~Similar to Arabidopsis thaliana BAC
  misc_feature (1)..(168): Homolog of NCBI NO: 32488659 NR Description: OSJNBa0087O24.9 [Oryza sativa (japonica
  misc_feature (1)..(23): Homolog of NCBI NO: 5441893 NR Description: ESTs C99174(E10437),D22295(C10709) correspond to region of the predicted gene.~Similar to Arabidopsis thaliana BAC
  misc_feature (1)..(26): Homolog of NCBI NO: 34905220 NR Description: P0672D01.12 [Oryza sativa (japonica >gi|29467558|dbj|BAC66728.1| putative zinc finger protein [Oryza
  misc_feature (123)..(166): Homolog of NCBI NO: 34905220 NR Description: P0672D01.12 [Oryza sativa (japonica >gi|29467558|dbj|BAC66728.1| putative zinc finger protein [Oryza
  misc_feature (1)..(130): Homolog of NCBI NO: 1082624 NR Description: myc far upstream element-binding protein - human
MTNLRPPVSQVSRNMQGSGGPGGRFSGRGDPGSGPVSIFGASTSKISVDASLAGAIIGKGGIHSKQICRETGAKLSIKDHERDPNLKIIELEGTFEQINVASGMVRELIGRLGSVKKPQGIGGPEGKPHPGSNYKTKICDRYSKGNCTYGDRCHFAHGESELRRSGIA

SEQ ID NO: 105317 - DNA, 1236 bp, Arabidopsis thaliana
  misc_feature (1)..(1236): Ceres Seq. ID no. 13616961
  misc_feature: MA Experiment ID: 20000315 Result: Up-regulated in Transcription
  misc_feature: MA Experiment 20000315 PARAMETER Experiment Name: At_14day_Shoots-Roots_Sub_P Parameter: Age (day) Value: 14
  misc_feature: MA Experiment 20000315 PARAMETER Experiment Name: At_14day_Shoots-Roots_Sub_P Parameter: Organism Value: A. thaliana
  misc_feature: MA Experiment 20000315 PARAMETER Experiment Name: At_14day_Shoots-Roots_Sub_P Parameter: Plant Line Value: WS
  misc_feature: MA Experiment 20000315 PARAMETER Experiment Name: At_14day_Shoots-Roots_Sub_P Parameter: Tissue Value: Shoots vs. Whole Plant
  misc_feature: MA Experiment ID: 20000329 Result: Down-regulated in Transcription
  misc_feature: MA Experiment 20000329 PARAMETER Experiment Name: At_4deg_Cold_Sub_P Parameter: Age (day) Value: 14
  misc_feature: MA Experiment 20000329 PARAMETER Experiment Name: At_4deg_Cold_Sub_P Parameter: Organism Value: A. thaliana
  misc_feature: MA Experiment 20000329 PARAMETER Experiment Name: At_4deg_Cold_Sub_P Parameter: Plant Line Value: WS
  misc_feature: MA Experiment 20000329 PARAMETER Experiment Name: At_4deg_Cold_Sub_P Parameter: Temperature (deg C) Value: 4 vs. 22
  misc_feature: MA Experiment 20000329 PARAMETER Experiment Name: At_4deg_Cold_Sub_P Parameter: Timepoint (hr) Value: 6
  misc_feature: MA Experiment 20000329 PARAMETER Experiment Name: At_4deg_Cold_Sub_P Parameter: Tissue Value: Aerial
gacgccaaacacaaatattccattaaaagaaacattttctatagtcaagcataaagagcattccaatggcgatcccaagtttctccatgtgtcacaagcccgagctccttaaggaaggcaaaagcgaaggccaagaagaagaagggctaagctacgagttccaagagatgttggactctcttcctaaggagagaggacggagaaatcgttacctttacttattccaagggtttcggtgccaagctaaggagattcaagctatcacgtctttccaaaaacattttcagtcccttccagacgacgttgtcctcgccaccatacctaaatctggcacaacctggttaaaagctttaactttcaccatccttacccgtcatcggtttgatccggtttcctcatcaagttccgaccaccctcttctcacatccaaccctcacgacctcgtacctttcttcgagtacaagctttacgccaacggaaatgttcccgatctctcgggtctagccagtccaagaacattcgcaacccacgtaccgttcggtgcccttaaggattcggtcgagaatcccagtgtgaaggttgtgtacctgtgccggaacccgtttgacacattcatctccatgtggcattacatcaacaacatcacttccgagtcagtgagcgcagtcttgctagacgaagcttttgatctatattgccggggattactgatcggatttggcccgttttgggaacacatgttgggatactggagagagagcttgaagaggccagagaaagtcttatttttaaagtacgaggatctcaaagaagacatcgagaccaacttgaagaagctagcaagtttcttaggacttcctttcaccgaagaagaggaacaaaagggagttgtgaaagctatcgctgatctgtgtagctttgagaatctgaagaagttggaggtgaacaagtcaagcaaattgatccagaactatgagaaccggttcttgtttaggaaaggagaagtgagtgatttggttaactatttgtcgccatcacaagtggaaagattgtcagccttagtggatgacaagttagctggatctggtctcactttcagattgagttaaatatgaggccacctgcccacatttatactcctgttttgagggcctataaaagttttaagttaagtgaaggcagttgtattattgttacagatggacaatgatgcaacgtaacgtccacactttagtt

SEQ ID NO: 105318 - protein, 347 aa, Arabidopsis thaliana
  peptide (1)..(347): Ceres Seq. ID no. 13616962
  misc_feature (77)..(341): Pfam Name: Sulfotransferase domain Pfam Description: Sulfotransferase domain
  misc_feature (1)..(347): Homolog of NCBI NO: 30681703 NR Description: sulfotransferase family [Arabidopsis thaliana] putative steroid sulfotransferase [Arabidopsis thaliana]
  misc_feature (8)..(347): Homolog of NCBI NO: 9759556 NR Description: steroid sulfotransferase-like protein
  misc_feature (1)..(347): Homolog of NCBI NO: 18415376 NR Description: sulfotransferase family [Arabidopsis thaliana]
  misc_feature (1)..(347): Homolog of NCBI NO: 15809903 NR Description: AT5g07010/MOJ9_18 [Arabidopsis thaliana]
  misc_feature (1)..(347): Homolog of NCBI NO: 9759557 NR Description: steroid sulfotransferase-like protein
  misc_feature (26)..(344): Homolog of NCBI NO: 15230602 NR Description: sulfotransferase family [Arabidopsis thaliana]
  misc_feature (15)..(344): Homolog of NCBI NO: 38230552 NR Description: steroid sulfotransferase 4 [Brassica napus]
  misc_feature (24)..(345): Homolog of NCBI NO: 18395604 NR Description: sulfotransferase family [Arabidopsis thaliana] putative steroid sulfotransferase [Arabidopsis thaliana] putative steroid putative steroid sulfotransferase [Arabidopsis
  misc_feature (24)..(345): Homolog of NCBI NO: 25288806 NR Description: probable steroid sulfotransferase [imported] - thaliana >gi|13272389|gb|AAK17133.1|AF325065_1 putative steroid
  misc_feature (12)..(342): Homolog of NCBI NO: 21553545 NR Description: steroid sulfotransferase, putative [Arabidopsis
MAIPSFSMCHKPELLKEGKSEGQEEEGLSYEFQEMLDSLPKERGRRNRYLYLFQGFRCQAKEIQAITSFQKHFQSLPDDVVLATIPKSGTTWLKALTFTILTRHRFDPVSSSSSDHPLLTSNPHDLVPFFEYKLYANGNVPDLSGLASPRTFATHVPFGALKDSVENPSVKVVYLCRNPFDTFISMWHYINNITSESVSAVLLDEAFDLYCRGLLIGFGPFWEHMLGYWRESLKRPEKVLFLKYEDLKEDIETNLKKLASFLGLPFTEEEEQKGVVKAIADLCSFENLKKLEVNKSSKLIQNYENRFLFRKGEVSDLVNYLSPSQVERLSALVDDKLAGSGLTFRLS

SEQ ID NO: 105319 - protein, 340 aa, Arabidopsis thaliana; identical to SEQ ID NO: 72686
  peptide (1)..(340): Ceres Seq. ID no. 13616963
  misc_feature (70)..(334): Pfam Name: Sulfotransferase domain Pfam Description: Sulfotransferase domain
  misc_feature (1)..(340): Homolog of NCBI NO: 30681703 NR Description: sulfotransferase family [Arabidopsis thaliana] putative steroid sulfotransferase [Arabidopsis thaliana]
  misc_feature (1)..(340): Homolog of NCBI NO: 9759556 NR Description: steroid sulfotransferase-like protein
  misc_feature (1)..(340): Homolog of NCBI NO: 18415376 NR Description: sulfotransferase family [Arabidopsis thaliana]
  misc_feature (1)..(340): Homolog of NCBI NO: 15809903 NR Description: AT5g07010/MOJ9_18 [Arabidopsis thaliana]
  misc_feature (1)..(340): Homolog of NCBI NO: 9759557 NR Description: steroid sulfotransferase-like protein
  misc_feature (19)..(337): Homolog of NCBI NO: 15230602 NR Description: sulfotransferase family [Arabidopsis thaliana]
  misc_feature (8)..(337): Homolog of NCBI NO: 38230552 NR Description: steroid sulfotransferase 4 [Brassica napus]
  misc_feature (17)..(338): Homolog of NCBI NO: 18395604 NR Description: sulfotransferase family [Arabidopsis thaliana] putative steroid sulfotransferase [Arabidopsis thaliana] putative steroid putative steroid sulfotransferase [Arabidopsis
  misc_feature (17)..(338): Homolog of NCBI NO: 25288806 NR Description: probable steroid sulfotransferase [imported] - thaliana >gi|13272389|gb|AAK17133.1|AF325065_1 putative steroid
  misc_feature (5)..(335): Homolog of NCBI NO: 21553545 NR Description: steroid sulfotransferase, putative [Arabidopsis

SEQ ID NO: 105320 - protein, 313 aa, Arabidopsis thaliana; identical to SEQ ID NO: 72687
  peptide (1)..(313): Ceres Seq. ID no. 13616964
  misc_feature (43)..(307): Pfam Name: Sulfotransferase domain Pfam Description: Sulfotransferase domain
  misc_feature (1)..(313): Homolog of NCBI NO: 30681703 NR Description: sulfotransferase family [Arabidopsis thaliana] putative steroid sulfotransferase [Arabidopsis thaliana]
  misc_feature (1)..(313): Homolog of NCBI NO: 9759556 NR Description: steroid sulfotransferase-like protein
  misc_feature (1)..(313): Homolog of NCBI NO: 18415376 NR Description: sulfotransferase family [Arabidopsis thaliana]
  misc_feature (1)..(313): Homolog of NCBI NO: 15809903 NR Description: AT5g07010/MOJ9_18 [Arabidopsis thaliana]
  misc_feature (1)..(313): Homolog of NCBI NO: 9759557 NR Description: steroid sulfotransferase-like protein
  misc_feature (1)..(310): Homolog of NCBI NO: 15230602 NR Description: sulfotransferase family [Arabidopsis thaliana]
  misc_feature (1)..(310): Homolog of NCBI NO: 38230552 NR Description: steroid sulfotransferase 4 [Brassica napus]
  misc_feature (1)..(311): Homolog of NCBI NO: 18395604 NR Description: sulfotransferase family [Arabidopsis thaliana] putative steroid sulfotransferase [Arabidopsis thaliana] putative steroid putative steroid sulfotransferase [Arabidopsis
  misc_feature (1)..(311): Homolog of NCBI NO: 25288806 NR Description: probable steroid sulfotransferase [imported] - thaliana >gi|13272389|gb|AAK17133.1|AF325065_1 putative steroid
  misc_feature (1)..(308): Homolog of NCBI NO: 21553545 NR Description: steroid sulfotransferase, putative [Arabidopsis

SEQ ID NO: 105321 - DNA, 961 bp, Arabidopsis thaliana
  misc_feature (1)..(961): Ceres Seq. ID no. 13616965
  misc_feature: MA Experiment ID: 108435 Result: Down-regulated in Transcription
  misc_feature: MA Experiment 108435 PARAMETER Experiment Name: At_stm_Mutants_cDNA_P Parameter: Plant Line Value: wt Landsburg vs stm
  misc_feature: MA Experiment 108435 PARAMETER Experiment Name: At_stm_Mutants_cDNA_P Parameter: Tissue Value: Shoot Apical Meristem Region
  misc_feature: MA Experiment ID: 108461 Result: Up-regulated in Transcription
  misc_feature: MA Experiment 108461 PARAMETER Experiment Name: At_Germinating_Seeds_cDNA_P Parameter: Age (day) Value: 1 vs. 0
  misc_feature: MA Experiment 108461 PARAMETER Experiment Name: At_Germinating_Seeds_cDNA_P Parameter: Tissue Value: Germinating Seeds
  misc_feature: MA Experiment ID: 108462 Result: Up-regulated in Transcription
  misc_feature: MA Experiment 108462 PARAMETER Experiment Name: At_Germinating_Seeds_cDNA_P Parameter: Age (day) Value: 2 vs. 0
  misc_feature: MA Experiment 108462 PARAMETER Experiment Name: At_Germinating_Seeds_cDNA_P Parameter: Tissue Value: Germinating Seeds
  misc_feature: MA Experiment ID: 108463 Result: Up-regulated in Transcription
  misc_feature: MA Experiment 108463 PARAMETER Experiment Name: At_Germinating_Seeds_cDNA_P Parameter: Age (day) Value: 3 vs. 0
  misc_feature: MA Experiment 108463 PARAMETER Experiment Name: At_Germinating_Seeds_cDNA_P Parameter: Tissue Value: Germinating Seeds
  misc_feature: MA Experiment ID: 108464 Result: Up-regulated in Transcription
  misc_feature: MA Experiment 108464 PARAMETER Experiment Name: At_Germinating_Seeds_cDNA_P Parameter: Age (day) Value: 4 vs. 0
  misc_feature: MA Experiment 108464 PARAMETER Experiment Name: At_Germinating_Seeds_cDNA_P Parameter: Tissue Value: Germinating Seeds
  misc_feature: MA Experiment ID: 108488 Result: Up-regulated in Transcription
  misc_feature: MA Experiment ID: 108595 Result: Down-regulated in Transcription
  misc_feature: MA Experiment 108595 PARAMETER Experiment Name: At_Ler-pi_Ovule_cDNA_P Parameter: Plant Line Value: null
  misc_feature: MA Experiment ID: 20000069 Result: Down-regulated in Transcription
  misc_feature: MA Experiment 20000069 PARAMETER Experiment Name: At_100uM_ABA_Mutants_cDNA_P Parameter: Plant Line Value: CS23
  misc_feature: MA Experiment 20000069 PARAMETER Experiment Name: At_100uM_ABA_Mutants_cDNA_P Parameter: Timepoint (hr) Value: 6
  misc_feature: MA Experiment 20000069 PARAMETER Experiment Name: At_100uM_ABA_Mutants_cDNA_P Parameter: Tissue Value: Aerial
  misc_feature: MA Experiment 20000069 PARAMETER Experiment Name: At_100uM_ABA_Mutants_cDNA_P Parameter: Treatment Value: 100uM ABA vs. No Treatment
  misc_feature: MA Experiment ID: 20000070 Result: Down-regulated in Transcription
  misc_feature: MA Experiment 20000070 PARAMETER Experiment Name: At_100uM_ABA_Mutants_cDNA_P Parameter: Plant Line Value: CS24
  misc_feature: MA Experiment 20000070 PARAMETER Experiment Name: At_100uM_ABA_Mutants_cDNA_P Parameter: Timepoint (hr) Value: 6
  misc_feature: MA Experiment 20000070 PARAMETER Experiment Name: At_100uM_ABA_Mutants_cDNA_P Parameter: Tissue Value: Aerial
  misc_feature: MA Experiment 20000070 PARAMETER Experiment Name: At_100uM_ABA_Mutants_cDNA_P Parameter: Treatment Value: 100uM ABA vs. No Treatment
  misc_feature: MA Experiment ID: 20000071 Result: Down-regulated in Transcription
  misc_feature: MA Experiment 20000071 PARAMETER Experiment Name: At_100uM_ABA_Mutants_cDNA_P Parameter: Plant Line Value: CS8104
  misc_feature: MA Experiment 20000071 PARAMETER Experiment Name: At_100uM_ABA_Mutants_cDNA_P Parameter: Timepoint (hr) Value: 6
  misc_feature: MA Experiment 20000071 PARAMETER Experiment Name: At_100uM_ABA_Mutants_cDNA_P Parameter: Tissue Value: Aerial
  misc_feature: MA Experiment 20000071 PARAMETER Experiment Name: At_100uM_ABA_Mutants_cDNA_P Parameter: Treatment Value: 100uM ABA vs. No Treatment
  misc_feature: MA Experiment ID: 20000086 Result: Down-regulated in Transcription
  misc_feature: MA Experiment 20000086 PARAMETER Experiment Name: At_100uM_ABA_Mutants_cDNA_P Parameter: Plant Line Value: CS22
  misc_feature: MA Experiment 20000086 PARAMETER Experiment Name: At_100uM_ABA_Mutants_cDNA_P Parameter: Timepoint (hr) Value: 6
  misc_feature: MA Experiment 20000086 PARAMETER Experiment Name: At_100uM_ABA_Mutants_cDNA_P Parameter: Tissue Value: Aerial
  misc_feature: MA Experiment 20000086 PARAMETER Experiment Name: At_100uM_ABA_Mutants_cDNA_P Parameter: Treatment Value: 100uM ABA vs. No Treatment
  misc_feature: MA Experiment ID: 20000087 Result: Down-regulated in Transcription
  misc_feature: MA Experiment 20000087 PARAMETER Experiment Name: At_100uM_ABA_Mutants_cDNA_P Parameter: Plant Line Value: WS
  misc_feature: MA Experiment 20000087 PARAMETER Experiment Name: At_100uM_ABA_Mutants_cDNA_P Parameter: Timepoint (hr) Value: 6
  misc_feature: MA Experiment 20000087 PARAMETER Experiment Name: At_100uM_ABA_Mutants_cDNA_P Parameter: Tissue Value: Aerial
  misc_feature: MA Experiment 20000087 PARAMETER Experiment Name: At_100uM_ABA_Mutants_cDNA_P Parameter: Treatment Value: 100uM ABA vs. No Treatment
  misc_feature: MA Experiment ID: 20000117 Result: Down-regulated in Transcription
  misc_feature: MA Experiment 20000117 PARAMETER Experiment Name: At_100uM_ABA_Mutants_cDNA_P Parameter: Plant Line Value: Columbia
  misc_feature: MA Experiment 20000117 PARAMETER Experiment Name: At_100uM_ABA_Mutants_cDNA_P Parameter: Timepoint (hr) Value: 6
  misc_feature: MA Experiment 20000117 PARAMETER Experiment Name: At_100uM_ABA_Mutants_cDNA_P Parameter: Tissue Value: Aerial
  misc_feature: MA Experiment 20000117 PARAMETER Experiment Name: At_100uM_ABA_Mutants_cDNA_P Parameter: Treatment Value: 100uM ABA vs. No Treatment
  misc_feature: MA Experiment ID: 20000180 Result: Up-regulated in Transcription
  misc_feature: MA Experiment 20000180 PARAMETER Experiment Name: At_Germinating_Seeds_P Parameter: Age (hr) Value: 24 vs. 0
  misc_feature: MA Experiment 20000180 PARAMETER Experiment Name: At_Germinating_Seeds_P Parameter: Tissue Value: Germinating Seeds
  misc_feature: MA Experiment ID: 20000184 Result: Up-regulated in Transcription
  misc_feature: MA Experiment 20000184 PARAMETER Experiment Name: At_Shoots__P Parameter: Age (day) Value: 7
  misc_feature: MA Experiment 20000184 PARAMETER Experiment Name: At_Shoots__P Parameter: Tissue Value: Shoots vs. Whole Plant
  misc_feature: MA Experiment ID: 20000185 Result: Down-regulated in Transcription
  misc_feature: MA Experiment 20000185 PARAMETER Experiment Name: At_Roots__P Parameter: Age (day) Value: 7 vs. 21
  misc_feature: MA Experiment 20000185 PARAMETER Experiment Name: At_Roots__P Parameter: Organism Value: A. thaliana
  misc_feature: MA Experiment 20000185 PARAMETER Experiment Name: At_Roots__P Parameter: Tissue Value: Roots vs. Whole Plant
  misc_feature: MA Experiment ID: 20000438 Result: Up-regulated in Transcription
  misc_feature: MA Experiment 20000438 PARAMETER Experiment Name: At_Shoots__P Parameter: Age (day) Value: 14
  misc_feature: MA Experiment 20000438 PARAMETER Experiment Name: At_Shoots__P Parameter: Tissue Value: Shoots vs. Whole Plant
  misc_feature: MA Experiment ID: 20000439 Result: Down-regulated in Transcription
  misc_feature: MA Experiment 20000439 PARAMETER Experiment Name: At_Roots__P Parameter: Age (day) Value: 14 vs. 21
  misc_feature: MA Experiment 20000439 PARAMETER Experiment Name: At_Roots__P Parameter: Organism Value: A. thaliana
  misc_feature: MA Experiment 20000439 PARAMETER Experiment Name: At_Roots__P Parameter: Tissue Value: Roots vs. Whole Plant
  misc_feature: MA Experiment ID: 20000495 Result: Down-regulated in Transcription
  misc_feature: MA Experiment 20000495 PARAMETER Experiment Name: At_Guard_Cells_P Parameter: Harvest Date Value: 8/2/2002
  misc_feature: MA Experiment 20000495 PARAMETER Experiment Name: At_Guard_Cells_P Parameter: Organism Value: A. thaliana
  misc_feature: MA Experiment 20000495 PARAMETER Experiment Name: At_Guard_Cells_P Parameter: Tissue Value: Guard Cells vs. Leaves
  misc_feature: MA Experiment ID: 20000794 Result: Down-regulated in Transcription
  misc_feature: MA Experiment 20000794 PARAMETER Experiment Name: At_Petals_P Parameter: Age (day) Value: 23-25 days
  misc_feature: MA Experiment 20000794 PARAMETER Experiment Name: At_Petals_P Parameter: Plant Line Value: WS
  misc_feature: MA Experiment 20000794 PARAMETER Experiment Name: At_Petals_P Parameter: Tissue Value: Petals vs. Whole plant
  misc_feature: MA Experiment ID: 20001248 Result: Down-regulated in Transcription
  misc_feature: MA Experiment 20001248 PARAMETER Experiment Name: At_Far-red-induction_P Parameter: Age (day) Value: 7
  misc_feature: MA Experiment 20001248 PARAMETER Experiment Name: At_Far-red-induction_P Parameter: Light Value: Far-red vs. White
  misc_feature: MA Experiment 20001248 PARAMETER Experiment Name: At_Far-red-induction_P Parameter: Organism Value: A. thaliana
  misc_feature: MA Experiment 20001248 PARAMETER Experiment Name: At_Far-red-induction_P Parameter: Plant Line Value: Columbia
  misc_feature: MA Experiment 20001248 PARAMETER Experiment Name: At_Far-red-induction_P Parameter: Timepoint (hr) Value: 4
  misc_feature: MA Experiment 20001248 PARAMETER Experiment Name: At_Far-red-induction_P Parameter: Tissue Value: Whole Plant
  misc_feature: MA Experiment ID: 20001450 Result: Down-regulated in Transcription
  misc_feature: MA Experiment 20001450 PARAMETER Experiment Name: At_Far-red-induction_P Parameter: Age (day) Value: 7
  misc_feature: MA Experiment 20001450 PARAMETER Experiment Name: At_Far-red-induction_P Parameter: Light Value: Far-red vs. White
  misc_feature: MA Experiment 20001450 PARAMETER Experiment Name: At_Far-red-induction_P Parameter: Organism Value: A. thaliana
  misc_feature: MA Experiment 20001450 PARAMETER Experiment Name: At_Far-red-induction_P Parameter: Plant Line Value: Columbia
  misc_feature: MA Experiment 20001450 PARAMETER Experiment Name: At_Far-red-induction_P Parameter: Timepoint (hr) Value: 8
  misc_feature: MA Experiment 20001450 PARAMETER Experiment Name: At_Far-red-induction_P Parameter: Tissue Value: Whole Plant
  misc_feature: MA Experiment ID: 20001451 Result: Down-regulated in Transcription
  misc_feature: MA Experiment 20001451 PARAMETER Experiment Name: At_Far-red-induction_P Parameter: Age (day) Value: 7
  misc_feature: MA Experiment 20001451 PARAMETER Experiment Name: At_Far-red-induction_P Parameter: Light Value: Far-red vs. White
  misc_feature: MA Experiment 20001451 PARAMETER Experiment Name: At_Far-red-induction_P Parameter: Organism Value: A. thaliana
  misc_feature: MA Experiment 20001451 PARAMETER Experiment Name: At_Far-red-induction_P Parameter: Plant Line Value: Columbia
  misc_feature: MA Experiment 20001451 PARAMETER Experiment Name: At_Far-red-induction_P Parameter: Timepoint (hr) Value: 24
  misc_feature: MA Experiment 20001451 PARAMETER Experiment Name: At_Far-red-induction_P Parameter: Tissue Value: Whole Plant
  misc_feature: MA Experiment ID: 20001557 Result: Down-regulated in Transcription
  misc_feature: MA Experiment 20001557 PARAMETER Experiment Name: At_Drought_Soil_Dry_P Parameter: Age (day) Value: 27
  misc_feature: MA Experiment 20001557 PARAMETER Experiment Name: At_Drought_Soil_Dry_P Parameter: Organism Value: A. thaliana
  misc_feature: MA Experiment 20001557 PARAMETER Experiment Name: At_Drought_Soil_Dry_P Parameter: Plant Line Value: WS
  misc_feature: MA Experiment 20001557 PARAMETER Experiment Name: At_Drought_Soil_Dry_P Parameter: Post Timepoint (hr) Value: 3
  misc_feature: MA Experiment 20001557 PARAMETER Experiment Name: At_Drought_Soil_Dry_P Parameter: Post-Treatment Value: Re-Water vs. No Drought
  misc_feature: MA Experiment 20001557 PARAMETER Experiment Name: At_Drought_Soil_Dry_P Parameter: Timepoint (day) Value: 13
  misc_feature: MA Experiment 20001557 PARAMETER Experiment Name: At_Drought_Soil_Dry_P Parameter: Treatment Value: Drought vs. No Drought
  misc_feature: MA Experiment ID: 20001757 Result: Up-regulated in Transcription
  misc_feature: MA Experiment 20001757 PARAMETER Experiment Name: At_50mM_NH4NO3_L-to-H_P Parameter: Timepoint (hr) Value: 6
  misc_feature: MA Experiment 20001757 PARAMETER Experiment Name: At_50mM_NH4NO3_L-to-H_P Parameter: Tissue Value: Leaf
  misc_feature: MA Experiment 20001757 PARAMETER Experiment Name: At_50mM_NH4NO3_L-to-H_P Parameter: Treatment Value: 50mM NH4NO3 vs 100mM Mannitol
  misc_feature: MA Experiment ID: 20001905 Result: Down-regulated in Transcription
  misc_feature: MA Experiment 20001905 PARAMETER Experiment Name: At_Drought_Reproduction_P Parameter: Age (day) Value: 40
  misc_feature: MA Experiment 20001905 PARAMETER Experiment Name: At_Drought_Reproduction_P Parameter: Organism Value: A. thaliana
  misc_feature: MA Experiment 20001905 PARAMETER Experiment Name: At_Drought_Reproduction_P Parameter: Plant Line Value: WS
  misc_feature: MA Experiment 20001905 PARAMETER Experiment Name: At_Drought_Reproduction_P Parameter: Timepoint (day) Value: 10
  misc_feature: MA Experiment 20001905 PARAMETER Experiment Name: At_Drought_Reproduction_P Parameter: Tissue Value: Rosettes
  misc_feature: MA Experiment 20001905 PARAMETER Experiment Name: At_Drought_Reproduction_P Parameter: Treatment Value: Drought vs. No Drought
acacataacacacacacatcttcttcctctctttatcttcttcttctctgtttctctaagaagatagaacaatcccaagattctcctcttatttgatcaaccatgtcgaatgtcttgctatccccaaacggctacgtatttgcatcgcctaaacctcttggcagattcatcaattcaaagtccggcggacggaaacttttcttctccgtcgttagagcttcttccgatgatgctgattgtaatgccgaagaatgtgctcccgagaaggaggtaggaacagtgagtatggaatggttagctggagagaagacgaaagtggtgggaacatttcctcctcggaagccgcgtggttggactggctatgttgagaaagatactgctggtcagactaatgtttactccattgagcctgcagtatatgttgcagagagcgcgattagctcaggtactgcaggatcatcggctgatggggctgagaacacagcagcaatcgtagcaggcattgctcttatcgcagtcgctgcagcttcctctatactcctccaagtcgggaaagatgccccaactcgacccaaagcagtggattacagtggaccgtctcttagctactacatcaacaagttcaagccttctgaaattgttcaaccttctaccccctccgtcacagaagccccaccggtggccgagctagaaacttcactgccagaaactccatcggtggctcagcaagaaacctcactgccggaaactatggctagtgaggctcagccagaggcgtcttctgttccaacaacaagtagtacctcttaggggcttagcctaggattatatctttgtgtaaaaatgagatgaagcatataccaagattatgcattctgttaatattcggatatacctatatgtatgtatacactctgtcactcttctctttgagtgaatgattatatcaaatctcaaatcc

SEQ ID NO: 105322 - protein, 235 aa, Arabidopsis thaliana; identical to SEQ ID NO: 30350
  peptide (1)..(235): Ceres Seq. ID no. 13616966
  misc_feature (1)..(235): Homolog of NCBI NO: 18415378 NR Description: proline-rich protein family [Arabidopsis >gi|9759558|dbj|BAB11160.1| gene_id:MOJ9.19~unknown protein thaliana] >gi|15293031|gb|AAK93626.1| unknown protein
  misc_feature (1)..(235): Homolog of NCBI NO: 21553857 NR Description: unknown [Arabidopsis thaliana]

SEQ ID NO: 105323 - protein, 174 aa, Arabidopsis thaliana; identical to SEQ ID NO: 30351
  peptide (1)..(174): Ceres Seq. ID no. 13616967
  misc_feature (1)..(174): Homolog of NCBI NO: 18415378 NR Description: proline-rich protein family [Arabidopsis >gi|9759558|dbj|BAB11160.1| gene_id:MOJ9.19~unknown protein thaliana] >gi|15293031|gb|AAK93626.1| unknown protein
  misc_feature (1)..(174): Homolog of NCBI NO: 21553857 NR Description: unknown [Arabidopsis thaliana]

SEQ ID NO: 105324 - DNA, 1579 bp, Arabidopsis thaliana
  misc_feature (1)..(1579): Ceres Seq. ID no. 13616968
  misc_feature: MA Experiment ID: 108435 Result: Up-regulated in Transcription
  misc_feature: MA Experiment 108435 PARAMETER Experiment Name: At_stm_Mutants_cDNA_P Parameter: Plant Line Value: wt Landsburg vs stm
  misc_feature: MA Experiment 108435 PARAMETER Experiment Name: At_stm_Mutants_cDNA_P Parameter: Tissue Value: Shoot Apical Meristem Region
  misc_feature: MA Experiment ID: 108461 Result: Up-regulated in Transcription
  misc_feature: MA Experiment 108461 PARAMETER Experiment Name: At_Germinating_Seeds_cDNA_P Parameter: Age (day) Value: 1 vs. 0
  misc_feature: MA Experiment 108461 PARAMETER Experiment Name: At_Germinating_Seeds_cDNA_P Parameter: Tissue Value: Germinating Seeds
  misc_feature: MA Experiment ID: 108462 Result: Up-regulated in Transcription
  misc_feature: MA Experiment 108462 PARAMETER Experiment Name: At_Germinating_Seeds_cDNA_P Parameter: Age (day) Value: 2 vs. 0
  misc_feature: MA Experiment 108462 PARAMETER Experiment Name: At_Germinating_Seeds_cDNA_P Parameter: Tissue Value: Germinating Seeds
  misc_feature: MA Experiment ID: 108463 Result: Up-regulated in Transcription
  misc_feature: MA Experiment 108463 PARAMETER Experiment Name: At_Germinating_Seeds_cDNA_P Parameter: Age (day) Value: 3 vs. 0
  misc_feature: MA Experiment 108463 PARAMETER Experiment Name: At_Germinating_Seeds_cDNA_P Parameter: Tissue Value: Germinating Seeds
  misc_feature: MA Experiment ID: 108464 Result: Up-regulated in Transcription
  misc_feature: MA Experiment 108464 PARAMETER Experiment Name: At_Germinating_Seeds_cDNA_P Parameter: Age (day) Value: 4 vs. 0
  misc_feature: MA Experiment 108464 PARAMETER Experiment Name: At_Germinating_Seeds_cDNA_P Parameter: Tissue Value: Germinating Seeds
  misc_feature: MA Experiment ID: 108501 Result: Up-regulated in Transcription
  misc_feature: MA Experiment 108501 PARAMETER Experiment Name: At_ap2_floral_buds_cDNA_P Parameter: Plant Line Value: ap2 (Ler.)
  misc_feature: MA Experiment 108501 PARAMETER Experiment Name: At_ap2_floral_buds_cDNA_P Parameter: Tissue Value: Closed Flower
  misc_feature: MA Experiment ID: 108594 Result: Down-regulated in Transcription
  misc_feature: MA Experiment 108594 PARAMETER Experiment Name: At_Ler-rhl_Root_cDNA_P Parameter: Plant Line Value: null
  misc_feature: MA Experiment ID: 108595 Result: Up-regulated in Transcription
  misc_feature: MA Experiment 108595 PARAMETER Experiment Name: At_Ler-pi_Ovule_cDNA_P Parameter: Plant Line Value: null
  misc_feature: MA Experiment ID: 108668 Result: Down-regulated in Transcription
  misc_feature: MA Experiment 108668 PARAMETER Experiment Name: At_2mM_SA_cDNA_P Parameter: Plant Line Value: WS
  misc_feature: MA Experiment 108668 PARAMETER Experiment Name: At_2mM_SA_cDNA_P Parameter: Timepoint (hr) Value: 6
  misc_feature: MA Experiment 108668 PARAMETER Experiment Name: At_2mM_SA_cDNA_P Parameter: Treatment Value: 2mM SA vs. No Treatment
  misc_feature: MA Experiment ID: 20000069 Result: Down-regulated in Transcription
  misc_feature: MA Experiment 20000069 PARAMETER Experiment Name: At_100uM_ABA_Mutants_cDNA_P Parameter: Plant Line Value: CS23
  misc_feature: MA Experiment 20000069 PARAMETER Experiment Name: At_100uM_ABA_Mutants_cDNA_P Parameter: Timepoint (hr) Value: 6
  misc_feature: MA Experiment 20000069 PARAMETER Experiment Name: At_100uM_ABA_Mutants_cDNA_P Parameter: Tissue Value: Aerial
  misc_feature: MA Experiment 20000069 PARAMETER Experiment Name: At_100uM_ABA_Mutants_cDNA_P Parameter: Treatment Value: 100uM ABA vs. No Treatment
  misc_feature: MA Experiment ID: 20000093 Result: Down-regulated in Transcription
  misc_feature: MA Experiment 20000093 PARAMETER Experiment Name: At_42deg_Heat_cDNA_P Parameter: Temperature (deg C) Value: 42 vs. 22
  misc_feature: MA Experiment 20000093 PARAMETER Experiment Name: At_42deg_Heat_cDNA_P Parameter: Timepoint (hr) Value: 0.5
  misc_feature: MA Experiment 20000093 PARAMETER Experiment Name: At_42deg_Heat_cDNA_P Parameter: Tissue Value: Aerial
  misc_feature: MA Experiment ID: 20000113 Result: Down-regulated in Transcription
  misc_feature: MA Experiment 20000113 PARAMETER Experiment Name: At_42deg_Heat_cDNA_P Parameter: Temperature (deg C) Value: 42 vs. 22
  misc_feature: MA Experiment 20000113 PARAMETER Experiment Name: At_42deg_Heat_cDNA_P Parameter: Timepoint (hr) Value: 8
  misc_feature: MA Experiment 20000113 PARAMETER Experiment Name: At_42deg_Heat_cDNA_P Parameter: Tissue Value: Aerial
  misc_feature: MA Experiment ID: 20000144 Result: Down-regulated in Transcription
  misc_feature: MA Experiment 20000144 PARAMETER Experiment Name: At_42deg_Heat_cDNA_P Parameter: Temperature (deg C) Value: 42 vs. 22
  misc_feature: MA Experiment 20000144 PARAMETER Experiment Name: At_42deg_Heat_cDNA_P Parameter: Timepoint (hr) Value: 1
  misc_feature: MA Experiment 20000144 PARAMETER Experiment Name: At_42deg_Heat_cDNA_P Parameter: Tissue Value: Aerial
  misc_feature: MA Experiment ID: 20000180 Result: Up-regulated in Transcription
  misc_feature: MA Experiment 20000180 PARAMETER Experiment Name: At_Germinating_Seeds_P Parameter: Age (hr) Value: 24 vs. 0
  misc_feature: MA Experiment 20000180 PARAMETER Experiment Name: At_Germinating_Seeds_P Parameter: Tissue Value: Germinating Seeds
  misc_feature: MA Experiment ID: 20000227 Result: Down-regulated in Transcription
  misc_feature: MA Experiment 20000227 PARAMETER Experiment Name: At_Root-Tips-vs-Tops_P Parameter: Tissue Value: Root Tips vs. Root Tops
  misc_feature: MA Experiment ID: 20000234 Result: Up-regulated in Transcription
  misc_feature: MA Experiment 20000234 PARAMETER Experiment Name: At_Siliques_P Parameter: Age (day) Value: 21
  misc_feature: MA Experiment 20000234 PARAMETER Experiment Name: At_Siliques_P Parameter: Organism Value: A. thaliana
  misc_feature: MA Experiment 20000234 PARAMETER Experiment Name: At_Siliques_P Parameter: Plant Line Value: WS
  misc_feature: MA Experiment 20000234 PARAMETER Experiment Name: At_Siliques_P Parameter: Tissue Value: Less Than 5mm Siliques vs. Whole Plant
  misc_feature: MA Experiment ID: 20000235 Result: Up-regulated in Transcription
  misc_feature: MA Experiment 20000235 PARAMETER Experiment Name: At_Siliques_P Parameter: Age (day) Value: 21
  misc_feature: MA Experiment 20000235 PARAMETER Experiment Name: At_Siliques_P Parameter: Organism Value: A. thaliana
  misc_feature: MA Experiment 20000235 PARAMETER Experiment Name: At_Siliques_P Parameter: Plant Line Value: WS
  misc_feature: MA Experiment 20000235 PARAMETER Experiment Name: At_Siliques_P Parameter: Tissue Value: 5-10mm Siliques vs. Whole Plant
  misc_feature: MA Experiment ID: 20000264 Result: Up-regulated in Transcription
  misc_feature: MA Experiment 20000264 PARAMETER Experiment Name: At_Open_Flower_P Parameter: Age (day) Value: 21
  misc_feature: MA Experiment 20000264 PARAMETER Experiment Name: At_Open_Flower_P Parameter: Plant Line Value: WS
  misc_feature: MA Experiment 20000264 PARAMETER Experiment Name: At_Open_Flower_P Parameter: Tissue Value: Open Flower vs. Whole Plant
  misc_feature: MA Experiment ID: 20000265 Result: Up-regulated in Transcription
  misc_feature: MA Experiment 20000265 PARAMETER Experiment Name: At_Open_Flower_P Parameter: Age (day) Value: 21
  misc_feature: MA Experiment 20000265 PARAMETER Experiment Name: At_Open_Flower_P Parameter: Plant Line Value: WS
  misc_feature: MA Experiment 20000265 PARAMETER Experiment Name: At_Open_Flower_P Parameter: Tissue Value: Closed Flower vs. Whole Plant
  misc_feature: MA Experiment ID: 20000286 Result: Up-regulated in Transcription
  misc_feature: MA Experiment 20000286 PARAMETER Experiment Name: At_Open_Flower_P Parameter: Age (day) Value: 21
  misc_feature: MA Experiment 20000286 PARAMETER Experiment Name: At_Open_Flower_P Parameter: Plant Line Value: WS
  misc_feature: MA Experiment 20000286 PARAMETER Experiment Name: At_Open_Flower_P Parameter: Tissue Value: Half Open vs. Whole Plant
  misc_feature: MA Experiment ID: 20000495 Result: Up-regulated in Transcription
  misc_feature: MA Experiment 20000495 PARAMETER Experiment Name: At_Guard_Cells_P Parameter: Harvest Date Value: 8/2/2002
  misc_feature: MA Experiment 20000495 PARAMETER Experiment Name: At_Guard_Cells_P Parameter: Organism Value: A. thaliana
  misc_feature: MA Experiment 20000495 PARAMETER Experiment Name: At_Guard_Cells_P Parameter: Tissue Value: Guard Cells vs. Leaves
  misc_feature: MA Experiment ID: 20000794 Result: Down-regulated in Transcription
  misc_feature: MA Experiment 20000794 PARAMETER Experiment Name: At_Petals_P Parameter: Age (day) Value: 23-25 days
  misc_feature: MA Experiment 20000794 PARAMETER Experiment Name: At_Petals_P Parameter: Plant Line Value: WS
  misc_feature: MA Experiment 20000794 PARAMETER Experiment Name: At_Petals_P Parameter: Tissue Value: Petals vs. Whole plant
  misc_feature: MA Experiment ID: 20001451 Result: Down-regulated in Transcription
  misc_feature: MA Experiment 20001451 PARAMETER Experiment Name: At_Far-red-induction_P Parameter: Age (day) Value: 7
  misc_feature: MA Experiment 20001451 PARAMETER Experiment Name: At_Far-red-induction_P Parameter: Light Value: Far-red vs. White
  misc_feature: MA Experiment 20001451 PARAMETER Experiment Name: At_Far-red-induction_P Parameter: Organism Value: A. thaliana
  misc_feature: MA Experiment 20001451 PARAMETER Experiment Name: At_Far-red-induction_P Parameter: Plant Line Value: Columbia
  misc_feature: MA Experiment 20001451 PARAMETER Experiment Name: At_Far-red-induction_P Parameter: Timepoint (hr) Value: 24
  misc_feature: MA Experiment 20001451 PARAMETER Experiment Name: At_Far-red-induction_P Parameter: Tissue Value: Whole Plant
  misc_feature: MA Experiment ID: 20001555 Result: Down-regulated in Transcription
  misc_feature: MA Experiment 20001555 PARAMETER Experiment Name: At_Drought_Soil_Dry_P Parameter: Age (day) Value: 24
  misc_feature: MA Experiment 20001555 PARAMETER Experiment Name: At_Drought_Soil_Dry_P Parameter: Organism Value: A. thaliana
  misc_feature: MA Experiment 20001555 PARAMETER Experiment Name: At_Drought_Soil_Dry_P Parameter: Plant Line Value: WS
  misc_feature: MA Experiment 20001555 PARAMETER Experiment Name: At_Drought_Soil_Dry_P Parameter: Post Timepoint (hr) Value: None
  misc_feature: MA Experiment 20001555 PARAMETER Experiment Name: At_Drought_Soil_Dry_P Parameter: Post-Treatment Value: None
  misc_feature: MA Experiment 20001555 PARAMETER Experiment Name: At_Drought_Soil_Dry_P Parameter: Timepoint (day) Value: 10
  misc_feature: MA Experiment 20001555 PARAMETER Experiment Name: At_Drought_Soil_Dry_P Parameter: Treatment Value: Drought vs. No Drought
  misc_feature: MA Experiment ID: 20001556 Result: Down-regulated in Transcription
  misc_feature: MA Experiment 20001556 PARAMETER Experiment Name: At_Drought_Soil_Dry_P Parameter: Age (day) Value: 26
  misc_feature: MA Experiment 20001556 PARAMETER Experiment Name: At_Drought_Soil_Dry_P Parameter: Organism Value: A. thaliana
  misc_feature: MA Experiment 20001556 PARAMETER Experiment Name: At_Drought_Soil_Dry_P Parameter: Plant Line Value: WS
  misc_feature: MA Experiment 20001556 PARAMETER Experiment Name: At_Drought_Soil_Dry_P Parameter: Post Timepoint (hr) Value: None
  misc_feature: MA Experiment 20001556 PARAMETER Experiment Name: At_Drought_Soil_Dry_P Parameter: Post-Treatment Value: None
  misc_feature: MA Experiment 20001556 PARAMETER Experiment Name: At_Drought_Soil_Dry_P Parameter: Timepoint (day) Value: 12
  misc_feature: MA Experiment 20001556 PARAMETER Experiment Name: At_Drought_Soil_Dry_P Parameter: Treatment Value: Drought vs. No Drought
  misc_feature: MA Experiment ID: 20001560 Result: Up-regulated in Transcription
  misc_feature: MA Experiment 20001560 PARAMETER Experiment Name: At_Drought_Soil_Dry_P Parameter: Age (day) Value: 28
  misc_feature: MA Experiment 20001560 PARAMETER Experiment Name: At_Drought_Soil_Dry_P Parameter: Organism Value: A. thaliana
  misc_feature: MA Experiment 20001560 PARAMETER Experiment Name: At_Drought_Soil_Dry_P Parameter: Plant Line Value: WS
  misc_feature: MA Experiment 20001560 PARAMETER Experiment Name: At_Drought_Soil_Dry_P Parameter: Post Timepoint (hr) Value: None
  misc_feature: MA Experiment 20001560 PARAMETER Experiment Name: At_Drought_Soil_Dry_P Parameter: Post-Treatment Value: None
  misc_feature: MA Experiment 20001560 PARAMETER Experiment Name: At_Drought_Soil_Dry_P Parameter: Timepoint (day) Value: 14
  misc_feature: MA Experiment 20001560 PARAMETER Experiment Name: At_Drought_Soil_Dry_P Parameter: Treatment Value: Drought vs. No Drought
  misc_feature: MA Experiment ID: 20001911 Result: Down-regulated in Transcription
  misc_feature: MA Experiment 20001911 PARAMETER Experiment Name: At_Drought_Reproduction_P Parameter: Age (day) Value: 40
  misc_feature: MA Experiment 20001911 PARAMETER Experiment Name: At_Drought_Reproduction_P Parameter: Organism Value: A. thaliana
  misc_feature: MA Experiment 20001911 PARAMETER Experiment Name: At_Drought_Reproduction_P Parameter: Plant Line Value: WS
  misc_feature: MA Experiment 20001911 PARAMETER Experiment Name: At_Drought_Reproduction_P Parameter: Timepoint (day) Value: 10
  misc_feature: MA Experiment 20001911 PARAMETER Experiment Name: At_Drought_Reproduction_P Parameter: Tissue Value: Flowers
  misc_feature: MA Experiment 20001911 PARAMETER Experiment Name: At_Drought_Reproduction_P Parameter: Treatment Value: Drought vs. No Drought
aacccatccaacccaaaagcatacaatacaatgtctactcttgttttattcctccaacttttttccatcctaccattagcacttgggttgaaccacccaaattgtgacctgaccaagactcaagaccaaggctctaccctaagaatcttccacatagacagcccttgctcccccttcaaatcatcatccccactctcatgggaagcgcgtgtgctccagacgctggctcaagaccaggcccgtctccagtacctgagcagcctcgtcgccgggagatctgtagtccccattgcctcagggcgtcaaatgttgcaaagcactacatacattgtcaaggctttgatcggtactccggctcagccgctgctcctagccatggacacgagcagtgacgtggcttggattccttgctccggctgcgttggctgtccttctaacacggccttttcccctgctaagtctacatccttcaagaacgttagctgcagcgctcctcagtgtaagcaggtaccaaaccccacgtgtggagcacgcgcgtgctctttcaacctcacctatggaagctcctccattgcggctaacctctctcaagacacgatacgtcttgccgccgatccgatcaaagcctttacattcggatgcgtcaacaaagtcgccggtggaggaaccatcccaccacctcaaggcttgttgggcttgggacgaggcccactttcactcatgtcacaggctcagtctatttacaagtccactttctcttactgtttgccaagtttcaggtctctgaccttctctggttctctcagactcggccctacctcccagccccagcgcgtgaagtacactcaacttctcagaaaccctagaaggtcttctctgtactacgtcaacctcgttgcgatccgcgttggtcggaaagtcgtcgatttaccgccggcagctattgcttttaatccttcaaccggcgctggaaccatcttcgactccggaactgtgtacacgcggctggctaaaccggtttacgaggcagtgaggaacgagttcaggaagcgcgtgaagccaaccacagccgtggtgacgtcactcgggggtttcgacacgtgctactcagggcaagtcaaggtgccgacgataacattcatgttcaagggagtgaacatgacgatgccggctgataacctgatgttacacagtaccgccggaagcacgtcgtgcctcgccatggctgcagcgccggaaaacgtaaactctgtcgtcaatgtgatcgcaagcatgcagcagcagaaccaccgtgtcctcatcgacgtccccaatggacggctcggtttggcacgtgaacgatgctcttagaaagatgaatgagacaataagagcctactcatatttatgcagagacttgtttgtttgtgttatttgtgtgtttcatttttgtcttgtcttgcgtcgtttgcttcaccagtcttagagggcggaggtgtgtagcatttgtgctatctagtaatttatgtttttaattgttcttcaattatctagagtgttggatctaagctaatcaaataatgaaactatattatatttc

SEQ ID NO: 105325 - protein, 449 aa, Arabidopsis thaliana; identical to SEQ ID NO: 29838
  peptide (1)..(449): Ceres Seq. ID no. 13616969
  misc_feature (52)..(446): Pfam Name: Eukaryotic aspartyl protease Pfam Description: Eukaryotic aspartyl protease
  misc_feature (11)..(449): Homolog of NCBI NO: 15240680 NR Description: nucleoid DNA-binding-related protein [Arabidopsis
  misc_feature (16)..(449): Homolog of NCBI NO: 21617933 NR Description: nucleoid DNA-binding-like protein [Arabidopsis
  misc_feature (16)..(449): Homolog of NCBI NO: 15232503 NR Description: nucleoid DNA-binding - like protein [Arabidopsis
  misc_feature (34)..(449): Homolog of NCBI NO: 34899068 NR Description: similar to nucleoid DNA-binding-like protein
  misc_feature (22)..(449): Homolog of NCBI NO: 20161865 NR Description: putative nucleoid DNA-binding-like protein [Oryza
  misc_feature (12)..(449): Homolog of NCBI NO: 18391062 NR Description: expressed protein [Arabidopsis thaliana]
  misc_feature (82)..(449): Homolog of NCBI NO: 21450872 NR Description: unknown protein [Arabidopsis thaliana]
  misc_feature (11)..(449): Homolog of NCBI NO: 34910676 NR Description: P0690B02.2 [Oryza sativa (japonica
  misc_feature (96)..(448): Homolog of NCBI NO: 34895664 NR Description: nucleoid DNA-binding protein cnd41-like protein
  misc_feature (46)..(449): Homolog of NCBI NO: 15223368 NR Description: chloroplast nucleoid DNA binding protein -related

SEQ ID NO: 105326 - protein, 439 aa, Arabidopsis thaliana; identical to SEQ ID NO: 29839
  peptide (1)..(439): Ceres Seq. ID no. 13616970
  misc_feature (42)..(436): Pfam Name: Eukaryotic aspartyl protease Pfam Description: Eukaryotic aspartyl protease
  misc_feature (1)..(439): Homolog of NCBI NO: 15240680 NR Description: nucleoid DNA-binding-related protein [Arabidopsis
  misc_feature (6)..(439): Homolog of NCBI NO: 21617933 NR Description: nucleoid DNA-binding-like protein [Arabidopsis
  misc_feature (6)..(439): Homolog of NCBI NO: 15232503 NR Description: nucleoid DNA-binding - like protein [Arabidopsis
  misc_feature (24)..(439): Homolog of NCBI NO: 34899068 NR Description: similar to nucleoid DNA-binding-like protein
  misc_feature (12)..(439): Homolog of NCBI NO: 20161865 NR Description: putative nucleoid DNA-binding-like protein [Oryza
  misc_feature (2)..(439): Homolog of NCBI NO: 18391062 NR Description: expressed protein [Arabidopsis thaliana]
  misc_feature (72)..(439): Homolog of NCBI NO: 21450872 NR Description: unknown protein [Arabidopsis thaliana]
  misc_feature (1)..(439): Homolog of NCBI NO: 34910676 NR Description: P0690B02.2 [Oryza sativa (japonica
  misc_feature (86)..(438): Homolog of NCBI NO: 34895664 NR Description: nucleoid DNA-binding protein cnd41-like protein
  misc_feature (36)..(439): Homolog of NCBI NO: 15223368 NR Description: chloroplast nucleoid DNA binding protein -related

SEQ ID NO: 105327 - protein, 347 aa, Arabidopsis thaliana; identical to SEQ ID NO: 29840
  peptide (1)..(347): Ceres Seq. ID no. 13616971
  misc_feature (1)..(344): Pfam Name: Eukaryotic aspartyl protease Pfam Description: Eukaryotic aspartyl protease
  misc_feature (1)..(347): Homolog of NCBI NO: 15240680 NR Description: nucleoid DNA-binding-related protein [Arabidopsis
  misc_feature (1)..(347): Homolog of NCBI NO: 21617933 NR Description: nucleoid DNA-binding-like protein [Arabidopsis
  misc_feature (1)..(347): Homolog of NCBI NO: 15232503 NR Description: nucleoid DNA-binding - like protein [Arabidopsis
  misc_feature (1)..(347): Homolog of NCBI NO: 34899068 NR Description: similar to nucleoid DNA-binding-like protein
  misc_feature (1)..(347): Homolog of NCBI NO: 20161865 NR Description: putative nucleoid DNA-binding-like protein [Oryza
  misc_feature (1)..(347): Homolog of NCBI NO: 18391062 NR Description: expressed protein [Arabidopsis thaliana]
  misc_feature (1)..(347): Homolog of NCBI NO: 21450872 NR Description: unknown protein [Arabidopsis thaliana]
  misc_feature (1)..(347): Homolog of NCBI NO: 34910676 NR Description: P0690B02.2 [Oryza sativa (japonica
  misc_feature (1)..(346): Homolog of NCBI NO: 34895664 NR Description: nucleoid DNA-binding protein cnd41-like protein
  misc_feature (1)..(347): Homolog of NCBI NO: 15223368 NR Description: chloroplast nucleoid DNA binding protein -related

SEQ ID NO: 105328 - DNA, 1509 bp, Arabidopsis thaliana
  misc_feature (1)..(1509): Ceres Seq. ID no. 13616972
  misc_feature: MA Experiment ID: 108434 Result: Down-regulated in Transcription
  misc_feature: MA Experiment 108434 PARAMETER Experiment Name: At_Root_Tips_cDNA_P Parameter: Tissue Value: Root Tips
  misc_feature: MA Experiment ID: 108461 Result: Up-regulated in Transcription
  misc_feature: MA Experiment 108461 PARAMETER Experiment Name: At_Germinating_Seeds_cDNA_P Parameter: Age (day) Value: 1 vs. 0
  misc_feature: MA Experiment 108461 PARAMETER Experiment Name: At_Germinating_Seeds_cDNA_P Parameter: Tissue Value: Germinating Seeds
  misc_feature: MA Experiment ID: 108463 Result: Up-regulated in Transcription
  misc_feature: MA Experiment 108463 PARAMETER Experiment Name: At_Germinating_Seeds_cDNA_P Parameter: Age (day) Value: 3 vs. 0
  misc_feature: MA Experiment 108463 PARAMETER Experiment Name: At_Germinating_Seeds_cDNA_P Parameter: Tissue Value: Germinating Seeds
  misc_feature: MA Experiment ID: 108464 Result: Up-regulated in Transcription
  misc_feature: MA Experiment 108464 PARAMETER Experiment Name: At_Germinating_Seeds_cDNA_P Parameter: Age (day) Value: 4 vs. 0
  misc_feature: MA Experiment 108464 PARAMETER Experiment Name: At_Germinating_Seeds_cDNA_P Parameter: Tissue Value: Germinating Seeds
  misc_feature: MA Experiment ID: 108474 Result: Down-regulated in Transcription
  misc_feature: MA Experiment 108474 PARAMETER Experiment Name: At_Drought_Flowers_cDNA_P Parameter: Timepoint (hr) Value: null
  misc_feature: MA Experiment 108474 PARAMETER Experiment Name: At_Drought_Flowers_cDNA_P Parameter: Treatment Value: Drought vs. No Drought
  misc_feature: MA Experiment ID: 108594 Result: Up-regulated in Transcription
  misc_feature: MA Experiment 108594 PARAMETER Experiment Name: At_Ler-rhl_Root_cDNA_P Parameter: Plant Line Value: null
  misc_feature: MA Experiment ID: 108668 Result: Down-regulated in Transcription
  misc_feature: MA Experiment 108668 PARAMETER Experiment Name: At_2mM_SA_cDNA_P Parameter: Plant Line Value: WS
  misc_feature: MA Experiment 108668 PARAMETER Experiment Name: At_2mM_SA_cDNA_P Parameter: Timepoint (hr) Value: 6
  misc_feature: MA Experiment 108668 PARAMETER Experiment Name: At_2mM_SA_cDNA_P Parameter: Treatment Value: 2mM SA vs. No Treatment
  misc_feature: MA Experiment ID: 20000184 Result: Up-regulated in Transcription
  misc_feature: MA Experiment 20000184 PARAMETER Experiment Name: At_Shoots__P Parameter: Age (day) Value: 7
  misc_feature: MA Experiment 20000184 PARAMETER Experiment Name: At_Shoots__P Parameter: Tissue Value: Shoots vs. Whole Plant
  misc_feature: MA Experiment ID: 20000185 Result: Up-regulated in Transcription
  misc_feature: MA Experiment 20000185 PARAMETER Experiment Name: At_Roots__P Parameter: Age (day) Value: 7 vs. 21
  misc_feature: MA Experiment 20000185 PARAMETER Experiment Name: At_Roots__P Parameter: Organism Value: A. thaliana
  misc_feature: MA Experiment 20000185 PARAMETER Experiment Name: At_Roots__P Parameter: Tissue Value: Roots vs. Whole Plant
  misc_feature: MA Experiment ID: 20000264 Result: Down-regulated in Transcription
  misc_feature: MA Experiment 20000264 PARAMETER Experiment Name: At_Open_Flower_P Parameter: Age (day) Value: 21
  misc_feature: MA Experiment 20000264 PARAMETER Experiment Name: At_Open_Flower_P Parameter: Plant Line Value: WS
  misc_feature: MA Experiment 20000264 PARAMETER Experiment Name: At_Open_Flower_P Parameter: Tissue Value: Open Flower vs. Whole Plant
  misc_feature: MA Experiment ID: 20000437 Result: Up-regulated in Transcription
  misc_feature: MA Experiment 20000437 PARAMETER Experiment Name: At_Drought_P Parameter: Age (day) Value: 8
  misc_feature: MA Experiment 20000437 PARAMETER Experiment Name: At_Drought_P Parameter: Organism Value: A. thaliana
  misc_feature: MA Experiment 20000437 PARAMETER Experiment Name: At_Drought_P Parameter: Plant Line Value: WS
  misc_feature: MA Experiment 20000437 PARAMETER Experiment Name: At_Drought_P Parameter: Timepoint (hr) Value: 24
  misc_feature: MA Experiment 20000437 PARAMETER Experiment Name: At_Drought_P Parameter: Tissue Value: Whole Plant
  misc_feature: MA Experiment 20000437 PARAMETER Experiment Name: At_Drought_P Parameter: Treatment Value: Drought vs. No Drought
  misc_feature: MA Experiment ID: 20000439 Result: Up-regulated in Transcription
  misc_feature: MA Experiment 20000439 PARAMETER Experiment Name: At_Roots__P Parameter: Age (day) Value: 14 vs. 21
  misc_feature: MA Experiment 20000439 PARAMETER Experiment Name: At_Roots__P Parameter: Organism Value: A. thaliana
  misc_feature: MA Experiment 20000439 PARAMETER Experiment Name: At_Roots__P Parameter: Tissue Value: Roots vs. Whole Plant
  misc_feature: MA Experiment ID: 20000451 Result: Down-regulated in Transcription
  misc_feature: MA Experiment 20000451 PARAMETER Experiment Name: At_CS6879_Shoots-Roots_P Parameter: Age (day) Value: 14
  misc_feature: MA Experiment 20000451 PARAMETER Experiment Name: At_CS6879_Shoots-Roots_P Parameter: Organism Value: A. thaliana
  misc_feature: MA Experiment 20000451 PARAMETER Experiment Name: At_CS6879_Shoots-Roots_P Parameter: Plant Line Value: CS6879 vs. WS
  misc_feature: MA Experiment 20000451 PARAMETER Experiment Name: At_CS6879_Shoots-Roots_P Parameter: Tissue Value: Roots
  misc_feature: MA Experiment ID: 20001910 Result: Down-regulated in Transcription
  misc_feature: MA Experiment 20001910 PARAMETER Experiment Name: At_Drought_Reproduction_P Parameter: Age (day) Value: 37
  misc_feature: MA Experiment 20001910 PARAMETER Experiment Name: At_Drought_Reproduction_P Parameter: Organism Value: A. thaliana
  misc_feature: MA Experiment 20001910 PARAMETER Experiment Name: At_Drought_Reproduction_P Parameter: Plant Line Value: WS
  misc_feature: MA Experiment 20001910 PARAMETER Experiment Name: At_Drought_Reproduction_P Parameter: Timepoint (day) Value: 7
  misc_feature: MA Experiment 20001910 PARAMETER Experiment Name: At_Drought_Reproduction_P Parameter: Tissue Value: Flowers
  misc_feature: MA Experiment 20001910 PARAMETER Experiment Name: At_Drought_Reproduction_P Parameter: Treatment Value: Drought vs. No Drought
gcatgtgatatagaaatcaagatgggaagccaaggcatgagttcaccgagtcccttggtggtgaagaaatcgcaagtggttatagtgaaaccctcaaaggctacacctgatgtctctctttctctctccacactcgacaacgatccttatctcgaaaccctcgccaaaaccatctatgtctacgctccaccatccccaaacgaccacgtccacgatccagcttccctttttcagcaagctctctctgacgcccttgtctattactaccctctcgctggaaaacttcaccggggatcacacgaccatagactagaattgaggtgcagtcccgcggaaggagtcccctttgttagggcaaccgcagactgtactctctcttccctcaactatttgaaggacatggacactgacttataccaactcgtaccttgtgatgtagctgcgccctctggcgattacaaccctctggctttgcagatcactttgtttgcatgcggagggctcactcttgctacggccctctctcattccttgtgtgatggttttggagcgtctcagtttttcaaaaccttaactgagctcgccgcgggaaaaacacaacctagcatcatccccgtctgggacagacatcgtctcacttctaacaactttagcttaaacgaccaagtggaggagggacaagctcccaagctagttgattttggagaggcttgctcttctgcggcaacttctccctacacacccagcaacgacatggtatgtgagatcctcaacgtgacatccgaagatattactcagctcaaggagaaagttgcgggggtggtcacgactctagagattcttgcggcccacgtctggagagcaaggtgccgggccttgaagttaagtccagatgggacttctcttttcggaatggctgtgggtatacgccgcattgtggagccaccattaccggaagggtactacggaaacgcatttgtcaaagccaacgtagcaatgaaggctggagagttaagcaactcaccgttgtctcacgttgttcagctcattaaagaggcaaagaaagcggcacaggagaagaggtacgtgttggagcagttaagagagacagagaaaacgttgaagatgaatgtagcgtgtgaaggagggaaaggagcgttcatgttgcttactgattggaggcaacttggattgctagacgaaattgattttgggtatggaggatcagtgaatattataccattggtgcccaagtatctgccggatatttgtattttcttgccgaggaagcaaggtggtgttagagtgctagtcacgctgcccaaatctgtaatggtcaacttcaaggaacacataaatcccctaaatacatgaaattaataagcaggtgaatgtaattcacagtgtttctttaaaatatgaaaaggacctcatgcgattgtatatttaaagcttttgtttgctgtttgtttaagtttttcacatttggaaagtaatattttacaaacc

SEQ ID NO: 105329 - protein, 457 aa, Arabidopsis thaliana; identical to SEQ ID NO: 30323
  peptide (1)..(457): Ceres Seq. ID no. 13616973
  misc_feature (19)..(455): Pfam Name: Transferase family Pfam Description: Transferase family
  misc_feature (8)..(457): Homolog of NCBI NO: 15240694 NR Description: transferase family [Arabidopsis thaliana]
  misc_feature (8)..(457): Homolog of NCBI NO: 21553850 NR Description: hypersensitivity-related protein-like protein
  misc_feature (18)..(418): Homolog of NCBI NO: 15232745 NR Description: acyltransferase family [Arabidopsis thaliana]
  misc_feature (427)..(453): Homolog of NCBI NO: 15232745 NR Description: acyltransferase family [Arabidopsis thaliana]
  misc_feature (13)..(455): Homolog of NCBI NO: 15227845 NR Description: transferase family [Arabidopsis thaliana]
  misc_feature (18)..(452): Homolog of NCBI NO: 15224685 NR Description: transferase family [Arabidopsis thaliana]
  misc_feature (24)..(450): Homolog of NCBI NO: 15218757 NR Description: transferase family [Arabidopsis thaliana]
  misc_feature (24)..(450): Homolog of NCBI NO: 25403354 NR Description: protein F1K23.12 [imported] - Arabidopsis >gi|10764863|gb|AAF24555.2|AC007508_18 F1K23.12 [Arabidopsis
  misc_feature (25)..(455): Homolog of NCBI NO: 10798748 NR Description: elicitor inducible gene product EIG-I24
  misc_feature (21)..(449): Homolog of NCBI NO: 28558088 NR Description: 3'-N-debenzoyl-2'-deoxytaxol N-benzoyltransferase

SEQ ID NO: 105330 - protein, 450 aa, Arabidopsis thaliana; identical to SEQ ID NO: 30324
  peptide (1)..(450): Ceres Seq. ID no. 13616974
  misc_feature (12)..(448): Pfam Name: Transferase family Pfam Description: Transferase family
  misc_feature (1)..(450): Homolog of NCBI NO: 15240694 NR Description: transferase family [Arabidopsis thaliana]
  misc_feature (1)..(450): Homolog of NCBI NO: 21553850 NR Description: hypersensitivity-related protein-like protein
  misc_feature (11)..(411): Homolog of NCBI NO: 15232745 NR Description: acyltransferase family [Arabidopsis thaliana]
  misc_feature (420)..(446): Homolog of NCBI NO: 15232745 NR Description: acyltransferase family [Arabidopsis thaliana]
  misc_feature (6)..(448): Homolog of NCBI NO: 15227845 NR Description: transferase family [Arabidopsis thaliana]
  misc_feature (11)..(445): Homolog of NCBI NO: 15224685 NR Description: transferase family [Arabidopsis thaliana]
  misc_feature (17)..(443): Homolog of NCBI NO: 15218757 NR Description: transferase family [Arabidopsis thaliana]
  misc_feature (17)..(443): Homolog of NCBI NO: 25403354 NR Description: protein F1K23.12 [imported] - Arabidopsis >gi|10764863|gb|AAF24555.2|AC007508_18 F1K23.12 [Arabidopsis
  misc_feature (18)..(448): Homolog of NCBI NO: 10798748 NR Description: elicitor inducible gene product EIG-I24
  misc_feature (14)..(442): Homolog of NCBI NO: 28558088 NR Description: 3'-N-debenzoyl-2'-deoxytaxol N-benzoyltransferase

SEQ ID NO: 105331 - protein, 445 aa, Arabidopsis thaliana; identical to SEQ ID NO: 30325
  peptide (1)..(445): Ceres Seq. ID no. 13616975
  misc_feature (7)..(443): Pfam Name: Transferase family Pfam Description: Transferase family
  misc_feature (1)..(445): Homolog of NCBI NO: 15240694 NR Description: transferase family [Arabidopsis thaliana]
  misc_feature (1)..(445): Homolog of NCBI NO: 21553850 NR Description: hypersensitivity-related protein-like protein
  misc_feature (6)..(406): Homolog of NCBI NO: 15232745 NR Description: acyltransferase family [Arabidopsis thaliana]
  misc_feature (415)..(441): Homolog of NCBI NO: 15232745 NR Description: acyltransferase family [Arabidopsis thaliana]
  misc_feature (1)..(443): Homolog of NCBI NO: 15227845 NR Description: transferase family [Arabidopsis thaliana]
  misc_feature (6)..(440): Homolog of NCBI NO: 15224685 NR Description: transferase family [Arabidopsis thaliana]
  misc_feature (12)..(438): Homolog of NCBI NO: 15218757 NR Description: transferase family [Arabidopsis thaliana]
  misc_feature (12)..(438): Homolog of NCBI NO: 25403354 NR Description: protein F1K23.12 [imported] - Arabidopsis >gi|10764863|gb|AAF24555.2|AC007508_18 F1K23.12 [Arabidopsis
  misc_feature (13)..(443): Homolog of NCBI NO: 10798748 NR Description: elicitor inducible gene product EIG-I24
  misc_feature (9)..(437): Homolog of NCBI NO: 28558088 NR Description: 3'-N-debenzoyl-2'-deoxytaxol N-benzoyltransferase

SEQ ID NO: 105332 - DNA, 891 bp, Arabidopsis thaliana
  misc_feature (1)..(891): Ceres Seq. ID no. 13616980
  misc_feature: MA Experiment ID: 108433 Result: Down-regulated in Transcription
  misc_feature: MA Experiment 108433 PARAMETER Experiment Name: At_rhl_Mutant2_cDNA_P Parameter: Age (day) Value: 7
  misc_feature: MA Experiment 108433 PARAMETER Experiment Name: At_rhl_Mutant2_cDNA_P Parameter: Organism Value: A. thaliana
  misc_feature: MA Experiment 108433 PARAMETER Experiment Name: At_rhl_Mutant2_cDNA_P Parameter: Plant Line Value: rhl Mutant vs. wt landsburg
  misc_feature: MA Experiment 108433 PARAMETER Experiment Name: At_rhl_Mutant2_cDNA_P Parameter: Tissue Value: Roots
  misc_feature: MA Experiment ID: 108461 Result: Up-regulated in Transcription
  misc_feature: MA Experiment 108461 PARAMETER Experiment Name: At_Germinating_Seeds_cDNA_P Parameter: Age (day) Value: 1 vs. 0
  misc_feature: MA Experiment 108461 PARAMETER Experiment Name: At_Germinating_Seeds_cDNA_P Parameter: Tissue Value: Germinating Seeds
  misc_feature: MA Experiment ID: 108462 Result: Up-regulated in Transcription
  misc_feature: MA Experiment 108462 PARAMETER Experiment Name: At_Germinating_Seeds_cDNA_P Parameter: Age (day) Value: 2 vs. 0
  misc_feature: MA Experiment 108462 PARAMETER Experiment Name: At_Germinating_Seeds_cDNA_P Parameter: Tissue Value: Germinating Seeds
  misc_feature: MA Experiment ID: 108463 Result: Up-regulated in Transcription
  misc_feature: MA Experiment 108463 PARAMETER Experiment Name: At_Germinating_Seeds_cDNA_P Parameter: Age (day) Value: 3 vs. 0
  misc_feature: MA Experiment 108463 PARAMETER Experiment Name: At_Germinating_Seeds_cDNA_P Parameter: Tissue Value: Germinating Seeds
  misc_feature: MA Experiment ID: 108464 Result: Up-regulated in Transcription
  misc_feature: MA Experiment 108464 PARAMETER Experiment Name: At_Germinating_Seeds_cDNA_P Parameter: Age (day) Value: 4 vs. 0
  misc_feature: MA Experiment 108464 PARAMETER Experiment Name: At_Germinating_Seeds_cDNA_P Parameter: Tissue Value: Germinating Seeds
  misc_feature: MA Experiment ID: 20000071 Result: Down-regulated in Transcription
  misc_feature: MA Experiment 20000071 PARAMETER Experiment Name: At_100uM_ABA_Mutants_cDNA_P Parameter: Plant Line Value: CS8104
  misc_feature: MA Experiment 20000071 PARAMETER Experiment Name: At_100uM_ABA_Mutants_cDNA_P Parameter: Timepoint (hr) Value: 6
  misc_feature: MA Experiment 20000071 PARAMETER Experiment Name: At_100uM_ABA_Mutants_cDNA_P Parameter: Tissue Value: Aerial
  misc_feature: MA Experiment 20000071 PARAMETER Experiment Name: At_100uM_ABA_Mutants_cDNA_P Parameter: Treatment Value: 100uM ABA vs. No Treatment
  misc_feature: MA Experiment ID: 20000117 Result: Down-regulated in Transcription
  misc_feature: MA Experiment 20000117 PARAMETER Experiment Name: At_100uM_ABA_Mutants_cDNA_P Parameter: Plant Line Value: Columbia
  misc_feature: MA Experiment 20000117 PARAMETER Experiment Name: At_100uM_ABA_Mutants_cDNA_P Parameter: Timepoint (hr) Value: 6
  misc_feature: MA Experiment 20000117 PARAMETER Experiment Name: At_100uM_ABA_Mutants_cDNA_P Parameter: Tissue Value: Aerial
  misc_feature: MA Experiment 20000117 PARAMETER Experiment Name: At_100uM_ABA_Mutants_cDNA_P Parameter: Treatment Value: 100uM ABA vs. No Treatment
  misc_feature: MA Experiment ID: 20000173 Result: Down-regulated in Transcription
  misc_feature: MA Experiment 20000173 PARAMETER Experiment Name: At_42deg_Heat_P Parameter: Age (day) Value: 14
  misc_feature: MA Experiment 20000173 PARAMETER Experiment Name: At_42deg_Heat_P Parameter: Organism Value: A. thaliana
  misc_feature: MA Experiment 20000173 PARAMETER Experiment Name: At_42deg_Heat_P Parameter: Plant Line Value: WS
  misc_feature: MA Experiment 20000173 PARAMETER Experiment Name: At_42deg_Heat_P Parameter: Temperature (deg C) Value: 42 vs. 22
  misc_feature: MA Experiment 20000173 PARAMETER Experiment Name: At_42deg_Heat_P Parameter: Timepoint (hr) Value: 6
  misc_feature: MA Experiment 20000173 PARAMETER Experiment Name: At_42deg_Heat_P Parameter: Tissue Value: Aerial
  misc_feature: MA Experiment ID: 20000180 Result: Up-regulated in Transcription
  misc_feature: MA Experiment 20000180 PARAMETER Experiment Name: At_Germinating_Seeds_P Parameter: Age (hr) Value: 24 vs. 0
  misc_feature: MA Experiment 20000180 PARAMETER Experiment Name: At_Germinating_Seeds_P Parameter: Tissue Value: Germinating Seeds
  misc_feature: MA Experiment ID: 20000184 Result: Up-regulated in Transcription
  misc_feature: MA Experiment 20000184 PARAMETER Experiment Name: At_Shoots__P Parameter: Age (day) Value: 7
  misc_feature: MA Experiment 20000184 PARAMETER Experiment Name: At_Shoots__P Parameter: Tissue Value: Shoots vs. Whole Plant
  misc_feature: MA Experiment ID: 20000185 Result: Up-regulated in Transcription
  misc_feature: MA Experiment 20000185 PARAMETER Experiment Name: At_Roots__P Parameter: Age (day) Value: 7 vs. 21
  misc_feature: MA Experiment 20000185 PARAMETER Experiment Name: At_Roots__P Parameter: Organism Value: A. thaliana
  misc_feature: MA Experiment 20000185 PARAMETER Experiment Name: At_Roots__P Parameter: Tissue Value: Roots vs. Whole Plant
  misc_feature: MA Experiment ID: 20000439 Result: Up-regulated in Transcription
  misc_feature: MA Experiment 20000439 PARAMETER Experiment Name: At_Roots__P Parameter: Age (day) Value: 14 vs. 21
  misc_feature: MA Experiment 20000439 PARAMETER Experiment Name: At_Roots__P Parameter: Organism Value: A. thaliana
  misc_feature: MA Experiment 20000439 PARAMETER Experiment Name: At_Roots__P Parameter: Tissue Value: Roots vs. Whole Plant
  misc_feature: MA Experiment ID: 20001247 Result: Up-regulated in Transcription
  misc_feature: MA Experiment 20001247 PARAMETER Experiment Name: At_Far-red-induction_P Parameter: Age (day) Value: 7
  misc_feature: MA Experiment 20001247 PARAMETER Experiment Name: At_Far-red-induction_P Parameter: Light Value: Far-red vs. White
  misc_feature: MA Experiment 20001247 PARAMETER Experiment Name: At_Far-red-induction_P Parameter: Organism Value: A. thaliana
  misc_feature: MA Experiment 20001247 PARAMETER Experiment Name: At_Far-red-induction_P Parameter: Plant Line Value: Columbia
  misc_feature: MA Experiment 20001247 PARAMETER Experiment Name: At_Far-red-induction_P Parameter: Timepoint (hr) Value: 1
  misc_feature: MA Experiment 20001247 PARAMETER Experiment Name: At_Far-red-induction_P Parameter: Tissue Value: Whole Plant
  misc_feature: MA Experiment ID: 20001555 Result: Down-regulated in Transcription
  misc_feature: MA Experiment 20001555 PARAMETER Experiment Name: At_Drought_Soil_Dry_P Parameter: Age (day) Value: 24
  misc_feature: MA Experiment 20001555 PARAMETER Experiment Name: At_Drought_Soil_Dry_P Parameter: Organism Value: A. thaliana
  misc_feature: MA Experiment 20001555 PARAMETER Experiment Name: At_Drought_Soil_Dry_P Parameter: Plant Line Value: WS
  misc_feature: MA Experiment 20001555 PARAMETER Experiment Name: At_Drought_Soil_Dry_P Parameter: Post Timepoint (hr) Value: None
  misc_feature: MA Experiment 20001555 PARAMETER Experiment Name: At_Drought_Soil_Dry_P Parameter: Post-Treatment Value: None
  misc_feature: MA Experiment 20001555 PARAMETER Experiment Name: At_Drought_Soil_Dry_P Parameter: Timepoint (day) Value: 10
  misc_feature: MA Experiment 20001555 PARAMETER Experiment Name: At_Drought_Soil_Dry_P Parameter: Treatment Value: Drought vs. No Drought
  misc_feature: MA Experiment ID: 20001905 Result: Up-regulated in Transcription
  misc_feature: MA Experiment 20001905 PARAMETER Experiment Name: At_Drought_Reproduction_P Parameter: Age (day) Value: 40
  misc_feature: MA Experiment 20001905 PARAMETER Experiment Name: At_Drought_Reproduction_P Parameter: Organism Value: A. thaliana
  misc_feature: MA Experiment 20001905 PARAMETER Experiment Name: At_Drought_Reproduction_P Parameter: Plant Line Value: WS
  misc_feature: MA Experiment 20001905 PARAMETER Experiment Name: At_Drought_Reproduction_P Parameter: Timepoint (day) Value: 10
  misc_feature: MA Experiment 20001905 PARAMETER Experiment Name: At_Drought_Reproduction_P Parameter: Tissue Value: Rosettes
  misc_feature: MA Experiment 20001905 PARAMETER Experiment Name: At_Drought_Reproduction_P Parameter: Treatment Value: Drought vs. No Drought
  misc_feature: MA Experiment ID: 20001911 Result: Down-regulated in Transcription
  misc_feature: MA Experiment 20001911 PARAMETER Experiment Name: At_Drought_Reproduction_P Parameter: Age (day) Value: 40
  misc_feature: MA Experiment 20001911 PARAMETER Experiment Name: At_Drought_Reproduction_P Parameter: Organism Value: A. thaliana
  misc_feature: MA Experiment 20001911 PARAMETER Experiment Name: At_Drought_Reproduction_P Parameter: Plant Line Value: WS
  misc_feature: MA Experiment 20001911 PARAMETER Experiment Name: At_Drought_Reproduction_P Parameter: Timepoint (day) Value: 10
  misc_feature: MA Experiment 20001911 PARAMETER Experiment Name: At_Drought_Reproduction_P Parameter: Tissue Value: Flowers
  misc_feature: MA Experiment 20001911 PARAMETER Experiment Name: At_Drought_Reproduction_P Parameter: Treatment Value: Drought vs. No Drought
gccgacagtttgaagtaaagccagcaaatcgtgaaagccatttacttttagatctctctctgcactctctgactttgtccgcaaagtagatctgctgcaatggcttctcctcttctcccaacttcgactactcctgatcaacttcccggcggcgatccacagttgctgagctctctacgcgtcctcttgtcccgcgttctagccaccgtccgtcacgcttctgcagatgccagaccctgggcagagctcgttgaccggtcagcgttttcccggccaccatcgctctcggaggcaacgtcacgagtaaggaagaacttttcctatttccgagccaattacataaccttagtggcaatcttactcgccgcgtctctgctcacgcaccctttcgctctcttcctcctcgcatcgctggccgcttcttggcttttcctctactttttccgtccggcggatcagccgttggtcattggaggacgcacgttctccgatcttgagacgctagggatactctgcctgtccactgtggtggtgatgttcatgaccagcgttggatcgctcttgatgtccactctagcagttgggatcatgggcgtggccatccacggagcgtttcgtgctcccgaagacctgtttcttgaagaacaagaagccattggatctggacttttcgcattcttcaacaacaatgcctctaatgcagctgccgctgccatagccacctcagcaatgtcacgcgttcgagtctgagattgttgaagagactacattcctacaccgcatttccaaagtgtgatatttattcatattgaattgttgtaacttgtaaccattcttttgtcatttctgttttgtttactttgttgctggaattttgaaacacaattcatc

SEQ ID NO: 105333 - protein, 216 aa, Arabidopsis thaliana; identical to SEQ ID NO: 35333
  peptide (1)..(216): Ceres Seq. ID no. 13616981
  misc_feature (1)..(216): Homolog of NCBI NO: 15240698 NR Description: expressed protein [Arabidopsis thaliana]
  misc_feature (1)..(214): Homolog of NCBI NO: 15239101 NR Description: expressed protein [Arabidopsis thaliana] emb|CAB87410.1~gene_id:K18I23.19~similar to unknown protein
  misc_feature (1)..(214): Homolog of NCBI NO: 18072825 NR Description: prenylated Rab receptor 2 [Arabidopsis thaliana]
  misc_feature (2)..(206): Homolog of NCBI NO: 15226664 NR Description: expressed protein [Arabidopsis thaliana]
  misc_feature (1)..(207): Homolog of NCBI NO: 15224494 NR Description: expressed protein [Arabidopsis thaliana]
  misc_feature (4)..(214): Homolog of NCBI NO: 15241022 NR Description: expressed protein [Arabidopsis thaliana]
  misc_feature (1)..(204): Homolog of NCBI NO: 15228824 NR Description: expressed protein [Arabidopsis thaliana]
  misc_feature (1)..(204): Homolog of NCBI NO: 15450978 NR Description: putative protein [Arabidopsis thaliana]
  misc_feature (1)..(192): Homolog of NCBI NO: 40539036 NR Description: putative prenylated rab acceptor protein [Oryza
  misc_feature (29)..(197): Homolog of NCBI NO: 18390939 NR Description: expressed protein [Arabidopsis thaliana]

SEQ ID NO: 105334 - DNA, 1279 bp, Arabidopsis thaliana
  misc_feature (1)..(1279): Ceres Seq. ID no. 13617001
  misc_feature: MA Experiment ID: 108433 Result: Up-regulated in Transcription
  misc_feature: MA Experiment 108433 PARAMETER Experiment Name: At_rhl_Mutant2_cDNA_P Parameter: Age (day) Value: 7
  misc_feature: MA Experiment 108433 PARAMETER Experiment Name: At_rhl_Mutant2_cDNA_P Parameter: Organism Value: A. thaliana
  misc_feature: MA Experiment 108433 PARAMETER Experiment Name: At_rhl_Mutant2_cDNA_P Parameter: Plant Line Value: rhl Mutant vs. wt landsburg
  misc_feature: MA Experiment 108433 PARAMETER Experiment Name: At_rhl_Mutant2_cDNA_P Parameter: Tissue Value: Roots
  misc_feature: MA Experiment ID: 108489 Result: Down-regulated in Transcription
  misc_feature: MA Experiment ID: 108572 Result: Up-regulated in Transcription
  misc_feature: MA Experiment 108572 PARAMETER Experiment Name: At_Drought_cDNA_P Parameter: Timepoint (hr) Value: 1
  misc_feature: MA Experiment 108572 PARAMETER Experiment Name: At_Drought_cDNA_P Parameter: Tissue Value: Aerial
  misc_feature: MA Experiment 108572 PARAMETER Experiment Name: At_Drought_cDNA_P Parameter: Treatment Value: Drought vs. No Drought
  misc_feature: MA Experiment ID: 108579 Result: Down-regulated in Transcription
  misc_feature: MA Experiment 108579 PARAMETER Experiment Name: At_4deg_Cold_cDNA_P Parameter: Temperature (deg C) Value: 4 vs. 22
  misc_feature: MA Experiment 108579 PARAMETER Experiment Name: At_4deg_Cold_cDNA_P Parameter: Timepoint (hr) Value: 6
  misc_feature: MA Experiment 108579 PARAMETER Experiment Name: At_4deg_Cold_cDNA_P Parameter: Tissue Value: Aerial
  misc_feature: MA Experiment ID: 20000068 Result: Up-regulated in Transcription
  misc_feature: MA Experiment ID: 20000069 Result: Up-regulated in Transcription
  misc_feature: MA Experiment 20000069 PARAMETER Experiment Name: At_100uM_ABA_Mutants_cDNA_P Parameter: Plant Line Value: CS23
  misc_feature: MA Experiment 20000069 PARAMETER Experiment Name: At_100uM_ABA_Mutants_cDNA_P Parameter: Timepoint (hr) Value: 6
  misc_feature: MA Experiment 20000069 PARAMETER Experiment Name: At_100uM_ABA_Mutants_cDNA_P Parameter: Tissue Value: Aerial
  misc_feature: MA Experiment 20000069 PARAMETER Experiment Name: At_100uM_ABA_Mutants_cDNA_P Parameter: Treatment Value: 100uM ABA vs. No Treatment
  misc_feature: MA Experiment ID: 20000071 Result: Up-regulated in Transcription
  misc_feature: MA Experiment 20000071 PARAMETER Experiment Name: At_100uM_ABA_Mutants_cDNA_P Parameter: Plant Line Value: CS8104
  misc_feature: MA Experiment 20000071 PARAMETER Experiment Name: At_100uM_ABA_Mutants_cDNA_P Parameter: Timepoint (hr) Value: 6
  misc_feature: MA Experiment 20000071 PARAMETER Experiment Name: At_100uM_ABA_Mutants_cDNA_P Parameter: Tissue Value: Aerial
  misc_feature: MA Experiment 20000071 PARAMETER Experiment Name: At_100uM_ABA_Mutants_cDNA_P Parameter: Treatment Value: 100uM ABA vs. No Treatment
  misc_feature: MA Experiment ID: 20000072 Result: Up-regulated in Transcription
  misc_feature: MA Experiment 20000072 PARAMETER Experiment Name: At_100uM_ABA_Mutants_cDNA_P Parameter: Plant Line Value: CS8105
  misc_feature: MA Experiment 20000072 PARAMETER Experiment Name: At_100uM_ABA_Mutants_cDNA_P Parameter: Timepoint (hr) Value: 6
  misc_feature: MA Experiment 20000072 PARAMETER Experiment Name: At_100uM_ABA_Mutants_cDNA_P Parameter: Tissue Value: Aerial
  misc_feature: MA Experiment 20000072 PARAMETER Experiment Name: At_100uM_ABA_Mutants_cDNA_P Parameter: Treatment Value: 100uM ABA vs. No Treatment
  misc_feature: MA Experiment ID: 20000086 Result: Up-regulated in Transcription
  misc_feature: MA Experiment 20000086 PARAMETER Experiment Name: At_100uM_ABA_Mutants_cDNA_P Parameter: Plant Line Value: CS22
  misc_feature: MA Experiment 20000086 PARAMETER Experiment Name: At_100uM_ABA_Mutants_cDNA_P Parameter: Timepoint (hr) Value: 6
  misc_feature: MA Experiment 20000086 PARAMETER Experiment Name: At_100uM_ABA_Mutants_cDNA_P Parameter: Tissue Value: Aerial
  misc_feature: MA Experiment 20000086 PARAMETER Experiment Name: At_100uM_ABA_Mutants_cDNA_P Parameter: Treatment Value: 100uM ABA vs. No Treatment
  misc_feature: MA Experiment ID: 20000087 Result: Up-regulated in Transcription
  misc_feature: MA Experiment 20000087 PARAMETER Experiment Name: At_100uM_ABA_Mutants_cDNA_P Parameter: Plant Line Value: WS
  misc_feature: MA Experiment 20000087 PARAMETER Experiment Name: At_100uM_ABA_Mutants_cDNA_P Parameter: Timepoint (hr) Value: 6
  misc_feature: MA Experiment 20000087 PARAMETER Experiment Name: At_100uM_ABA_Mutants_cDNA_P Parameter: Tissue Value: Aerial
  misc_feature: MA Experiment 20000087 PARAMETER Experiment Name: At_100uM_ABA_Mutants_cDNA_P Parameter: Treatment Value: 100uM ABA vs. No Treatment
  misc_feature: MA Experiment ID: 20000113 Result: Up-regulated in Transcription
  misc_feature: MA Experiment 20000113 PARAMETER Experiment Name: At_42deg_Heat_cDNA_P Parameter: Temperature (deg C) Value: 42 vs. 22
  misc_feature: MA Experiment 20000113 PARAMETER Experiment Name: At_42deg_Heat_cDNA_P Parameter: Timepoint (hr) Value: 8
  misc_feature: MA Experiment 20000113 PARAMETER Experiment Name: At_42deg_Heat_cDNA_P Parameter: Tissue Value: Aerial
  misc_feature: MA Experiment ID: 20000117 Result: Up-regulated in Transcription
  misc_feature: MA Experiment 20000117 PARAMETER Experiment Name: At_100uM_ABA_Mutants_cDNA_P Parameter: Plant Line Value: Columbia
  misc_feature: MA Experiment 20000117 PARAMETER Experiment Name: At_100uM_ABA_Mutants_cDNA_P Parameter: Timepoint (hr) Value: 6
  misc_feature: MA Experiment 20000117 PARAMETER Experiment Name: At_100uM_ABA_Mutants_cDNA_P Parameter: Tissue Value: Aerial
  misc_feature: MA Experiment 20000117 PARAMETER Experiment Name: At_100uM_ABA_Mutants_cDNA_P Parameter: Treatment Value: 100uM ABA vs. No Treatment
  misc_feature: MA Experiment ID: 20000184 Result: Down-regulated in Transcription
  misc_feature: MA Experiment 20000184 PARAMETER Experiment Name: At_Shoots__P Parameter: Age (day) Value: 7
  misc_feature: MA Experiment 20000184 PARAMETER Experiment Name: At_Shoots__P Parameter: Tissue Value: Shoots vs. Whole Plant
  misc_feature: MA Experiment ID: 20000211 Result: Up-regulated in Transcription
  misc_feature: MA Experiment 20000211 PARAMETER Experiment Name: At_0.001percent_MeJA__P Parameter: Age (day) Value: 14
  misc_feature: MA Experiment 20000211 PARAMETER Experiment Name: At_0.001percent_MeJA__P Parameter: Organism Value: A. thaliana
  misc_feature: MA Experiment 20000211 PARAMETER Experiment Name: At_0.001percent_MeJA__P Parameter: Plant Line Value: WS
  misc_feature: MA Experiment 20000211 PARAMETER Experiment Name: At_0.001percent_MeJA__P Parameter: Timepoint (hr) Value: 1
  misc_feature: MA Experiment 20000211 PARAMETER Experiment Name: At_0.001percent_MeJA__P Parameter: Tissue Value: Aerial
  misc_feature: MA Experiment 20000211 PARAMETER Experiment Name: At_0.001percent_MeJA__P Parameter: Treatment Value: 0.001percent MeJA vs. No Treatment
  misc_feature: MA Experiment ID: 20000452 Result: Up-regulated in Transcription
  misc_feature: MA Experiment 20000452 PARAMETER Experiment Name: At_CS6879_Shoots-Roots_P Parameter: Age (day) Value: 14
  misc_feature: MA Experiment 20000452 PARAMETER Experiment Name: At_CS6879_Shoots-Roots_P Parameter: Organism Value: A. thaliana
  misc_feature: MA Experiment 20000452 PARAMETER Experiment Name: At_CS6879_Shoots-Roots_P Parameter: Plant Line Value: CS6879 vs. WS
  misc_feature: MA Experiment 20000452 PARAMETER Experiment Name: At_CS6879_Shoots-Roots_P Parameter: Tissue Value: Shoots
  misc_feature: MA Experiment ID: 20001554 Result: Up-regulated in Transcription
  misc_feature: MA Experiment 20001554 PARAMETER Experiment Name: At_Drought_Soil_Dry_P Parameter: Age (day) Value: 21
  misc_feature: MA Experiment 20001554 PARAMETER Experiment Name: At_Drought_Soil_Dry_P Parameter: Organism Value: A. thaliana
  misc_feature: MA Experiment 20001554 PARAMETER Experiment Name: At_Drought_Soil_Dry_P Parameter: Plant Line Value: WS
  misc_feature: MA Experiment 20001554 PARAMETER Experiment Name: At_Drought_Soil_Dry_P Parameter: Post Timepoint (hr) Value: None
  misc_feature: MA Experiment 20001554 PARAMETER Experiment Name: At_Drought_Soil_Dry_P Parameter: Post-Treatment Value: None
  misc_feature: MA Experiment 20001554 PARAMETER Experiment Name: At_Drought_Soil_Dry_P Parameter: Timepoint (day) Value: 7
  misc_feature: MA Experiment 20001554 PARAMETER Experiment Name: At_Drought_Soil_Dry_P Parameter: Treatment Value: Drought vs. No Drought
  misc_feature: MA Experiment ID: 20001555 Result: Up-regulated in Transcription
  misc_feature: MA Experiment 20001555 PARAMETER Experiment Name: At_Drought_Soil_Dry_P Parameter: Age (day) Value: 24
  misc_feature: MA Experiment 20001555 PARAMETER Experiment Name: At_Drought_Soil_Dry_P Parameter: Organism Value: A. thaliana
  misc_feature: MA Experiment 20001555 PARAMETER Experiment Name: At_Drought_Soil_Dry_P Parameter: Plant Line Value: WS
  misc_feature: MA Experiment 20001555 PARAMETER Experiment Name: At_Drought_Soil_Dry_P Parameter: Post Timepoint (hr) Value: None
  misc_feature: MA Experiment 20001555 PARAMETER Experiment Name: At_Drought_Soil_Dry_P Parameter: Post-Treatment Value: None
  misc_feature: MA Experiment 20001555 PARAMETER Experiment Name: At_Drought_Soil_Dry_P Parameter: Timepoint (day) Value: 10
  misc_feature: MA Experiment 20001555 PARAMETER Experiment Name: At_Drought_Soil_Dry_P Parameter: Treatment Value: Drought vs. No Drought
  misc_feature: MA Experiment ID: 20001558 Result: Down-regulated in Transcription
  misc_feature: MA Experiment 20001558 PARAMETER Experiment Name: At_Drought_Soil_Dry_P Parameter: Age (day) Value: 27
  misc_feature: MA Experiment 20001558 PARAMETER Experiment Name: At_Drought_Soil_Dry_P Parameter: Organism Value: A. thaliana
  misc_feature: MA Experiment 20001558 PARAMETER Experiment Name: At_Drought_Soil_Dry_P Parameter: Plant Line Value: WS
  misc_feature: MA Experiment 20001558 PARAMETER Experiment Name: At_Drought_Soil_Dry_P Parameter: Post Timepoint (hr) Value: 6
  misc_feature: MA Experiment 20001558 PARAMETER Experiment Name: At_Drought_Soil_Dry_P Parameter: Post-Treatment Value: Re-Water vs. No Drought
  misc_feature: MA Experiment 20001558 PARAMETER Experiment Name: At_Drought_Soil_Dry_P Parameter: Timepoint (day) Value: 13
  misc_feature: MA Experiment 20001558 PARAMETER Experiment Name: At_Drought_Soil_Dry_P Parameter: Treatment Value: Drought vs. No Drought
  misc_feature: MA Experiment ID: 20001560 Result: Down-regulated in Transcription
  misc_feature: MA Experiment 20001560 PARAMETER Experiment Name: At_Drought_Soil_Dry_P Parameter: Age (day) Value: 28
  misc_feature: MA Experiment 20001560 PARAMETER Experiment Name: At_Drought_Soil_Dry_P Parameter: Organism Value: A. thaliana
  misc_feature: MA Experiment 20001560 PARAMETER Experiment Name: At_Drought_Soil_Dry_P Parameter: Plant Line Value: WS
  misc_feature: MA Experiment 20001560 PARAMETER Experiment Name: At_Drought_Soil_Dry_P Parameter: Post Timepoint (hr) Value: None
  misc_feature: MA Experiment 20001560 PARAMETER Experiment Name: At_Drought_Soil_Dry_P Parameter: Post-Treatment Value: None
  misc_feature: MA Experiment 20001560 PARAMETER Experiment Name: At_Drought_Soil_Dry_P Parameter: Timepoint (day) Value: 14
  misc_feature: MA Experiment 20001560 PARAMETER Experiment Name: At_Drought_Soil_Dry_P Parameter: Treatment Value: Drought vs. No Drought
gttttggtgtttcttcgtcgacgtcgctatctccaatctcattactcccctttctcaatgatcataaaacctacttcgattctactccttatcaactgaatcaccgaaaaacctcaccttttttctttttccgatcatggggaatctgatcagtttgatcttctgctgcgggagaaggcagaggagcaatattcctccggcgatggaaacggctcctcttgaactcccaccgaacagatttgtattcgccgccgtgccaccatatctgaaccctaaccctaactacgttgaccagtatccaggtaactgccttcctccgccagtaactgagccgccgatgctaccgtacaatttcaaccatttgcatcactatcctcccaacagttaccaactacctcatcctttgtttcacggcggtagataccctatactgccgcctcctacgtacgtccaccagaaagccgtcacgattcgtaacgatgttaatctgaagaagaagactttaacgctcatacccgacccggagaatccgaatcgacttcttgtctccttcacatttgatgcatccatgcccggaaggatcacagttgttttctttgctacagaagatgcagaatgtaatcttagagctacaaaggaagatactttgcctccaatcacttttgatttcggagaaggacttggtcagaagttcatacaatcatctggaacgggtatagacttgacggcgtttaaagattccgagctattcaaggaggtggatacagatgtcttcccgttggcggttaaggcggaggcaactccagcggaagaaggaaagtctggttccaccaatgtgcagattactcaagtggtgtataccaaggagaaaggagagattaaaatagaagtggtgaagcagatactatgggtgaataagaggaggtatgagctgcttgagatttatgggattgagaacacggttgatggttccgatgagggaaaggaatgtgttgtatgcttgtctgaaccacgcgatacaactgttcttccttgcagacacatgtgtatgtgtagcgggtgcgcaaaggcgttaaggtttcagacaaatctgtgcccagtttgcagacaacctgttgagatgcttttggagattaacaagaacggatgaaatggagatggagaatgaacaaatttagttaagcaatcgacttgtgtaatatatgccatgcttaattaagacgtaaaacgttatggttcaatatattataagtggaaactgagttcttaaatagcaatg

SEQ ID NO: 105335 - protein, 337 aa, Arabidopsis thaliana
  peptide (1)..(337): Ceres Seq. ID no. 13617002
  misc_feature (285)..(323): Pfam Name: Zinc finger, C3HC4 type (RING finger) Pfam Description: Zinc finger, C3HC4 type (RING finger)
  misc_feature (1)..(337): Homolog of NCBI NO: 15242675 NR Description: expressed protein [Arabidopsis thaliana]
  misc_feature (1)..(337): Homolog of NCBI NO: 21618140 NR Description: putative RING zinc finger protein [Arabidopsis
  misc_feature (1)..(337): Homolog of NCBI NO: 26449588 NR Description: unknown protein [Arabidopsis thaliana]
  misc_feature (17)..(337): Homolog of NCBI NO: 18398633 NR Description: putative RING zinc finger protein [Arabidopsis >gi|6681341|gb|AAF23258.1|AC015985_16 putative RING zinc finger [Arabidopsis thaliana] >gi|6682260|gb|AAF23312.1|AC016661_37
  misc_feature (17)..(303): Homolog of NCBI NO: 30681003 NR Description: putative RING zinc finger protein [Arabidopsis
  misc_feature (41)..(336): Homolog of NCBI NO: 37532246 NR Description: putative hydroxyproline-rich glycoprotein [Oryza
  misc_feature (79)..(337): Homolog of NCBI NO: 15231808 NR Description: expressed protein [Arabidopsis thaliana]
  misc_feature (18)..(333): Homolog of NCBI NO: 15239642 NR Description: expressed protein [Arabidopsis thaliana]
  misc_feature (18)..(333): Homolog of NCBI NO: 21928149 NR Description: AT5g19080/T16G12_120 [Arabidopsis thaliana]
  misc_feature (31)..(336): Homolog of NCBI NO: 6862918 NR Description: putative RING zinc finger protein [Arabidopsis
MGNLISLIFCCGRRQRSNIPPAMETAPLELPPNRFVFAAVPPYLNPNPNYVDQYPGNCLPPPVTEPPMLPYNFNHLHHYPPNSYQLPHPLFHGGRYPILPPPTYVHQKAVTIRNDVNLKKKTLTLIPDPENPNRLLVSFTFDASMPGRITVVFFATEDAECNLRATKEDTLPPITFDFGEGLGQKFIQSSGTGIDLTAFKDSELFKEVDTDVFPLAVKAEATPAEEGKSGSTNVQITQVVYTKEKGEIKIEVVKQILWVNKRRYELLEIYGIENTVDGSDEGKECVVCLSEPRDTTVLPCRHMCMCSGCAKALRFQTNLCPVCRQPVEMLLEINKNG

SEQ ID NO: 105336 - protein, 315 aa, Arabidopsis thaliana
  peptide (1)..(315): Ceres Seq. ID no. 13617003
  misc_feature (263)..(301): Pfam Name: Zinc finger, C3HC4 type (RING finger) Pfam Description: Zinc finger, C3HC4 type (RING finger)
  misc_feature (1)..(315): Homolog of NCBI NO: 15242675 NR Description: expressed protein [Arabidopsis thaliana]
  misc_feature (1)..(315): Homolog of NCBI NO: 21618140 NR Description: putative RING zinc finger protein [Arabidopsis
  misc_feature (1)..(315): Homolog of NCBI NO: 26449588 NR Description: unknown protein [Arabidopsis thaliana]
  misc_feature (1)..(315): Homolog of NCBI NO: 18398633 NR Description: putative RING zinc finger protein [Arabidopsis >gi|6681341|gb|AAF23258.1|AC015985_16 putative RING zinc finger [Arabidopsis thaliana] >gi|6682260|gb|AAF23312.1|AC016661_37
  misc_feature (1)..(281): Homolog of NCBI NO: 30681003 NR Description: putative RING zinc finger protein [Arabidopsis
  misc_feature (19)..(314): Homolog of NCBI NO: 37532246 NR Description: putative hydroxyproline-rich glycoprotein [Oryza
  misc_feature (57)..(315): Homolog of NCBI NO: 15231808 NR Description: expressed protein [Arabidopsis thaliana]
  misc_feature (1)..(311): Homolog of NCBI NO: 15239642 NR Description: expressed protein [Arabidopsis thaliana]
  misc_feature (1)..(311): Homolog of NCBI NO: 21928149 NR Description: AT5g19080/T16G12_120 [Arabidopsis thaliana]
  misc_feature (9)..(314): Homolog of NCBI NO: 6862918 NR Description: putative RING zinc finger protein [Arabidopsis
METAPLELPPNRFVFAAVPPYLNPNPNYVDQYPGNCLPPPVTEPPMLPYNFNHLHHYPPNSYQLPHPLFHGGRYPILPPPTYVHQKAVTIRNDVNLKKKTLTLIPDPENPNRLLVSFTFDASMPGRITVVFFATEDAECNLRATKEDTLPPITFDFGEGLGQKFIQSSGTGIDLTAFKDSELFKEVDTDVFPLAVKAEATPAEEGKSGSTNVQITQVVYTKEKGEIKIEVVKQILWVNKRRYELLEIYGIENTVDGSDEGKECVVCLSEPRDTTVLPCRHMCMCSGCAKALRFQTNLCPVCRQPVEMLLEINKNG

SEQ ID NO: 105337 - protein, 270 aa, Arabidopsis thaliana
  peptide (1)..(270): Ceres Seq. ID no. 13617004
  misc_feature (218)..(256): Pfam Name: Zinc finger, C3HC4 type (RING finger) Pfam Description: Zinc finger, C3HC4 type (RING finger)
  misc_feature (1)..(270): Homolog of NCBI NO: 15242675 NR Description: expressed protein [Arabidopsis thaliana]
  misc_feature (1)..(270): Homolog of NCBI NO: 21618140 NR Description: putative RING zinc finger protein [Arabidopsis
  misc_feature (1)..(270): Homolog of NCBI NO: 26449588 NR Description: unknown protein [Arabidopsis thaliana]
  misc_feature (1)..(270): Homolog of NCBI NO: 18398633 NR Description: putative RING zinc finger protein [Arabidopsis >gi|6681341|gb|AAF23258.1|AC015985_16 putative RING zinc finger [Arabidopsis thaliana] >gi|6682260|gb|AAF23312.1|AC016661_37
  misc_feature (1)..(236): Homolog of NCBI NO: 30681003 NR Description: putative RING zinc finger protein [Arabidopsis
  misc_feature (1)..(269): Homolog of NCBI NO: 37532246 NR Description: putative hydroxyproline-rich glycoprotein [Oryza
  misc_feature (12)..(270): Homolog of NCBI NO: 15231808 NR Description: expressed protein [Arabidopsis thaliana]
  misc_feature (1)..(266): Homolog of NCBI NO: 15239642 NR Description: expressed protein [Arabidopsis thaliana]
  misc_feature (1)..(266): Homolog of NCBI NO: 21928149 NR Description: AT5g19080/T16G12_120 [Arabidopsis thaliana]
  misc_feature (1)..(269): Homolog of NCBI NO: 6862918 NR Description: putative RING zinc finger protein [Arabidopsis
MLPYNFNHLHHYPPNSYQLPHPLFHGGRYPILPPPTYVHQKAVTIRNDVNLKKKTLTLIPDPENPNRLLVSFTFDASMPGRITVVFFATEDAECNLRATKEDTLPPITFDFGEGLGQKFIQSSGTGIDLTAFKDSELFKEVDTDVFPLAVKAEATPAEEGKSGSTNVQITQVVYTKEKGEIKIEVVKQILWVNKRRYELLEIYGIENTVDGSDEGKECVVCLSEPRDTTVLPCRHMCMCSGCAKALRFQTNLCPVCRQPVEMLLEINKNG

SEQ ID NO: 105338 - DNA, 1225 bp, Arabidopsis thaliana
  misc_feature (1)..(1225): Ceres Seq. ID no. 13617008
  misc_feature: MA Experiment ID: 20000171 Result: Up-regulated in Transcription
  misc_feature: MA Experiment 20000171 PARAMETER Experiment Name: At_42deg_Heat_P Parameter: Age (day) Value: 14
  misc_feature: MA Experiment 20000171 PARAMETER Experiment Name: At_42deg_Heat_P Parameter: Organism Value: A. thaliana
  misc_feature: MA Experiment 20000171 PARAMETER Experiment Name: At_42deg_Heat_P Parameter: Plant Line Value: WS
  misc_feature: MA Experiment 20000171 PARAMETER Experiment Name: At_42deg_Heat_P Parameter: Temperature (deg C) Value: 42 vs. 22
  misc_feature: MA Experiment 20000171 PARAMETER Experiment Name: At_42deg_Heat_P Parameter: Timepoint (hr) Value: 1
  misc_feature: MA Experiment 20000171 PARAMETER Experiment Name: At_42deg_Heat_P Parameter: Tissue Value: Aerial
  misc_feature: MA Experiment ID: 20000438 Result: Down-regulated in Transcription
  misc_feature: MA Experiment 20000438 PARAMETER Experiment Name: At_Shoots__P Parameter: Age (day) Value: 14
  misc_feature: MA Experiment 20000438 PARAMETER Experiment Name: At_Shoots__P Parameter: Tissue Value: Shoots vs. Whole Plant
  misc_feature: MA Experiment ID: 20001247 Result: Down-regulated in Transcription
  misc_feature: MA Experiment 20001247 PARAMETER Experiment Name: At_Far-red-induction_P Parameter: Age (day) Value: 7
  misc_feature: MA Experiment 20001247 PARAMETER Experiment Name: At_Far-red-induction_P Parameter: Light Value: Far-red vs. White
  misc_feature: MA Experiment 20001247 PARAMETER Experiment Name: At_Far-red-induction_P Parameter: Organism Value: A. thaliana
  misc_feature: MA Experiment 20001247 PARAMETER Experiment Name: At_Far-red-induction_P Parameter: Plant Line Value: Columbia
  misc_feature: MA Experiment 20001247 PARAMETER Experiment Name: At_Far-red-induction_P Parameter: Timepoint (hr) Value: 1
  misc_feature: MA Experiment 20001247 PARAMETER Experiment Name: At_Far-red-induction_P Parameter: Tissue Value: Whole Plant
  misc_feature: MA Experiment ID: 20001248 Result: Up-regulated in Transcription
  misc_feature: MA Experiment 20001248 PARAMETER Experiment Name: At_Far-red-induction_P Parameter: Age (day) Value: 7
  misc_feature: MA Experiment 20001248 PARAMETER Experiment Name: At_Far-red-induction_P Parameter: Light Value: Far-red vs. White
  misc_feature: MA Experiment 20001248 PARAMETER Experiment Name: At_Far-red-induction_P Parameter: Organism Value: A. thaliana
  misc_feature: MA Experiment 20001248 PARAMETER Experiment Name: At_Far-red-induction_P Parameter: Plant Line Value: Columbia
  misc_feature: MA Experiment 20001248 PARAMETER Experiment Name: At_Far-red-induction_P Parameter: Timepoint (hr) Value: 4
  misc_feature: MA Experiment 20001248 PARAMETER Experiment Name: At_Far-red-induction_P Parameter: Tissue Value: Whole Plant
  misc_feature: MA Experiment ID: 20001451 Result: Up-regulated in Transcription
  misc_feature: MA Experiment 20001451 PARAMETER Experiment Name: At_Far-red-induction_P Parameter: Age (day) Value: 7
  misc_feature: MA Experiment 20001451 PARAMETER Experiment Name: At_Far-red-induction_P Parameter: Light Value: Far-red vs. White
  misc_feature: MA Experiment 20001451 PARAMETER Experiment Name: At_Far-red-induction_P Parameter: Organism Value: A. thaliana
  misc_feature: MA Experiment 20001451 PARAMETER Experiment Name: At_Far-red-induction_P Parameter: Plant Line Value: Columbia
  misc_feature: MA Experiment 20001451 PARAMETER Experiment Name: At_Far-red-induction_P Parameter: Timepoint (hr) Value: 24
  misc_feature: MA Experiment 20001451 PARAMETER Experiment Name: At_Far-red-induction_P Parameter: Tissue Value: Whole Plant
  misc_feature: MA Experiment ID: 20001558 Result: Down-regulated in Transcription
  misc_feature: MA Experiment 20001558 PARAMETER Experiment Name: At_Drought_Soil_Dry_P Parameter: Age (day) Value: 27
  misc_feature: MA Experiment 20001558 PARAMETER Experiment Name: At_Drought_Soil_Dry_P Parameter: Organism Value: A. thaliana
  misc_feature: MA Experiment 20001558 PARAMETER Experiment Name: At_Drought_Soil_Dry_P Parameter: Plant Line Value: WS
  misc_feature: MA Experiment 20001558 PARAMETER Experiment Name: At_Drought_Soil_Dry_P Parameter: Post Timepoint (hr) Value: 6
  misc_feature: MA Experiment 20001558 PARAMETER Experiment Name: At_Drought_Soil_Dry_P Parameter: Post-Treatment Value: Re-Water vs. No Drought
  misc_feature: MA Experiment 20001558 PARAMETER Experiment Name: At_Drought_Soil_Dry_P Parameter: Timepoint (day) Value: 13
  misc_feature: MA Experiment 20001558 PARAMETER Experiment Name: At_Drought_Soil_Dry_P Parameter: Treatment Value: Drought vs. No Drought
  misc_feature: MA Experiment ID: 20001560 Result: Down-regulated in Transcription
  misc_feature: MA Experiment 20001560 PARAMETER Experiment Name: At_Drought_Soil_Dry_P Parameter: Age (day) Value: 28
  misc_feature: MA Experiment 20001560 PARAMETER Experiment Name: At_Drought_Soil_Dry_P Parameter: Organism Value: A. thaliana
  misc_feature: MA Experiment 20001560 PARAMETER Experiment Name: At_Drought_Soil_Dry_P Parameter: Plant Line Value: WS
  misc_feature: MA Experiment 20001560 PARAMETER Experiment Name: At_Drought_Soil_Dry_P Parameter: Post Timepoint (hr) Value: None
  misc_feature: MA Experiment 20001560 PARAMETER Experiment Name: At_Drought_Soil_Dry_P Parameter: Post-Treatment Value: None
  misc_feature: MA Experiment 20001560 PARAMETER Experiment Name: At_Drought_Soil_Dry_P Parameter: Timepoint (day) Value: 14
  misc_feature: MA Experiment 20001560 PARAMETER Experiment Name: At_Drought_Soil_Dry_P Parameter: Treatment Value: Drought vs. No Drought
  misc_feature: MA Experiment ID: 20001911 Result: Up-regulated in Transcription
  misc_feature: MA Experiment 20001911 PARAMETER Experiment Name: At_Drought_Reproduction_P Parameter: Age (day) Value: 40
  misc_feature: MA Experiment 20001911 PARAMETER Experiment Name: At_Drought_Reproduction_P Parameter: Organism Value: A. thaliana
  misc_feature: MA Experiment 20001911 PARAMETER Experiment Name: At_Drought_Reproduction_P Parameter: Plant Line Value: WS
  misc_feature: MA Experiment 20001911 PARAMETER Experiment Name: At_Drought_Reproduction_P Parameter: Timepoint (day) Value: 10
  misc_feature: MA Experiment 20001911 PARAMETER Experiment Name: At_Drought_Reproduction_P Parameter: Tissue Value: Flowers
  misc_feature: MA Experiment 20001911 PARAMETER Experiment Name: At_Drought_Reproduction_P Parameter: Treatment Value: Drought vs. No Drought
aataattcatcctttcgtctttttctgactcttcaatctctcccaaagcctaaagcgatctctgcaaatctctcgcgactctctctttcaagatgcaaatcttcgtgaaaacactcactggcaagactatcactctcgaggttgagagctctgacaccatcgacaatgttaaggcaaagattcaggacaaggaaggcattcctccggatcagcaaagattaatattcgccggtaaacagctagaagatggccgtaccttggccgattacaacattcagaaagaatcaacccttcatttggttctccgtttaagaggtggtatgcaaatctttgtcaagactctgactggcaagaccattactttggaggttgagagctctgacactattgacaacgtcaaagcaaagatccaggacaaggaaggaatccctccggatcagcagagacttatctttgccggtaagcagcttgaagacggaagaactcttgctgactacaacattcaaaaggagtcgacccttcatttggtgcttcgtctcagaggtggtatgcaaatctttgtcaagaccctcactggtaaaacaatcacccttgaggttgagagttcagacaccattgacaatgtcaaagctaagatccaagataaagagggaattcctccggatcagcagaggcttatctttgccggtaagcagctcgaagatggacgcacccttgcagattacaacatccaaaaggagtcgacacttcatcttgtgcttcgtctccgtggtggtatgcagatctttgtgaagacccttaccggaaagaccattactctggaggttgaaagctcagacaccatcgataatgtcaaggctaagattcaggacaaggaagggatcccaccagaccaacagagactcatcttcgctggaaaacagcttgaggatggtcgcacacttgcagattacaacatccagaaggagtcgactcttcacttggttcttcgtcttcgtggtggaagcttctaagctttttgtgatctgatgataagtggttggttcgtgtctcatgcacttgggaggtgatctatttcacctggtgtagtttgtgtttccgtcagttggaaaaacttatccctatcgatttcgttttcattttctgcttttcttttatgtaccttcgtttgggcttgtaacgggcctttgtatttcaactctcaataataatccaagtgcatgtt

SEQ ID NO: 105339 - protein, 306 aa, Arabidopsis thaliana; identical to SEQ ID NO: 42947
  peptide (1)..(306): Ceres Seq. ID no. 13617009
  misc_feature (1)..(74): Pfam Name: Ubiquitin family Pfam Description: Ubiquitin family
  misc_feature (1)..(306): Homolog of NCBI NO: 18420267 NR Description: polyubiquitin (UBQ4) [Arabidopsis thaliana]
  misc_feature (1)..(306): Homolog of NCBI NO: 30679945 NR Description: polyubiquitin (UBQ3) [Arabidopsis thaliana]
  misc_feature (1)..(306): Homolog of NCBI NO: 418854 NR Description: polyubiquitin 6 - parsley polyubiquitin [Petroselinum crispum] >gi|288114|emb|CAA45622.1|
  misc_feature (1)..(305): Homolog of NCBI NO: 100524 NR Description: polyubiquitin 6 - common sunflower hexaubiquitin protein [Helianthus annuus]
  misc_feature (1)..(304): Homolog of NCBI NO: 100524 NR Description: polyubiquitin 6 - common sunflower hexaubiquitin protein [Helianthus annuus]
  misc_feature (1)..(304): Homolog of NCBI NO: 100524 NR Description: polyubiquitin 6 - common sunflower hexaubiquitin protein [Helianthus annuus]
  misc_feature (1)..(304): Homolog of NCBI NO: 100934 NR Description: polyubiquitin - maize >gi|248337|gb|AAB21993.1|
  misc_feature (1)..(304): Homolog of NCBI NO: 418854 NR Description: polyubiquitin 6 - parsley polyubiquitin [Petroselinum crispum] >gi|288114|emb|CAA45622.1|
  misc_feature (1)..(304): Homolog of NCBI NO: 481477 NR Description: polyubiquitin 6 - rice >gi|416038|emb|CAA53665.1|
  misc_feature (1)..(304): Homolog of NCBI NO: 481477 NR Description: polyubiquitin 6 - rice >gi|416038|emb|CAA53665.1|

SEQ ID NO: 105340 - protein, 230 aa, Arabidopsis thaliana; identical to SEQ ID NO: 42948
  peptide (1)..(230): Ceres Seq. ID no. 13617010
  misc_feature (1)..(74): Pfam Name: Ubiquitin family Pfam Description: Ubiquitin family
  misc_feature (1)..(230): Homolog of NCBI NO: 18420267 NR Description: polyubiquitin (UBQ4) [Arabidopsis thaliana]
  misc_feature (1)..(230): Homolog of NCBI NO: 30679945 NR Description: polyubiquitin (UBQ3) [Arabidopsis thaliana]
  misc_feature (1)..(230): Homolog of NCBI NO: 418854 NR Description: polyubiquitin 6 - parsley polyubiquitin [Petroselinum crispum] >gi|288114|emb|CAA45622.1|
  misc_feature (1)..(229): Homolog of NCBI NO: 100524 NR Description: polyubiquitin 6 - common sunflower hexaubiquitin protein [Helianthus annuus]
  misc_feature (1)..(228): Homolog of NCBI NO: 100524 NR Description: polyubiquitin 6 - common sunflower hexaubiquitin protein [Helianthus annuus]
  misc_feature (1)..(228): Homolog of NCBI NO: 100934 NR Description: polyubiquitin - maize >gi|248337|gb|AAB21993.1|
  misc_feature (1)..(228): Homolog of NCBI NO: 100934 NR Description: polyubiquitin - maize >gi|248337|gb|AAB21993.1|
  misc_feature (1)..(228): Homolog of NCBI NO: 418854 NR Description: polyubiquitin 6 - parsley polyubiquitin [Petroselinum crispum] >gi|288114|emb|CAA45622.1|
  misc_feature (1)..(228): Homolog of NCBI NO: 481477 NR Description: polyubiquitin 6 - rice >gi|416038|emb|CAA53665.1|
  misc_feature (1)..(228): Homolog of NCBI NO: 18420267 NR Description: polyubiquitin (UBQ4) [Arabidopsis thaliana]

SEQ ID NO: 105341 - protein, 154 aa, Arabidopsis thaliana; identical to SEQ ID NO: 42949
  peptide (1)..(154): Ceres Seq. ID no. 13617011
  misc_feature (1)..(74): Pfam Name: Ubiquitin family Pfam Description: Ubiquitin family
  misc_feature (1)..(154): Homolog of NCBI NO: 18420267 NR Description: polyubiquitin (UBQ4) [Arabidopsis thaliana]
  misc_feature (1)..(154): Homolog of NCBI NO: 30679945 NR Description: polyubiquitin (UBQ3) [Arabidopsis thaliana]
  misc_feature (1)..(154): Homolog of NCBI NO: 418854 NR Description: polyubiquitin 6 - parsley polyubiquitin [Petroselinum crispum] >gi|288114|emb|CAA45622.1|
  misc_feature (1)..(153): Homolog of NCBI NO: 100524 NR Description: polyubiquitin 6 - common sunflower hexaubiquitin protein [Helianthus annuus]
  misc_feature (1)..(152): Homolog of NCBI NO: 100524 NR Description: polyubiquitin 6 - common sunflower hexaubiquitin protein [Helianthus annuus]
  misc_feature (1)..(152): Homolog of NCBI NO: 100524 NR Description: polyubiquitin 6 - common sunflower hexaubiquitin protein [Helianthus annuus]
  misc_feature (1)..(152): Homolog of NCBI NO: 100934 NR Description: polyubiquitin - maize >gi|248337|gb|AAB21993.1|
  misc_feature (1)..(152): Homolog of NCBI NO: 100934 NR Description: polyubiquitin - maize >gi|248337|gb|AAB21993.1|
  misc_feature (1)..(152): Homolog of NCBI NO: 418854 NR Description: polyubiquitin 6 - parsley polyubiquitin [Petroselinum crispum] >gi|288114|emb|CAA45622.1|
  misc_feature (1)..(152): Homolog of NCBI NO: 481477 NR Description: polyubiquitin 6 - rice >gi|416038|emb|CAA53665.1|

SEQ ID NO: 105342 - DNA, 1560 bp, Arabidopsis thaliana
  misc_feature (1)..(1560): Ceres Seq. ID no. 13617012
  misc_feature: MA Experiment ID: 108434 Result: Down-regulated in Transcription
  misc_feature: MA Experiment 108434 PARAMETER Experiment Name: At_Root_Tips_cDNA_P Parameter: Tissue Value: Root Tips
  misc_feature: MA Experiment ID: 108585 Result: Up-regulated in Transcription
  misc_feature: MA Experiment 108585 PARAMETER Experiment Name: At_5mM_NaNP_cDNA_P Parameter: Timepoint (hr) Value: 6
  misc_feature: MA Experiment 108585 PARAMETER Experiment Name: At_5mM_NaNP_cDNA_P Parameter: Tissue Value: Aerial
  misc_feature: MA Experiment 108585 PARAMETER Experiment Name: At_5mM_NaNP_cDNA_P Parameter: Treatment Value: null
  misc_feature: MA Experiment ID: 108595 Result: Down-regulated in Transcription
  misc_feature: MA Experiment 108595 PARAMETER Experiment Name: At_Ler-pi_Ovule_cDNA_P Parameter: Plant Line Value: null
  misc_feature: MA Experiment ID: 108668 Result: Up-regulated in Transcription
  misc_feature: MA Experiment 108668 PARAMETER Experiment Name: At_2mM_SA_cDNA_P Parameter: Plant Line Value: WS
  misc_feature: MA Experiment 108668 PARAMETER Experiment Name: At_2mM_SA_cDNA_P Parameter: Timepoint (hr) Value: 6
  misc_feature: MA Experiment 108668 PARAMETER Experiment Name: At_2mM_SA_cDNA_P Parameter: Treatment Value: 2mM SA vs. No Treatment
  misc_feature: MA Experiment ID: 20000113 Result: Down-regulated in Transcription
  misc_feature: MA Experiment 20000113 PARAMETER Experiment Name: At_42deg_Heat_cDNA_P Parameter: Temperature (deg C) Value: 42 vs. 22
  misc_feature: MA Experiment 20000113 PARAMETER Experiment Name: At_42deg_Heat_cDNA_P Parameter: Timepoint (hr) Value: 8
  misc_feature: MA Experiment 20000113 PARAMETER Experiment Name: At_42deg_Heat_cDNA_P Parameter: Tissue Value: Aerial
  misc_feature: MA Experiment ID: 20000180 Result: Down-regulated in Transcription
  misc_feature: MA Experiment 20000180 PARAMETER Experiment Name: At_Germinating_Seeds_P Parameter: Age (hr) Value: 24 vs. 0
  misc_feature: MA Experiment 20000180 PARAMETER Experiment Name: At_Germinating_Seeds_P Parameter: Tissue Value: Germinating Seeds
  misc_feature: MA Experiment ID: 20000184 Result: Down-regulated in Transcription
  misc_feature: MA Experiment 20000184 PARAMETER Experiment Name: At_Shoots__P Parameter: Age (day) Value: 7
  misc_feature: MA Experiment 20000184 PARAMETER Experiment Name: At_Shoots__P Parameter: Tissue Value: Shoots vs. Whole Plant
  misc_feature: MA Experiment ID: 20000224 Result: Down-regulated in Transcription
  misc_feature: MA Experiment ID: 20000234 Result: Down-regulated in Transcription
  misc_feature: MA Experiment 20000234 PARAMETER Experiment Name: At_Siliques_P Parameter: Age (day) Value: 21
  misc_feature: MA Experiment 20000234 PARAMETER Experiment Name: At_Siliques_P Parameter: Organism Value: A. thaliana
  misc_feature: MA Experiment 20000234 PARAMETER Experiment Name: At_Siliques_P Parameter: Plant Line Value: WS
  misc_feature: MA Experiment 20000234 PARAMETER Experiment Name: At_Siliques_P Parameter: Tissue Value: Less Than 5mm Siliques vs. Whole Plant
  misc_feature: MA Experiment ID: 20000235 Result: Down-regulated in Transcription
  misc_feature: MA Experiment 20000235 PARAMETER Experiment Name: At_Siliques_P Parameter: Age (day) Value: 21
  misc_feature: MA Experiment 20000235 PARAMETER Experiment Name: At_Siliques_P Parameter: Organism Value: A. thaliana
  misc_feature: MA Experiment 20000235 PARAMETER Experiment Name: At_Siliques_P Parameter: Plant Line Value: WS
  misc_feature: MA Experiment 20000235 PARAMETER Experiment Name: At_Siliques_P Parameter: Tissue Value: 5-10mm Siliques vs. Whole Plant
  misc_feature: MA Experiment ID: 20000441 Result: Up-regulated in Transcription
  misc_feature: MA Experiment 20000441 PARAMETER Experiment Name: At_1uM_BR-BRZ__P Parameter: Tissue Value: Shoot Apices
  misc_feature: MA Experiment 20000441 PARAMETER Experiment Name: At_1uM_BR-BRZ__P Parameter: Treatment Value: 1uM BR vs. No Treatment
aaacctttgacttcaaatttgttcttcctcttattagtcttcgtcatattttcttccttcttccatcttttagttctgataagttaacattttcataagacctcaaaaatagctcctacatttgttatcttccttttcaagtcaacaatatttttttttgttctgttatcaaagactccttcttttggtgattaaactctgttcaacttctgaaaaaaagttttgatttttcttttgtctgtagtacacaaagatctcaaagtggaggaacctcggtgttttaacatctttacgaagatgaaatgcttcttattccctcttggggacaagaaagatgaacagagaagccctaaaccggtttcaccaacgtctaacttcagtgacgtaaacaaaagcggttcagatttcagtccccgggatgtttctggaacgagcacagtatcatccactggtaggaactcgaacactagcatgtcagctagagaaaacaaccttagagagttcactattggtgatcttaaatctgccacaaggaacttcagcaggtcaggtatgatcggggaaggcggttttggttgtgtcttctggggaacaatcaagaacttagaagacccatcgaagaaaatcgaagtcgcggttaaacagctcggcaaaagagggttgcagggtcataaagaatgggtgactgaagtgaactttctcggtgtagtcgagcattcaaacttggtgaagttgctgggacattgtgcagaagacgatgaacgtggaatccaaaggcttttggtttatgaatatatgccaaaccaaagtgtcgagttccatttatctccgcggtcaccgacagtacttacttgggacctcagattgagaatagcacaagacgcagctcgaggtttaacataccttcatgaagaaatggactttcagataatattccgtgatttcaagtcatccaacattctactagacgagaattggacagcgaagctttcggatttcggtttggctcgcttaggtccttcaccaggatccagccatgtttctactgatgtagtaggaacaatgggatacgcagctccagagtatatccaaacgggtcgcctcacgtcgaaaagcgatgtgtggggatacggagttttcatctatgagctcattacaggaagaaggccactagaccggaacaagcctaaaggagagcagaagcttttagaatgggtgagaccttacttatccgacacaaggaggttccggctaatagtagacccgaggctcgagggaaagtacatgatcaagtcagtgcagaaactcgcggttgtagccaacctttgccttactagaaacgcaaaggcgcgtccaaagatgagcgaggtgttagagatggtgacaaagattgtggaagcttcatcgcctgggaatggtggcaagaagccgcagctggttccactaaagagtcaagaaacttctagagtcgaggaagggaagaataagaaggttcttgatggtgctgaaggaggttggttagaaaagttgtggaacccaaagaatgtgagagcttgttga

SEQ ID NO: 105343 - protein, 420 aa, Arabidopsis thaliana
  peptide (1)..(420): Ceres Seq. ID no. 13617013
  misc_feature (1)..(420): Homolog of NCBI NO: 15242720 NR Description: protein kinase, putative [Arabidopsis thaliana]
  misc_feature (1)..(420): Homolog of NCBI NO: 15232764 NR Description: protein kinase, putative [Arabidopsis thaliana] putative protein kinase [Arabidopsis thaliana]
  misc_feature (1)..(418): Homolog of NCBI NO: 7248457 NR Description: protein serine/threonine kinase [Lophopyrum >gi|13022177|gb|AAK11674.1|AF339747_1 protein kinase [Lophopyrum
  misc_feature (1)..(417): Homolog of NCBI NO: 30687780 NR Description: protein kinase, putative [Arabidopsis thaliana]
  misc_feature (1)..(417): Homolog of NCBI NO: 28416693 NR Description: At2g39110 [Arabidopsis thaliana]
  misc_feature (1)..(417): Homolog of NCBI NO: 25287613 NR Description: probable protein kinase [imported] - Arabidopsis >gi|3928095|gb|AAC79621.1| putative protein kinase [Arabidopsis
  misc_feature (17)..(418): Homolog of NCBI NO: 37534774 NR Description: putative serine/threonine kinase [Oryza sativa
  misc_feature (63)..(401): Homolog of NCBI NO: 7488278 NR Description: probable protein kinase [imported] - Arabidopsis >gi|3461836|gb|AAC33222.1| putative protein kinase [Arabidopsis >gi|20197438|gb|AAM15076.1| putative protein kinase [Arabidopsis
  misc_feature (122)..(401): Homolog of NCBI NO: 30684071 NR Description: protein kinase family [Arabidopsis thaliana]
  misc_feature (24)..(360): Homolog of NCBI NO: 15242204 NR Description: serine/threonine specific protein kinase -related
MKCFLFPLGDKKDEQRSPKPVSPTSNFSDVNKSGSDFSPRDVSGTSTVSSTGRNSNTSMSARENNLREFTIGDLKSATRNFSRSGMIGEGGFGCVFWGTIKNLEDPSKKIEVAVKQLGKRGLQGHKEWVTEVNFLGVVEHSNLVKLLGHCAEDDERGIQRLLVYEYMPNQSVEFHLSPRSPTVLTWDLRLRIAQDAARGLTYLHEEMDFQIIFRDFKSSNILLDENWTAKLSDFGLARLGPSPGSSHVSTDVVGTMGYAAPEYIQTGRLTSKSDVWGYGVFIYELITGRRPLDRNKPKGEQKLLEWVRPYLSDTRRFRLIVDPRLEGKYMIKSVQKLAVVANLCLTRNAKARPKMSEVLEMVTKIVEASSPGNGGKKPQLVPLKSQETSRVEEGKNKKVLDGAEGGWLEKLWNPKNVRAC

SEQ ID NO: 105344 - protein, 362 aa, Arabidopsis thaliana
  peptide (1)..(362): Ceres Seq. ID no. 13617014
  misc_feature (1)..(362): Homolog of NCBI NO: 15242720 NR Description: protein kinase, putative [Arabidopsis thaliana]
  misc_feature (1)..(362): Homolog of NCBI NO: 15232764 NR Description: protein kinase, putative [Arabidopsis thaliana] putative protein kinase [Arabidopsis thaliana]
  misc_feature (1)..(360): Homolog of NCBI NO: 7248457 NR Description: protein serine/threonine kinase [Lophopyrum >gi|13022177|gb|AAK11674.1|AF339747_1 protein kinase [Lophopyrum
  misc_feature (1)..(359): Homolog of NCBI NO: 30687780 NR Description: protein kinase, putative [Arabidopsis thaliana]
  misc_feature (1)..(359): Homolog of NCBI NO: 28416693 NR Description: At2g39110 [Arabidopsis thaliana]
  misc_feature (1)..(359): Homolog of NCBI NO: 25287613 NR Description: probable protein kinase [imported] - Arabidopsis >gi|3928095|gb|AAC79621.1| putative protein kinase [Arabidopsis
  misc_feature (1)..(360): Homolog of NCBI NO: 37534774 NR Description: putative serine/threonine kinase [Oryza sativa
  misc_feature (5)..(343): Homolog of NCBI NO: 7488278 NR Description: probable protein kinase [imported] - Arabidopsis >gi|3461836|gb|AAC33222.1| putative protein kinase [Arabidopsis >gi|20197438|gb|AAM15076.1| putative protein kinase [Arabidopsis
  misc_feature (64)..(343): Homolog of NCBI NO: 30684071 NR Description: protein kinase family [Arabidopsis thaliana]
  misc_feature (1)..(302): Homolog of NCBI NO: 15242204 NR Description: serine/threonine specific protein kinase -related
MSARENNLREFTIGDLKSATRNFSRSGMIGEGGFGCVFWGTIKNLEDPSKKIEVAVKQLGKRGLQGHKEWVTEVNFLGVVEHSNLVKLLGHCAEDDERGIQRLLVYEYMPNQSVEFHLSPRSPTVLTWDLRLRIAQDAARGLTYLHEEMDFQIIFRDFKSSNILLDENWTAKLSDFGLARLGPSPGSSHVSTDVVGTMGYAAPEYIQTGRLTSKSDVWGYGVFIYELITGRRPLDRNKPKGEQKLLEWVRPYLSDTRRFRLIVDPRLEGKYMIKSVQKLAVVANLCLTRNAKARPKMSEVLEMVTKIVEASSPGNGGKKPQLVPLKSQETSRVEEGKNKKVLDGAEGGWLEKLWNPKNVRAC

SEQ ID NO: 105345 - protein, 335 aa, Arabidopsis thaliana
  peptide (1)..(335): Ceres Seq. ID no. 13617015
  misc_feature (1)..(335): Homolog of NCBI NO: 15242720 NR Description: protein kinase, putative [Arabidopsis thaliana]
  misc_feature (1)..(335): Homolog of NCBI NO: 15232764 NR Description: protein kinase, putative [Arabidopsis thaliana] putative protein kinase [Arabidopsis thaliana]
  misc_feature (1)..(333): Homolog of NCBI NO: 7248457 NR Description: protein serine/threonine kinase [Lophopyrum >gi|13022177|gb|AAK11674.1|AF339747_1 protein kinase [Lophopyrum
  misc_feature (1)..(332): Homolog of NCBI NO: 30687780 NR Description: protein kinase, putative [Arabidopsis thaliana]
  misc_feature (1)..(332): Homolog of NCBI NO: 28416693 NR Description: At2g39110 [Arabidopsis thaliana]
  misc_feature (1)..(332): Homolog of NCBI NO: 25287613 NR Description: probable protein kinase [imported] - Arabidopsis >gi|3928095|gb|AAC79621.1| putative protein kinase [Arabidopsis
  misc_feature (1)..(333): Homolog of NCBI NO: 37534774 NR Description: putative serine/threonine kinase [Oryza sativa
  misc_feature (1)..(316): Homolog of NCBI NO: 7488278 NR Description: probable protein kinase [imported] - Arabidopsis >gi|3461836|gb|AAC33222.1| putative protein kinase [Arabidopsis >gi|20197438|gb|AAM15076.1| putative protein kinase [Arabidopsis
  misc_feature (37)..(316): Homolog of NCBI NO: 30684071 NR Description: protein kinase family [Arabidopsis thaliana]
  misc_feature (1)..(275): Homolog of NCBI NO: 15242204 NR Description: serine/threonine specific protein kinase -related
MIGEGGFGCVFWGTIKNLEDPSKKIEVAVKQLGKRGLQGHKEWVTEVNFLGVVEHSNLVKLLGHCAEDDERGIQRLLVYEYMPNQSVEFHLSPRSPTVLTWDLRLRIAQDAARGLTYLHEEMDFQIIFRDFKSSNILLDENWTAKLSDFGLARLGPSPGSSHVSTDVVGTMGYAAPEYIQTGRLTSKSDVWGYGVFIYELITGRRPLDRNKPKGEQKLLEWVRPYLSDTRRFRLIVDPRLEGKYMIKSVQKLAVVANLCLTRNAKARPKMSEVLEMVTKIVEASSPGNGGKKPQLVPLKSQETSRVEEGKNKKVLDGAEGGWLEKLWNPKNVRAC

SEQ ID NO: 105346 - DNA, 1101 bp, Arabidopsis thaliana
  misc_feature (1)..(1101): Ceres Seq. ID no. 13617031
  misc_feature: MA Experiment ID: 108434 Result: Down-regulated in Transcription
  misc_feature: MA Experiment 108434 PARAMETER Experiment Name: At_Root_Tips_cDNA_P Parameter: Tissue Value: Root Tips
  misc_feature: MA Experiment ID: 108488 Result: Down-regulated in Transcription
  misc_feature: MA Experiment ID: 108576 Result: Down-regulated in Transcription
  misc_feature: MA Experiment 108576 PARAMETER Experiment Name: At_42deg_Heat_cDNA_P Parameter: Temperature (deg C) Value: 42 vs. 22
  misc_feature: MA Experiment 108576 PARAMETER Experiment Name: At_42deg_Heat_cDNA_P Parameter: Timepoint (hr) Value: 1
  misc_feature: MA Experiment 108576 PARAMETER Experiment Name: At_42deg_Heat_cDNA_P Parameter: Tissue Value: Aerial
  misc_feature: MA Experiment ID: 108577 Result: Down-regulated in Transcription
  misc_feature: MA Experiment 108577 PARAMETER Experiment Name: At_42deg_Heat_cDNA_P Parameter: Temperature (deg C) Value: 42 vs. 22
  misc_feature: MA Experiment 108577 PARAMETER Experiment Name: At_42deg_Heat_cDNA_P Parameter: Timepoint (hr) Value: 6
  misc_feature: MA Experiment 108577 PARAMETER Experiment Name: At_42deg_Heat_cDNA_P Parameter: Tissue Value: Aerial
  misc_feature: MA Experiment ID: 108595 Result: Down-regulated in Transcription
  misc_feature: MA Experiment 108595 PARAMETER Experiment Name: At_Ler-pi_Ovule_cDNA_P Parameter: Plant Line Value: null
  misc_feature: MA Experiment ID: 20000112 Result: Down-regulated in Transcription
  misc_feature: MA Experiment 20000112 PARAMETER Experiment Name: At_42deg_Heat_cDNA_P Parameter: Temperature (deg C) Value: 42 vs. 22
  misc_feature: MA Experiment 20000112 PARAMETER Experiment Name: At_42deg_Heat_cDNA_P Parameter: Timepoint (hr) Value: 2
  misc_feature: MA Experiment 20000112 PARAMETER Experiment Name: At_42deg_Heat_cDNA_P Parameter: Tissue Value: Aerial
  misc_feature: MA Experiment ID: 20000113 Result: Down-regulated in Transcription
  misc_feature: MA Experiment 20000113 PARAMETER Experiment Name: At_42deg_Heat_cDNA_P Parameter: Temperature (deg C) Value: 42 vs. 22
  misc_feature: MA Experiment 20000113 PARAMETER Experiment Name: At_42deg_Heat_cDNA_P Parameter: Timepoint (hr) Value: 8
  misc_feature: MA Experiment 20000113 PARAMETER Experiment Name: At_42deg_Heat_cDNA_P Parameter: Tissue Value: Aerial
  misc_feature: MA Experiment ID: 20000173 Result: Down-regulated in Transcription
  misc_feature: MA Experiment 20000173 PARAMETER Experiment Name: At_42deg_Heat_P Parameter: Age (day) Value: 14
  misc_feature: MA Experiment 20000173 PARAMETER Experiment Name: At_42deg_Heat_P Parameter: Organism Value: A. thaliana
  misc_feature: MA Experiment 20000173 PARAMETER Experiment Name: At_42deg_Heat_P Parameter: Plant Line Value: WS
  misc_feature: MA Experiment 20000173 PARAMETER Experiment Name: At_42deg_Heat_P Parameter: Temperature (deg C) Value: 42 vs. 22
  misc_feature: MA Experiment 20000173 PARAMETER Experiment Name: At_42deg_Heat_P Parameter: Timepoint (hr) Value: 6
  misc_feature: MA Experiment 20000173 PARAMETER Experiment Name: At_42deg_Heat_P Parameter: Tissue Value: Aerial
  misc_feature: MA Experiment ID: 20001557 Result: Up-regulated in Transcription
  misc_feature: MA Experiment 20001557 PARAMETER Experiment Name: At_Drought_Soil_Dry_P Parameter: Age (day) Value: 27
  misc_feature: MA Experiment 20001557 PARAMETER Experiment Name: At_Drought_Soil_Dry_P Parameter: Organism Value: A. thaliana
  misc_feature: MA Experiment 20001557 PARAMETER Experiment Name: At_Drought_Soil_Dry_P Parameter: Plant Line Value: WS
  misc_feature: MA Experiment 20001557 PARAMETER Experiment Name: At_Drought_Soil_Dry_P Parameter: Post Timepoint (hr) Value: 3
  misc_feature: MA Experiment 20001557 PARAMETER Experiment Name: At_Drought_Soil_Dry_P Parameter: Post-Treatment Value: Re-Water vs. No Drought
  misc_feature: MA Experiment 20001557 PARAMETER Experiment Name: At_Drought_Soil_Dry_P Parameter: Timepoint (day) Value: 13
  misc_feature: MA Experiment 20001557 PARAMETER Experiment Name: At_Drought_Soil_Dry_P Parameter: Treatment Value: Drought vs. No Drought
aacttgttttcttcagcgagcgacattttggaaggaagcattccattagcttttttgctgtctccagaaaataaattttcaatctttcgtcggaaaaaagaagaagaagaagcagagctgggtttagttttttcacgagaagcaaagagatcaataagtcagtgagcttttttctcgtttctgacgatggcggttgcgccggcaagagctcgttcagactatgattacctcatcaagcttcttctcatcggcgatagcggtgtggggaagagttgtttgttacttcgattctcagatgatactttcactacaagtttcattactaccattggtattgacttcaagataagaactgttgaacttgatgggaagcgtatcaaattgcagatttgggacactgctggtcaagaacgtttcagaactatcactacagcgtattacaggggagcgatgggtatattgcttgtctacgatgtaacggatgagtcatcttttaacaatattaggaactggatgaagaacattgagcaacatgcctcagataatgtcaacaaaatattggttggtaacaaagctgatatggatgaaagcaaaagggctgttccaacagcaaagggccaagctttggctgatgagtatggaatcaaattctttgagacgagtgcaaaaacaaacctcaatgtcgaaaatgttttcatgtcaatcgcaaaagacataaaacaaagattgacagaaaccgacacgaaggcagagccccaaggcatcaagatcactaaacaagatactgccgcatcgtcttctacagccgagaagtcagcttgctgtagttacgtttaggagtatgattgctctttttcgcctgcaccgggttttttaaatatctggccatctttttcatctcttacgtctcaaatcagagataattctcatgttgttacctagaacgagtaggaaatctcattgatggttgtgatctttatgtctaatttgttatctccataattcctgtacaatgatcttcctgatatggaagactatgttggtcaaaaaactatgtgaaaaagactttgaatttataaaaatgaaactgttgtagtgtgt

SEQ ID NO: 105347 - protein, 216 aa, Arabidopsis thaliana; identical to SEQ ID NO: 26592
  peptide (1)..(216): Ceres Seq. ID no. 13617032
  misc_feature (17)..(179): Pfam Name: Ras family Pfam Description: Ras family
  misc_feature (1)..(216): Homolog of NCBI NO: 15242773 NR Description: GTP-binding protein, putative [Arabidopsis
  misc_feature (1)..(216): Homolog of NCBI NO: 21592670 NR Description: putative Ras-like GTP-binding protein
  misc_feature (1)..(216): Homolog of NCBI NO: 15232784 NR Description: GTP-binding protein, putative [Arabidopsis
  misc_feature (1)..(213): Homolog of NCBI NO: 1362067 NR Description: GTP-binding protein GTP13 - garden pea
  misc_feature (1)..(213): Homolog of NCBI NO: 18447917 NR Description: ras-related protein RAB8-3 [Nicotiana tabacum]
  misc_feature (1)..(213): Homolog of NCBI NO: 1362065 NR Description: GTP-binding protein GTP11 - garden pea
  misc_feature (1)..(213): Homolog of NCBI NO: 1362066 NR Description: GTP-binding protein GTP6 - garden pea
  misc_feature (1)..(213): Homolog of NCBI NO: 18447915 NR Description: ras-related protein RAB8-2 [Nicotiana tabacum]
  misc_feature (1)..(213): Homolog of NCBI NO: 18447913 NR Description: ras-related protein RAB8-1 [Nicotiana tabacum]
  misc_feature (1)..(213): Homolog of NCBI NO: 15231322 NR Description: Ras family GTP-binding protein [Arabidopsis

SEQ ID NO: 105348 - protein, 128 aa, Arabidopsis thaliana; identical to SEQ ID NO: 26593
  peptide (1)..(128): Ceres Seq. ID no. 13617033
  misc_feature (1)..(91): Pfam Name: Ras family Pfam Description: Ras family
  misc_feature (1)..(128): Homolog of NCBI NO: 15242773 NR Description: GTP-binding protein, putative [Arabidopsis
  misc_feature (1)..(128): Homolog of NCBI NO: 21592670 NR Description: putative Ras-like GTP-binding protein
  misc_feature (1)..(128): Homolog of NCBI NO: 15232784 NR Description: GTP-binding protein, putative [Arabidopsis
  misc_feature (1)..(125): Homolog of NCBI NO: 1362067 NR Description: GTP-binding protein GTP13 - garden pea
  misc_feature (1)..(125): Homolog of NCBI NO: 18447917 NR Description: ras-related protein RAB8-3 [Nicotiana tabacum]
  misc_feature (1)..(125): Homolog of NCBI NO: 1362065 NR Description: GTP-binding protein GTP11 - garden pea
  misc_feature (1)..(125): Homolog of NCBI NO: 1362066 NR Description: GTP-binding protein GTP6 - garden pea
  misc_feature (1)..(125): Homolog of NCBI NO: 15231322 NR Description: Ras family GTP-binding protein [Arabidopsis
  misc_feature (1)..(125): Homolog of NCBI NO: 18447915 NR Description: ras-related protein RAB8-2 [Nicotiana tabacum]
  misc_feature (1)..(125): Homolog of NCBI NO: 18447913 NR Description: ras-related protein RAB8-1 [Nicotiana tabacum]

SEQ ID NO: 105349 - DNA, 1361 bp, Arabidopsis thaliana
  misc_feature (1)..(1361): Ceres Seq. ID no. 13617034
  misc_feature: MA Experiment ID: 108434 Result: Down-regulated in Transcription
  misc_feature: MA Experiment 108434 PARAMETER Experiment Name: At_Root_Tips_cDNA_P Parameter: Tissue Value: Root Tips
  misc_feature: MA Experiment ID: 108469 Result: Up-regulated in Transcription
  misc_feature: MA Experiment ID: 108569 Result: Up-regulated in Transcription
  misc_feature: MA Experiment 108569 PARAMETER Experiment Name: At_0.001%_MeJA__cDNA_P Parameter: Timepoint (hr) Value: 6
  misc_feature: MA Experiment 108569 PARAMETER Experiment Name: At_0.001%_MeJA__cDNA_P Parameter: Tissue Value: Aerial
  misc_feature: MA Experiment 108569 PARAMETER Experiment Name: At_0.001%_MeJA__cDNA_P Parameter: Treatment Value: 0.001% MeJA vs. No Treatment
  misc_feature: MA Experiment ID: 108572 Result: Down-regulated in Transcription
  misc_feature: MA Experiment 108572 PARAMETER Experiment Name: At_Drought_cDNA_P Parameter: Timepoint (hr) Value: 1
  misc_feature: MA Experiment 108572 PARAMETER Experiment Name: At_Drought_cDNA_P Parameter: Tissue Value: Aerial
  misc_feature: MA Experiment 108572 PARAMETER Experiment Name: At_Drought_cDNA_P Parameter: Treatment Value: Drought vs. No Drought
  misc_feature: MA Experiment ID: 108594 Result: Down-regulated in Transcription
  misc_feature: MA Experiment 108594 PARAMETER Experiment Name: At_Ler-rhl_Root_cDNA_P Parameter: Plant Line Value: null
  misc_feature: MA Experiment ID: 108668 Result: Up-regulated in Transcription
  misc_feature: MA Experiment 108668 PARAMETER Experiment Name: At_2mM_SA_cDNA_P Parameter: Plant Line Value: WS
  misc_feature: MA Experiment 108668 PARAMETER Experiment Name: At_2mM_SA_cDNA_P Parameter: Timepoint (hr) Value: 6
  misc_feature: MA Experiment 108668 PARAMETER Experiment Name: At_2mM_SA_cDNA_P Parameter: Treatment Value: 2mM SA vs. No Treatment
  misc_feature: MA Experiment ID: 20000111 Result: Down-regulated in Transcription
  misc_feature: MA Experiment 20000111 PARAMETER Experiment Name: At_42deg_Heat_cDNA_P Parameter: Temperature (deg C) Value: 42 vs. 22
  misc_feature: MA Experiment 20000111 PARAMETER Experiment Name: At_42deg_Heat_cDNA_P Parameter: Timepoint (hr) Value: 6
  misc_feature: MA Experiment 20000111 PARAMETER Experiment Name: At_42deg_Heat_cDNA_P Parameter: Tissue Value: Aerial
  misc_feature: MA Experiment ID: 20000113 Result: Down-regulated in Transcription
  misc_feature: MA Experiment 20000113 PARAMETER Experiment Name: At_42deg_Heat_cDNA_P Parameter: Temperature (deg C) Value: 42 vs. 22
  misc_feature: MA Experiment 20000113 PARAMETER Experiment Name: At_42deg_Heat_cDNA_P Parameter: Timepoint (hr) Value: 8
  misc_feature: MA Experiment 20000113 PARAMETER Experiment Name: At_42deg_Heat_cDNA_P Parameter: Tissue Value: Aerial
  misc_feature: MA Experiment ID: 20000180 Result: Up-regulated in Transcription
  misc_feature: MA Experiment 20000180 PARAMETER Experiment Name: At_Germinating_Seeds_P Parameter: Age (hr) Value: 24 vs. 0
  misc_feature: MA Experiment 20000180 PARAMETER Experiment Name: At_Germinating_Seeds_P Parameter: Tissue Value: Germinating Seeds
  misc_feature: MA Experiment ID: 20000182 Result: Up-regulated in Transcription
  misc_feature: MA Experiment 20000182 PARAMETER Experiment Name: At_2mM_SA_P Parameter: Age (day) Value: 14
  misc_feature: MA Experiment 20000182 PARAMETER Experiment Name: At_2mM_SA_P Parameter: Organism Value: A. thaliana
  misc_feature: MA Experiment 20000182 PARAMETER Experiment Name: At_2mM_SA_P Parameter: Plant Line Value: WS
  misc_feature: MA Experiment 20000182 PARAMETER Experiment Name: At_2mM_SA_P Parameter: Timepoint (hr) Value: 6
  misc_feature: MA Experiment 20000182 PARAMETER Experiment Name: At_2mM_SA_P Parameter: Tissue Value: Aerial
  misc_feature: MA Experiment 20000182 PARAMETER Experiment Name: At_2mM_SA_P Parameter: Treatment Value: 2mM SA vs. No Treatment
  misc_feature: MA Experiment ID: 20000185 Result: Up-regulated in Transcription
  misc_feature: MA Experiment 20000185 PARAMETER Experiment Name: At_Roots__P Parameter: Age (day) Value: 7 vs. 21
  misc_feature: MA Experiment 20000185 PARAMETER Experiment Name: At_Roots__P Parameter: Organism Value: A. thaliana
  misc_feature: MA Experiment 20000185 PARAMETER Experiment Name: At_Roots__P Parameter: Tissue Value: Roots vs. Whole Plant
  misc_feature: MA Experiment ID: 20000495 Result: Up-regulated in Transcription
  misc_feature: MA Experiment 20000495 PARAMETER Experiment Name: At_Guard_Cells_P Parameter: Harvest Date Value: 8/2/2002
  misc_feature: MA Experiment 20000495 PARAMETER Experiment Name: At_Guard_Cells_P Parameter: Organism Value: A. thaliana
  misc_feature: MA Experiment 20000495 PARAMETER Experiment Name: At_Guard_Cells_P Parameter: Tissue Value: Guard Cells vs. Leaves
  misc_feature: MA Experiment ID: 20000527 Result: Down-regulated in Transcription
  misc_feature: MA Experiment 20000527 PARAMETER Experiment Name: At_10percent_PEG_P Parameter: Age (day) Value: 20
  misc_feature: MA Experiment 20000527 PARAMETER Experiment Name: At_10percent_PEG_P Parameter: Organism Value: A. thaliana
  misc_feature: MA Experiment 20000527 PARAMETER Experiment Name: At_10percent_PEG_P Parameter: Plant Line Value: WS
  misc_feature: MA Experiment 20000527 PARAMETER Experiment Name: At_10percent_PEG_P Parameter: Timepoint (day) Value: 20
  misc_feature: MA Experiment 20000527 PARAMETER Experiment Name: At_10percent_PEG_P Parameter: Tissue Value: Whole Plant
  misc_feature: MA Experiment 20000527 PARAMETER Experiment Name: At_10percent_PEG_P Parameter: Treatment Value: 10percent PEG vs. No Treatment
  misc_feature: MA Experiment ID: 20001556 Result: Down-regulated in Transcription
  misc_feature: MA Experiment 20001556 PARAMETER Experiment Name: At_Drought_Soil_Dry_P Parameter: Age (day) Value: 26
  misc_feature: MA Experiment 20001556 PARAMETER Experiment Name: At_Drought_Soil_Dry_P Parameter: Organism Value: A. thaliana
  misc_feature: MA Experiment 20001556 PARAMETER Experiment Name: At_Drought_Soil_Dry_P Parameter: Plant Line Value: WS
  misc_feature: MA Experiment 20001556 PARAMETER Experiment Name: At_Drought_Soil_Dry_P Parameter: Post Timepoint (hr) Value: None
  misc_feature: MA Experiment 20001556 PARAMETER Experiment Name: At_Drought_Soil_Dry_P Parameter: Post-Treatment Value: None
  misc_feature: MA Experiment 20001556 PARAMETER Experiment Name: At_Drought_Soil_Dry_P Parameter: Timepoint (day) Value: 12
  misc_feature: MA Experiment 20001556 PARAMETER Experiment Name: At_Drought_Soil_Dry_P Parameter: Treatment Value: Drought vs. No Drought
  misc_feature: MA Experiment ID: 20001906 Result: Down-regulated in Transcription
  misc_feature: MA Experiment 20001906 PARAMETER Experiment Name: At_Drought_Reproduction_P Parameter: Age (day) Value: 35
  misc_feature: MA Experiment 20001906 PARAMETER Experiment Name: At_Drought_Reproduction_P Parameter: Organism Value: A. thaliana
  misc_feature: MA Experiment 20001906 PARAMETER Experiment Name: At_Drought_Reproduction_P Parameter: Plant Line Value: WS
  misc_feature: MA Experiment 20001906 PARAMETER Experiment Name: At_Drought_Reproduction_P Parameter: Timepoint (day) Value: 5
  misc_feature: MA Experiment 20001906 PARAMETER Experiment Name: At_Drought_Reproduction_P Parameter: Tissue Value: Siliques
  misc_feature: MA Experiment 20001906 PARAMETER Experiment Name: At_Drought_Reproduction_P Parameter: Treatment Value: Drought vs. No Drought
  misc_feature: MA Experiment ID: 20001911 Result: Down-regulated in Transcription
  misc_feature: MA Experiment 20001911 PARAMETER Experiment Name: At_Drought_Reproduction_P Parameter: Age (day) Value: 40
  misc_feature: MA Experiment 20001911 PARAMETER Experiment Name: At_Drought_Reproduction_P Parameter: Organism Value: A. thaliana
  misc_feature: MA Experiment 20001911 PARAMETER Experiment Name: At_Drought_Reproduction_P Parameter: Plant Line Value: WS
  misc_feature: MA Experiment 20001911 PARAMETER Experiment Name: At_Drought_Reproduction_P Parameter: Timepoint (day) Value: 10
  misc_feature: MA Experiment 20001911 PARAMETER Experiment Name: At_Drought_Reproduction_P Parameter: Tissue Value: Flowers
  misc_feature: MA Experiment 20001911 PARAMETER Experiment Name: At_Drought_Reproduction_P Parameter: Treatment Value: Drought vs. No Drought
acaaattcaattccaattctcaaagtgctctctttttaaaccaatctgctctcttccacttactctctctatctctctcccatctcgtttcttttttggtcattaaaagagaaacctttgctctgaatcttgaaaatggattctttgatcaaactcttcttctgcctctttatcttcttatgtacttcgctcttatttggagaaatcaatggagtggagggttcaaatcaaaatcatcacttgtatccatttaggccaacgaagctctttgtgttcggagattcttatgccgataccggaaacattaaaaaggctttctctagctcttggaaattcccttacggtatcactttccccggaaaacccgctggccgtttctccgatggccgtgtggcaacagattttctagctaaatttgtggggataaaatcaccaatcccatacttttggaaagattacgcgggaaagaaacgattacagtacggaatgaattttgcgtacggaggaacaggagtgttcaacactcaaactccattgcctaacatgacaactcaaatcgacatcttccagaacattctcaccaccggcgacatctactatcctcccgagcttacttcatccgtggctctcgtcagtgtcgctggcaacgactactccaatttcatcgccctaaaccgccctgcctctgaattcccagcattcataaagcaagttgtggatcaaacagaggtgaatttgagacggatccacgctttgggagtgaaaaagattgcagtaccatccctgcaaccgcttggttgtctccctcccttcacattcgtaacctcgttccagcgttgcaacgagacacaaaacgctttagttaacctccacaacaacttattgcagcaagttgtggcaaagctcaataacgagactaaacagtcgactttcatcatccttgatctctacaatgctttcttgactgtgttcaagaacaaaggatctaatccagggagtacaaggtttgagagtccattaaagccgtgttgcgtaggtgtgagccgcgagtataactgtggaagtgtggatgagaagggagtgaagaagtatattgtatgtgataatcctaaaactgctttcttttgggatggacttcaccctacagaagaaggatggagatcggtttactctgttttacgcgaaagtcttaccgcgtctttgattaaagcgtgagaaacaaaagaaacacacattttgcttaggttttttcttatgaagctcaatgtttgagcgctctgttcctgttttcagtatctcttcattcatttgtgtttgtgtgtttaaagattgtgtgactaataaaatctcttaactggttc

SEQ ID NO: 105350 - protein, 359 aa, Arabidopsis thaliana; identical to SEQ ID NO: 29103
  peptide (1)..(359): Ceres Seq. ID no. 13617035
  misc_feature (44)..(348): Pfam Name: GDSL-like Lipase/Acylhydrolase Pfam Description: GDSL-like Lipase/Acylhydrolase
  misc_feature (1)..(359): Homolog of NCBI NO: 15242811 NR Description: GDSL-motif lipase/hydrolase protein [Arabidopsis
  misc_feature (4)..(354): Homolog of NCBI NO: 28393114 NR Description: putative lipase acylhydrolase [Arabidopsis
  misc_feature (4)..(354): Homolog of NCBI NO: 15232799 NR Description: GDSL-motif lipase/hydrolase protein [Arabidopsis >gi|6681326|gb|AAF23243.1|AC015985_1 putative
  misc_feature (92)..(354): Homolog of NCBI NO: 6143883 NR Description: unknown protein [Arabidopsis thaliana]
  misc_feature (29)..(358): Homolog of NCBI NO: 15242810 NR Description: GDSL-motif lipase/hydrolase protein [Arabidopsis
  misc_feature (7)..(348): Homolog of NCBI NO: 20260298 NR Description: unknown protein [Arabidopsis thaliana]
  misc_feature (68)..(220): Homolog of NCBI NO: 33285918 NR Description: putative lipase [Brassica rapa subsp. pekinensis]
  misc_feature (220)..(358): Homolog of NCBI NO: 15242809 NR Description: hypothetical protein [Arabidopsis thaliana]
  misc_feature (59)..(101): Homolog of NCBI NO: 15242809 NR Description: hypothetical protein [Arabidopsis thaliana]
  misc_feature (44)..(348): Homolog of NCBI NO: 10241432 NR Description: putative lipase/acylhydrolase [Oryza sativa

SEQ ID NO: 105351 - protein, 242 aa, Arabidopsis thaliana; identical to SEQ ID NO: 29104
  peptide (1)..(242): Ceres Seq. ID no. 13617036
  misc_feature (1)..(231): Pfam Name: GDSL-like Lipase/Acylhydrolase Pfam Description: GDSL-like Lipase/Acylhydrolase
  misc_feature (1)..(242): Homolog of NCBI NO: 15242811 NR Description: GDSL-motif lipase/hydrolase protein [Arabidopsis
  misc_feature (1)..(237): Homolog of NCBI NO: 28393114 NR Description: putative lipase acylhydrolase [Arabidopsis
  misc_feature (1)..(237): Homolog of NCBI NO: 15232799 NR Description: GDSL-motif lipase/hydrolase protein [Arabidopsis >gi|6681326|gb|AAF23243.1|AC015985_1 putative
  misc_feature (1)..(237): Homolog of NCBI NO: 6143883 NR Description: unknown protein [Arabidopsis thaliana]
  misc_feature (1)..(241): Homolog of NCBI NO: 15242810 NR Description: GDSL-motif lipase/hydrolase protein [Arabidopsis
  misc_feature (1)..(231): Homolog of NCBI NO: 20260298 NR Description: unknown protein [Arabidopsis thaliana]
  misc_feature (1)..(103): Homolog of NCBI NO: 33285918 NR Description: putative lipase [Brassica rapa subsp. pekinensis]
  misc_feature (103)..(241): Homolog of NCBI NO: 15242809 NR Description: hypothetical protein [Arabidopsis thaliana]
  misc_feature (1)..(231): Homolog of NCBI NO: 10241432 NR Description: putative lipase/acylhydrolase [Oryza sativa
  misc_feature (1)..(231): Homolog of NCBI NO: 32488918 NR Description: OSJNBb0059K02.9 [Oryza sativa (japonica

SEQ ID NO: 105352 - protein, 223 aa, Arabidopsis thaliana; identical to SEQ ID NO: 29105
  peptide (1)..(223): Ceres Seq. ID no. 13617037
  misc_feature (1)..(212): Pfam Name: GDSL-like Lipase/Acylhydrolase Pfam Description: GDSL-like Lipase/Acylhydrolase
  misc_feature (1)..(223): Homolog of NCBI NO: 15242811 NR Description: GDSL-motif lipase/hydrolase protein [Arabidopsis
  misc_feature (1)..(218): Homolog of NCBI NO: 28393114 NR Description: putative lipase acylhydrolase [Arabidopsis
  misc_feature (1)..(218): Homolog of NCBI NO: 15232799 NR Description: GDSL-motif lipase/hydrolase protein [Arabidopsis >gi|6681326|gb|AAF23243.1|AC015985_1 putative
  misc_feature (1)..(218): Homolog of NCBI NO: 6143883 NR Description: unknown protein [Arabidopsis thaliana]
  misc_feature (1)..(222): Homolog of NCBI NO: 15242810 NR Description: GDSL-motif lipase/hydrolase protein [Arabidopsis
  misc_feature (1)..(212): Homolog of NCBI NO: 20260298 NR Description: unknown protein [Arabidopsis thaliana]
  misc_feature (1)..(84): Homolog of NCBI NO: 33285918 NR Description: putative lipase [Brassica rapa subsp. pekinensis]
  misc_feature (84)..(222): Homolog of NCBI NO: 15242809 NR Description: hypothetical protein [Arabidopsis thaliana]
  misc_feature (1)..(212): Homolog of NCBI NO: 10241432 NR Description: putative lipase/acylhydrolase [Oryza sativa
  misc_feature (1)..(212): Homolog of NCBI NO: 32488918 NR Description: OSJNBb0059K02.9 [Oryza sativa (japonica

SEQ ID NO: 105353 - DNA, 1252 bp, Arabidopsis thaliana
  misc_feature (1)..(1252): Ceres Seq. ID no. 13617046
  misc_feature: MA Experiment ID: 108574 Result: Down-regulated in Transcription
  misc_feature: MA Experiment 108574 PARAMETER Experiment Name: At_Wounding__cDNA_P Parameter: Timepoint (hr) Value: 1
  misc_feature: MA Experiment 108574 PARAMETER Experiment Name: At_Wounding__cDNA_P Parameter: Tissue Value: Aerial
  misc_feature: MA Experiment 108574 PARAMETER Experiment Name: At_Wounding__cDNA_P Parameter: Treatment Value: Wounding vs. No Wounding
  misc_feature: MA Experiment ID: 108585 Result: Up-regulated in Transcription
  misc_feature: MA Experiment 108585 PARAMETER Experiment Name: At_5mM_NaNP_cDNA_P Parameter: Timepoint (hr) Value: 6
  misc_feature: MA Experiment 108585 PARAMETER Experiment Name: At_5mM_NaNP_cDNA_P Parameter: Tissue Value: Aerial
  misc_feature: MA Experiment 108585 PARAMETER Experiment Name: At_5mM_NaNP_cDNA_P Parameter: Treatment Value: null
  misc_feature: MA Experiment ID: 108594 Result: Down-regulated in Transcription
  misc_feature: MA Experiment 108594 PARAMETER Experiment Name: At_Ler-rhl_Root_cDNA_P Parameter: Plant Line Value: null
  misc_feature: MA Experiment ID: 108595 Result: Up-regulated in Transcription
  misc_feature: MA Experiment 108595 PARAMETER Experiment Name: At_Ler-pi_Ovule_cDNA_P Parameter: Plant Line Value: null
  misc_feature: MA Experiment ID: 108668 Result: Up-regulated in Transcription
  misc_feature: MA Experiment 108668 PARAMETER Experiment Name: At_2mM_SA_cDNA_P Parameter: Plant Line Value: WS
  misc_feature: MA Experiment 108668 PARAMETER Experiment Name: At_2mM_SA_cDNA_P Parameter: Timepoint (hr) Value: 6
  misc_feature: MA Experiment 108668 PARAMETER Experiment Name: At_2mM_SA_cDNA_P Parameter: Treatment Value: 2mM SA vs. No Treatment
  misc_feature: MA Experiment ID: 20000173 Result: Down-regulated in Transcription
  misc_feature: MA Experiment 20000173 PARAMETER Experiment Name: At_42deg_Heat_P Parameter: Age (day) Value: 14
  misc_feature: MA Experiment 20000173 PARAMETER Experiment Name: At_42deg_Heat_P Parameter: Organism Value: A. thaliana
  misc_feature: MA Experiment 20000173 PARAMETER Experiment Name: At_42deg_Heat_P Parameter: Plant Line Value: WS
  misc_feature: MA Experiment 20000173 PARAMETER Experiment Name: At_42deg_Heat_P Parameter: Temperature (deg C) Value: 42 vs. 22
  misc_feature: MA Experiment 20000173 PARAMETER Experiment Name: At_42deg_Heat_P Parameter: Timepoint (hr) Value: 6
  misc_feature: MA Experiment 20000173 PARAMETER Experiment Name: At_42deg_Heat_P Parameter: Tissue Value: Aerial
  misc_feature: MA Experiment ID: 20000182 Result: Up-regulated in Transcription
  misc_feature: MA Experiment 20000182 PARAMETER Experiment Name: At_2mM_SA_P Parameter: Age (day) Value: 14
  misc_feature: MA Experiment 20000182 PARAMETER Experiment Name: At_2mM_SA_P Parameter: Organism Value: A. thaliana
  misc_feature: MA Experiment 20000182 PARAMETER Experiment Name: At_2mM_SA_P Parameter: Plant Line Value: WS
  misc_feature: MA Experiment 20000182 PARAMETER Experiment Name: At_2mM_SA_P Parameter: Timepoint (hr) Value: 6
  misc_feature: MA Experiment 20000182 PARAMETER Experiment Name: At_2mM_SA_P Parameter: Tissue Value: Aerial
  misc_feature: MA Experiment 20000182 PARAMETER Experiment Name: At_2mM_SA_P Parameter: Treatment Value: 2mM SA vs. No Treatment
  misc_feature: MA Experiment ID: 20000184 Result: Down-regulated in Transcription
  misc_feature: MA Experiment 20000184 PARAMETER Experiment Name: At_Shoots__P Parameter: Age (day) Value: 7
  misc_feature: MA Experiment 20000184 PARAMETER Experiment Name: At_Shoots__P Parameter: Tissue Value: Shoots vs. Whole Plant
  misc_feature: MA Experiment ID: 20000185 Result: Up-regulated in Transcription
  misc_feature: MA Experiment 20000185 PARAMETER Experiment Name: At_Roots__P Parameter: Age (day) Value: 7 vs. 21
  misc_feature: MA Experiment 20000185 PARAMETER Experiment Name: At_Roots__P Parameter: Organism Value: A. thaliana
  misc_feature: MA Experiment 20000185 PARAMETER Experiment Name: At_Roots__P Parameter: Tissue Value: Roots vs. Whole Plant
  misc_feature: MA Experiment ID: 20000227 Result: Down-regulated in Transcription
  misc_feature: MA Experiment 20000227 PARAMETER Experiment Name: At_Root-Tips-vs-Tops_P Parameter: Tissue Value: Root Tips vs. Root Tops
  misc_feature: MA Experiment ID: 20000234 Result: Down-regulated in Transcription
  misc_feature: MA Experiment 20000234 PARAMETER Experiment Name: At_Siliques_P Parameter: Age (day) Value: 21
  misc_feature: MA Experiment 20000234 PARAMETER Experiment Name: At_Siliques_P Parameter: Organism Value: A. thaliana
  misc_feature: MA Experiment 20000234 PARAMETER Experiment Name: At_Siliques_P Parameter: Plant Line Value: WS
  misc_feature: MA Experiment 20000234 PARAMETER Experiment Name: At_Siliques_P Parameter: Tissue Value: Less Than 5mm Siliques vs. Whole Plant
  misc_feature: MA Experiment ID: 20000235 Result: Down-regulated in Transcription
  misc_feature: MA Experiment 20000235 PARAMETER Experiment Name: At_Siliques_P Parameter: Age (day) Value: 21
  misc_feature: MA Experiment 20000235 PARAMETER Experiment Name: At_Siliques_P Parameter: Organism Value: A. thaliana
  misc_feature: MA Experiment 20000235 PARAMETER Experiment Name: At_Siliques_P Parameter: Plant Line Value: WS
  misc_feature: MA Experiment 20000235 PARAMETER Experiment Name: At_Siliques_P Parameter: Tissue Value: 5-10mm Siliques vs. Whole Plant
  misc_feature: MA Experiment ID: 20000264 Result: Down-regulated in Transcription
  misc_feature: MA Experiment 20000264 PARAMETER Experiment Name: At_Open_Flower_P Parameter: Age (day) Value: 21
  misc_feature: MA Experiment 20000264 PARAMETER Experiment Name: At_Open_Flower_P Parameter: Plant Line Value: WS
  misc_feature: MA Experiment 20000264 PARAMETER Experiment Name: At_Open_Flower_P Parameter: Tissue Value: Open Flower vs. Whole Plant
  misc_feature: MA Experiment ID: 20000269 Result: Down-regulated in Transcription
  misc_feature: MA Experiment 20000269 PARAMETER Experiment Name: At_1mM_KNO3_L-vs-H_Roots_P Parameter: Age (day) Value: 7,10,12
  misc_feature: MA Experiment 20000269 PARAMETER Experiment Name: At_1mM_KNO3_L-vs-H_Roots_P Parameter: Organism Value: A. thaliana
  misc_feature: MA Experiment 20000269 PARAMETER Experiment Name: At_1mM_KNO3_L-vs-H_Roots_P Parameter: Plant Line Value: WS
  misc_feature: MA Experiment 20000269 PARAMETER Experiment Name: At_1mM_KNO3_L-vs-H_Roots_P Parameter: Timepoint (day) Value: 7,10,12
  misc_feature: MA Experiment 20000269 PARAMETER Experiment Name: At_1mM_KNO3_L-vs-H_Roots_P Parameter: Tissue Value: Roots
  misc_feature: MA Experiment 20000269 PARAMETER Experiment Name: At_1mM_KNO3_L-vs-H_Roots_P Parameter: Treatment Value: 1mM KNO3 vs. 50mM KNO3
  misc_feature: MA Experiment ID: 20000286 Result: Down-regulated in Transcription
  misc_feature: MA Experiment 20000286 PARAMETER Experiment Name: At_Open_Flower_P Parameter: Age (day) Value: 21
  misc_feature: MA Experiment 20000286 PARAMETER Experiment Name: At_Open_Flower_P Parameter: Plant Line Value: WS
  misc_feature: MA Experiment 20000286 PARAMETER Experiment Name: At_Open_Flower_P Parameter: Tissue Value: Half Open vs. Whole Plant
  misc_feature: MA Experiment ID: 20000308 Result: Up-regulated in Transcription
  misc_feature: MA Experiment 20000308 PARAMETER Experiment Name: At_100mM_NaCl__P Parameter: Age (day) Value: 17
  misc_feature: MA Experiment 20000308 PARAMETER Experiment Name: At_100mM_NaCl__P Parameter: Organism Value: A. thaliana
  misc_feature: MA Experiment 20000308 PARAMETER Experiment Name: At_100mM_NaCl__P Parameter: Plant Line Value: WS
  misc_feature: MA Experiment 20000308 PARAMETER Experiment Name: At_100mM_NaCl__P Parameter: Timepoint (hr) Value: 72
  misc_feature: MA Experiment 20000308 PARAMETER Experiment Name: At_100mM_NaCl__P Parameter: Tissue Value: Whole Plant
  misc_feature: MA Experiment 20000308 PARAMETER Experiment Name: At_100mM_NaCl__P Parameter: Treatment Value: 100mM NaCl vs. No Treatment
  misc_feature: MA Experiment ID: 20000438 Result: Down-regulated in Transcription
  misc_feature: MA Experiment 20000438 PARAMETER Experiment Name: At_Shoots__P Parameter: Age (day) Value: 14
  misc_feature: MA Experiment 20000438 PARAMETER Experiment Name: At_Shoots__P Parameter: Tissue Value: Shoots vs. Whole Plant
  misc_feature: MA Experiment ID: 20000439 Result: Up-regulated in Transcription
  misc_feature: MA Experiment 20000439 PARAMETER Experiment Name: At_Roots__P Parameter: Age (day) Value: 14 vs. 21
  misc_feature: MA Experiment 20000439 PARAMETER Experiment Name: At_Roots__P Parameter: Organism Value: A. thaliana
  misc_feature: MA Experiment 20000439 PARAMETER Experiment Name: At_Roots__P Parameter: Tissue Value: Roots vs. Whole Plant
  misc_feature: MA Experiment ID: 20000453 Result: Up-regulated in Transcription
  misc_feature: MA Experiment 20000453 PARAMETER Experiment Name: At_100uM_ABA_P Parameter: Age (day) Value: 15
  misc_feature: MA Experiment 20000453 PARAMETER Experiment Name: At_100uM_ABA_P Parameter: Organism Value: A. thaliana
  misc_feature: MA Experiment 20000453 PARAMETER Experiment Name: At_100uM_ABA_P Parameter: Plant Line Value: WS
  misc_feature: MA Experiment 20000453 PARAMETER Experiment Name: At_100uM_ABA_P Parameter: Timepoint (hr) Value: 24
  misc_feature: MA Experiment 20000453 PARAMETER Experiment Name: At_100uM_ABA_P Parameter: Tissue Value: Aerial
  misc_feature: MA Experiment 20000453 PARAMETER Experiment Name: At_100uM_ABA_P Parameter: Treatment Value: 100uM ABA vs. No Treatment
  misc_feature: MA Experiment ID: 20000456 Result: Down-regulated in Transcription
  misc_feature: MA Experiment 20000456 PARAMETER Experiment Name: At_100uM_BA_P Parameter: Age (day) Value: 14
  misc_feature: MA Experiment 20000456 PARAMETER Experiment Name: At_100uM_BA_P Parameter: Organism Value: A. thaliana
  misc_feature: MA Experiment 20000456 PARAMETER Experiment Name: At_100uM_BA_P Parameter: Plant Line Value: WS
  misc_feature: MA Experiment 20000456 PARAMETER Experiment Name: At_100uM_BA_P Parameter: Timepoint (hr) Value: 6
  misc_feature: MA Experiment 20000456 PARAMETER Experiment Name: At_100uM_BA_P Parameter: Tissue Value: Aerial
  misc_feature: MA Experiment 20000456 PARAMETER Experiment Name: At_100uM_BA_P Parameter: Treatment Value: 100uM BA vs. No Treatment
  misc_feature: MA Experiment ID: 20000527 Result: Down-regulated in Transcription
  misc_feature: MA Experiment 20000527 PARAMETER Experiment Name: At_10percent_PEG_P Parameter: Age (day) Value: 20
  misc_feature: MA Experiment 20000527 PARAMETER Experiment Name: At_10percent_PEG_P Parameter: Organism Value: A. thaliana
  misc_feature: MA Experiment 20000527 PARAMETER Experiment Name: At_10percent_PEG_P Parameter: Plant Line Value: WS
  misc_feature: MA Experiment 20000527 PARAMETER Experiment Name: At_10percent_PEG_P Parameter: Timepoint (day) Value: 20
  misc_feature: MA Experiment 20000527 PARAMETER Experiment Name: At_10percent_PEG_P Parameter: Tissue Value: Whole Plant
  misc_feature: MA Experiment 20000527 PARAMETER Experiment Name: At_10percent_PEG_P Parameter: Treatment Value: 10percent PEG vs. No Treatment
  misc_feature: MA Experiment ID: 20000794 Result: Down-regulated in Transcription
  misc_feature: MA Experiment 20000794 PARAMETER Experiment Name: At_Petals_P Parameter: Age (day) Value: 23-25 days
  misc_feature: MA Experiment 20000794 PARAMETER Experiment Name: At_Petals_P Parameter: Plant Line Value: WS
  misc_feature: MA Experiment 20000794 PARAMETER Experiment Name: At_Petals_P Parameter: Tissue Value: Petals vs. Whole plant
  misc_feature: MA Experiment ID: 20001450 Result: Down-regulated in Transcription
  misc_feature: MA Experiment 20001450 PARAMETER Experiment Name: At_Far-red-induction_P Parameter: Age (day) Value: 7
  misc_feature: MA Experiment 20001450 PARAMETER Experiment Name: At_Far-red-induction_P Parameter: Light Value: Far-red vs. White
  misc_feature: MA Experiment 20001450 PARAMETER Experiment Name: At_Far-red-induction_P Parameter: Organism Value: A. thaliana
  misc_feature: MA Experiment 20001450 PARAMETER Experiment Name: At_Far-red-induction_P Parameter: Plant Line Value: Columbia
  misc_feature: MA Experiment 20001450 PARAMETER Experiment Name: At_Far-red-induction_P Parameter: Timepoint (hr) Value: 8
  misc_feature: MA Experiment 20001450 PARAMETER Experiment Name: At_Far-red-induction_P Parameter: Tissue Value: Whole Plant
  misc_feature: MA Experiment ID: 20001451 Result: Up-regulated in Transcription
  misc_feature: MA Experiment 20001451 PARAMETER Experiment Name: At_Far-red-induction_P Parameter: Age (day) Value: 7
  misc_feature: MA Experiment 20001451 PARAMETER Experiment Name: At_Far-red-induction_P Parameter: Light Value: Far-red vs. White
  misc_feature: MA Experiment 20001451 PARAMETER Experiment Name: At_Far-red-induction_P Parameter: Organism Value: A. thaliana
  misc_feature: MA Experiment 20001451 PARAMETER Experiment Name: At_Far-red-induction_P Parameter: Plant Line Value: Columbia
  misc_feature: MA Experiment 20001451 PARAMETER Experiment Name: At_Far-red-induction_P Parameter: Timepoint (hr) Value: 24
  misc_feature: MA Experiment 20001451 PARAMETER Experiment Name: At_Far-red-induction_P Parameter: Tissue Value: Whole Plant
  misc_feature: MA Experiment ID: 20001554 Result: Down-regulated in Transcription
  misc_feature: MA Experiment 20001554 PARAMETER Experiment Name: At_Drought_Soil_Dry_P Parameter: Age (day) Value: 21
  misc_feature: MA Experiment 20001554 PARAMETER Experiment Name: At_Drought_Soil_Dry_P Parameter: Organism Value: A. thaliana
  misc_feature: MA Experiment 20001554 PARAMETER Experiment Name: At_Drought_Soil_Dry_P Parameter: Plant Line Value: WS
  misc_feature: MA Experiment 20001554 PARAMETER Experiment Name: At_Drought_Soil_Dry_P Parameter: Post Timepoint (hr) Value: None
  misc_feature: MA Experiment 20001554 PARAMETER Experiment Name: At_Drought_Soil_Dry_P Parameter: Post-Treatment Value: None
  misc_feature: MA Experiment 20001554 PARAMETER Experiment Name: At_Drought_Soil_Dry_P Parameter: Timepoint (day) Value: 7
  misc_feature: MA Experiment 20001554 PARAMETER Experiment Name: At_Drought_Soil_Dry_P Parameter: Treatment Value: Drought vs. No Drought
  misc_feature: MA Experiment ID: 20001555 Result: Down-regulated in Transcription
  misc_feature: MA Experiment 20001555 PARAMETER Experiment Name: At_Drought_Soil_Dry_P Parameter: Age (day) Value: 24
  misc_feature: MA Experiment 20001555 PARAMETER Experiment Name: At_Drought_Soil_Dry_P Parameter: Organism Value: A. thaliana
  misc_feature: MA Experiment 20001555 PARAMETER Experiment Name: At_Drought_Soil_Dry_P Parameter: Plant Line Value: WS
  misc_feature: MA Experiment 20001555 PARAMETER Experiment Name: At_Drought_Soil_Dry_P Parameter: Post Timepoint (hr) Value: None
  misc_feature: MA Experiment 20001555 PARAMETER Experiment Name: At_Drought_Soil_Dry_P Parameter: Post-Treatment Value: None
  misc_feature: MA Experiment 20001555 PARAMETER Experiment Name: At_Drought_Soil_Dry_P Parameter: Timepoint (day) Value: 10
  misc_feature: MA Experiment 20001555 PARAMETER Experiment Name: At_Drought_Soil_Dry_P Parameter: Treatment Value: Drought vs. No Drought
  misc_feature: MA Experiment ID: 20001556 Result: Down-regulated in Transcription
  misc_feature: MA Experiment 20001556 PARAMETER Experiment Name: At_Drought_Soil_Dry_P Parameter: Age (day) Value: 26
  misc_feature: MA Experiment 20001556 PARAMETER Experiment Name: At_Drought_Soil_Dry_P Parameter: Organism Value: A. thaliana
  misc_feature: MA Experiment 20001556 PARAMETER Experiment Name: At_Drought_Soil_Dry_P Parameter: Plant Line Value: WS
  misc_feature: MA Experiment 20001556 PARAMETER Experiment Name: At_Drought_Soil_Dry_P Parameter: Post Timepoint (hr) Value: None
  misc_feature: MA Experiment 20001556 PARAMETER Experiment Name: At_Drought_Soil_Dry_P Parameter: Post-Treatment Value: None
  misc_feature: MA Experiment 20001556 PARAMETER Experiment Name: At_Drought_Soil_Dry_P Parameter: Timepoint (day) Value: 12
  misc_feature: MA Experiment 20001556 PARAMETER Experiment Name: At_Drought_Soil_Dry_P Parameter: Treatment Value: Drought vs. No Drought
  misc_feature: MA Experiment ID: 20001557 Result: Down-regulated in Transcription
  misc_feature: MA Experiment 20001557 PARAMETER Experiment Name: At_Drought_Soil_Dry_P Parameter: Age (day) Value: 27
  misc_feature: MA Experiment 20001557 PARAMETER Experiment Name: At_Drought_Soil_Dry_P Parameter: Organism Value: A. thaliana
  misc_feature: MA Experiment 20001557 PARAMETER Experiment Name: At_Drought_Soil_Dry_P Parameter: Plant Line Value: WS
  misc_feature: MA Experiment 20001557 PARAMETER Experiment Name: At_Drought_Soil_Dry_P Parameter: Post Timepoint (hr) Value: 3
  misc_feature: MA Experiment 20001557 PARAMETER Experiment Name: At_Drought_Soil_Dry_P Parameter: Post-Treatment Value: Re-Water vs. No Drought
  misc_feature: MA Experiment 20001557 PARAMETER Experiment Name: At_Drought_Soil_Dry_P Parameter: Timepoint (day) Value: 13
  misc_feature: MA Experiment 20001557 PARAMETER Experiment Name: At_Drought_Soil_Dry_P Parameter: Treatment Value: Drought vs. No Drought
  misc_feature: MA Experiment ID: 20001558 Result: Down-regulated in Transcription
  misc_feature: MA Experiment 20001558 PARAMETER Experiment Name: At_Drought_Soil_Dry_P Parameter: Age (day) Value: 27
  misc_feature: MA Experiment 20001558 PARAMETER Experiment Name: At_Drought_Soil_Dry_P Parameter: Organism Value: A. thaliana
  misc_feature: MA Experiment 20001558 PARAMETER Experiment Name: At_Drought_Soil_Dry_P Parameter: Plant Line Value: WS
  misc_feature: MA Experiment 20001558 PARAMETER Experiment Name: At_Drought_Soil_Dry_P Parameter: Post Timepoint (hr) Value: 6
  misc_feature: MA Experiment 20001558 PARAMETER Experiment Name: At_Drought_Soil_Dry_P Parameter: Post-Treatment Value: Re-Water vs. No Drought
  misc_feature: MA Experiment 20001558 PARAMETER Experiment Name: At_Drought_Soil_Dry_P Parameter: Timepoint (day) Value: 13
  misc_feature: MA Experiment 20001558 PARAMETER Experiment Name: At_Drought_Soil_Dry_P Parameter: Treatment Value: Drought vs. No Drought
  misc_feature: MA Experiment ID: 20001559 Result: Down-regulated in Transcription
  misc_feature: MA Experiment 20001559 PARAMETER Experiment Name: At_Drought_Soil_Dry_P Parameter: Age (day) Value: 28
  misc_feature: MA Experiment 20001559 PARAMETER Experiment Name: At_Drought_Soil_Dry_P Parameter: Organism Value: A. thaliana
  misc_feature: MA Experiment 20001559 PARAMETER Experiment Name: At_Drought_Soil_Dry_P Parameter: Plant Line Value: WS
  misc_feature: MA Experiment 20001559 PARAMETER Experiment Name: At_Drought_Soil_Dry_P Parameter: Post Timepoint (hr) Value: 29
  misc_feature: MA Experiment 20001559 PARAMETER Experiment Name: At_Drought_Soil_Dry_P Parameter: Post-Treatment Value: Re-Water vs. No Drought
  misc_feature: MA Experiment 20001559 PARAMETER Experiment Name: At_Drought_Soil_Dry_P Parameter: Timepoint (day) Value: 14
  misc_feature: MA Experiment 20001559 PARAMETER Experiment Name: At_Drought_Soil_Dry_P Parameter: Treatment Value: Drought vs. No Drought
  misc_feature: MA Experiment ID: 20001560 Result: Down-regulated in Transcription
  misc_feature: MA Experiment 20001560 PARAMETER Experiment Name: At_Drought_Soil_Dry_P Parameter: Age (day) Value: 28
  misc_feature: MA Experiment 20001560 PARAMETER Experiment Name: At_Drought_Soil_Dry_P Parameter: Organism Value: A. thaliana
  misc_feature: MA Experiment 20001560 PARAMETER Experiment Name: At_Drought_Soil_Dry_P Parameter: Plant Line Value: WS
  misc_feature: MA Experiment 20001560 PARAMETER Experiment Name: At_Drought_Soil_Dry_P Parameter: Post Timepoint (hr) Value: None
  misc_feature: MA Experiment 20001560 PARAMETER Experiment Name: At_Drought_Soil_Dry_P Parameter: Post-Treatment Value: None
  misc_feature: MA Experiment 20001560 PARAMETER Experiment Name: At_Drought_Soil_Dry_P Parameter: Timepoint (day) Value: 14
  misc_feature: MA Experiment 20001560 PARAMETER Experiment Name: At_Drought_Soil_Dry_P Parameter: Treatment Value: Drought vs. No Drought
atacatatcaatgttaatttgtatataaggagctaagaacaaacccaattaggcaactagcaattgctaaaacacgtaagatctcaaatatgaccacgttattcctccttattgctctattcatcacaaccatcctcaacccaacaagtggagaatcagtaggtgtatgctatggaatgatggggaacaaccttccttctcaatcagacacaatcgctctctttagacaaaacaacatccgacgtgttagactctacgatccaaaccaagccgctttaaacgctcttagaaacacgggtatcgaagtcatcatcggcgttccaaacaccgatcttcgttcactcactaacccttcttccgctagatcatggctccaaaacaacgtcctcaactattaccccgccgttagcttcaagtacatcgccgtaggtaacgaagtatctccgtcgaacggcggtgatgttgtgctccctgccatgcgtaacgtttacgatgctctaagaggtgcaaatcttcaagatcgtattaaagtttctaccgccattgatatgactttgattggaaactctttccctccttcctccggagagtttcgtggtgacgttagatggtatatcgatcccgtcatcgggtttcttacgagtacgaactcagcgttactagccaacatctatccttacttcagctacgttgacaatccacgtgacatatctctctcttacgctctcttcacttctccttccgtcgtcgtatgggacggctctcgtggctaccaaaacctctttgacgctttacttgacgttgtttactctgccgttgaacgctcaggcggtggatctctcccagtggttgtttccgagagcggatggccttctaacggtggaaacgccgcgagtttcgataacgcgcgaagctttttacacgaatcttgcgtcgcgtgtgagagagaacagaggaacaccgaagagacctggaagaggagtggaaacgtatttgttcgctatgtttgatgagaatcaaaagagtcctgagatcgagaagaattttggtttgttttttcctaataaacaaccaaaatttccgatcacattctctgccgcgagagacggtacggcggttgagtgatgattttatatgctgagatttatgtgaataattgggagattatcccataaaaggttccaaataaagacaaatttcaaataaaacctgttagtccaagttaaattaaatactcggctttgttttggtc

SEQ ID NO: 105354 - protein, 306 aa, Arabidopsis thaliana
  peptide (1)..(306): Ceres Seq. ID no. 13617047
  misc_feature (24)..(305): Pfam Name: Glycosyl hydrolases family 17 Pfam Description: Glycosyl hydrolases family 17
  misc_feature (1)..(306): Homolog of NCBI NO: 17381238 NR Description: AT4g16260/dl4170c [Arabidopsis thaliana]
  misc_feature (1)..(306): Homolog of NCBI NO: 15234880 NR Description: glycosyl hydrolase family 17 [Arabidopsis
  misc_feature (1)..(277): Homolog of NCBI NO: 32765543 NR Description: beta-1,3-glucanase [Hevea brasiliensis]
  misc_feature (1)..(276): Homolog of NCBI NO: 22550395 NR Description: beta-1,3-glucanase [Vitis vinifera]
  misc_feature (2)..(277): Homolog of NCBI NO: 1706547 NR Description: Glucan endo-1,3-beta-glucosidase, basic vacuolar
  misc_feature (1)..(277): Homolog of NCBI NO: 4469175 NR Description: beta-1,3-glucanase [Hevea brasiliensis]
  misc_feature (24)..(277): Homolog of NCBI NO: 10946499 NR Description: beta-1,3-glucanase [Hevea brasiliensis]
  misc_feature (1)..(306): Homolog of NCBI NO: 7447979 NR Description: 1,3-beta-glucanase (EC 3.2.1.-), acidic - alfalfa
  misc_feature (1)..(276): Homolog of NCBI NO: 82130 NR Description: beta-1,3-glucanase (EC 3.2.1.-) precursor -
  misc_feature (1)..(276): Homolog of NCBI NO: 82131 NR Description: beta-glucanase (EC 3.2.1.-) precursor -
MTTLFLLIALFITTILNPTSGESVGVCYGMMGNNLPSQSDTIALFRQNNIRRVRLYDPNQAALNALRNTGIEVIIGVPNTDLRSLTNPSSARSWLQNNVLNYYPAVSFKYIAVGNEVSPSNGGDVVLPAMRNVYDALRGANLQDRIKVSTAIDMTLIGNSFPPSSGEFRGDVRWYIDPVIGFLTSTNSALLANIYPYFSYVDNPRDISLSYALFTSPSVVVWDGSRGYQNLFDALLDVVYSAVERSGGGSLPVVVSESGWPSNGGNAASFDNARSFLHESCVACEREQRNTEETWKRSGNVFVRYV

SEQ ID NO: 105355 - protein, 277 aa, Arabidopsis thaliana
  peptide (1)..(277): Ceres Seq. ID no. 13617048
  misc_feature (1)..(276): Pfam Name: Glycosyl hydrolases family 17 Pfam Description: Glycosyl hydrolases family 17
  misc_feature (1)..(277): Homolog of NCBI NO: 17381238 NR Description: AT4g16260/dl4170c [Arabidopsis thaliana]
  misc_feature (1)..(277): Homolog of NCBI NO: 15234880 NR Description: glycosyl hydrolase family 17 [Arabidopsis
  misc_feature (1)..(248): Homolog of NCBI NO: 32765543 NR Description: beta-1,3-glucanase [Hevea brasiliensis]
  misc_feature (1)..(247): Homolog of NCBI NO: 22550395 NR Description: beta-1,3-glucanase [Vitis vinifera]
  misc_feature (1)..(248): Homolog of NCBI NO: 1706547 NR Description: Glucan endo-1,3-beta-glucosidase, basic vacuolar
  misc_feature (1)..(248): Homolog of NCBI NO: 4469175 NR Description: beta-1,3-glucanase [Hevea brasiliensis]
  misc_feature (1)..(248): Homolog of NCBI NO: 10946499 NR Description: beta-1,3-glucanase [Hevea brasiliensis]
  misc_feature (1)..(277): Homolog of NCBI NO: 7447979 NR Description: 1,3-beta-glucanase (EC 3.2.1.-), acidic - alfalfa
  misc_feature (1)..(247): Homolog of NCBI NO: 82130 NR Description: beta-1,3-glucanase (EC 3.2.1.-) precursor -
  misc_feature (1)..(247): Homolog of NCBI NO: 82131 NR Description: beta-glucanase (EC 3.2.1.-) precursor -
MMGNNLPSQSDTIALFRQNNIRRVRLYDPNQAALNALRNTGIEVIIGVPNTDLRSLTNPSSARSWLQNNVLNYYPAVSFKYIAVGNEVSPSNGGDVVLPAMRNVYDALRGANLQDRIKVSTAIDMTLIGNSFPPSSGEFRGDVRWYIDPVIGFLTSTNSALLANIYPYFSYVDNPRDISLSYALFTSPSVVVWDGSRGYQNLFDALLDVVYSAVERSGGGSLPVVVSESGWPSNGGNAASFDNARSFLHESCVACEREQRNTEETWKRSGNVFVRYV

SEQ ID NO: 105356 - protein, 276 aa, Arabidopsis thaliana
  peptide (1)..(276): Ceres Seq. ID no. 13617049
  misc_feature (1)..(275): Pfam Name: Glycosyl hydrolases family 17 Pfam Description: Glycosyl hydrolases family 17
  misc_feature (1)..(276): Homolog of NCBI NO: 17381238 NR Description: AT4g16260/dl4170c [Arabidopsis thaliana]
  misc_feature (1)..(276): Homolog of NCBI NO: 15234880 NR Description: glycosyl hydrolase family 17 [Arabidopsis
  misc_feature (1)..(247): Homolog of NCBI NO: 32765543 NR Description: beta-1,3-glucanase [Hevea brasiliensis]
  misc_feature (1)..(246): Homolog of NCBI NO: 22550395 NR Description: beta-1,3-glucanase [Vitis vinifera]
  misc_feature (1)..(247): Homolog of NCBI NO: 1706547 NR Description: Glucan endo-1,3-beta-glucosidase, basic vacuolar
  misc_feature (1)..(247): Homolog of NCBI NO: 4469175 NR Description: beta-1,3-glucanase [Hevea brasiliensis]
  misc_feature (1)..(247): Homolog of NCBI NO: 10946499 NR Description: beta-1,3-glucanase [Hevea brasiliensis]
  misc_feature (1)..(276): Homolog of NCBI NO: 7447979 NR Description: 1,3-beta-glucanase (EC 3.2.1.-), acidic - alfalfa
  misc_feature (1)..(246): Homolog of NCBI NO: 82130 NR Description: beta-1,3-glucanase (EC 3.2.1.-) precursor -
  misc_feature (1)..(246): Homolog of NCBI NO: 82131 NR Description: beta-glucanase (EC 3.2.1.-) precursor -
MGNNLPSQSDTIALFRQNNIRRVRLYDPNQAALNALRNTGIEVIIGVPNTDLRSLTNPSSARSWLQNNVLNYYPAVSFKYIAVGNEVSPSNGGDVVLPAMRNVYDALRGANLQDRIKVSTAIDMTLIGNSFPPSSGEFRGDVRWYIDPVIGFLTSTNSALLANIYPYFSYVDNPRDISLSYALFTSPSVVVWDGSRGYQNLFDALLDVVYSAVERSGGGSLPVVVSESGWPSNGGNAASFDNARSFLHESCVACEREQRNTEETWKRSGNVFVRYV

SEQ ID NO: 105357 - DNA, 1837 bp, Arabidopsis thaliana
  misc_feature (1)..(1837): Ceres Seq. ID no. 13617057
  misc_feature: MA Experiment ID: 108433 Result: Up-regulated in Transcription
  misc_feature: MA Experiment 108433 PARAMETER Experiment Name: At_rhl_Mutant2_cDNA_P Parameter: Age (day) Value: 7
  misc_feature: MA Experiment 108433 PARAMETER Experiment Name: At_rhl_Mutant2_cDNA_P Parameter: Organism Value: A. thaliana
  misc_feature: MA Experiment 108433 PARAMETER Experiment Name: At_rhl_Mutant2_cDNA_P Parameter: Plant Line Value: rhl Mutant vs. wt landsburg
  misc_feature: MA Experiment 108433 PARAMETER Experiment Name: At_rhl_Mutant2_cDNA_P Parameter: Tissue Value: Roots
  misc_feature: MA Experiment ID: 108434 Result: Down-regulated in Transcription
  misc_feature: MA Experiment 108434 PARAMETER Experiment Name: At_Root_Tips_cDNA_P Parameter: Tissue Value: Root Tips
  misc_feature: MA Experiment ID: 108461 Result: Down-regulated in Transcription
  misc_feature: MA Experiment 108461 PARAMETER Experiment Name: At_Germinating_Seeds_cDNA_P Parameter: Age (day) Value: 1 vs. 0
  misc_feature: MA Experiment 108461 PARAMETER Experiment Name: At_Germinating_Seeds_cDNA_P Parameter: Tissue Value: Germinating Seeds
  misc_feature: MA Experiment ID: 108462 Result: Down-regulated in Transcription
  misc_feature: MA Experiment 108462 PARAMETER Experiment Name: At_Germinating_Seeds_cDNA_P Parameter: Age (day) Value: 2 vs. 0
  misc_feature: MA Experiment 108462 PARAMETER Experiment Name: At_Germinating_Seeds_cDNA_P Parameter: Tissue Value: Germinating Seeds
  misc_feature: MA Experiment ID: 108463 Result: Down-regulated in Transcription
  misc_feature: MA Experiment 108463 PARAMETER Experiment Name: At_Germinating_Seeds_cDNA_P Parameter: Age (day) Value: 3 vs. 0
  misc_feature: MA Experiment 108463 PARAMETER Experiment Name: At_Germinating_Seeds_cDNA_P Parameter: Tissue Value: Germinating Seeds
  misc_feature: MA Experiment ID: 108464 Result: Down-regulated in Transcription
  misc_feature: MA Experiment 108464 PARAMETER Experiment Name: At_Germinating_Seeds_cDNA_P Parameter: Age (day) Value: 4 vs. 0
  misc_feature: MA Experiment 108464 PARAMETER Experiment Name: At_Germinating_Seeds_cDNA_P Parameter: Tissue Value: Germinating Seeds
  misc_feature: MA Experiment ID: 108595 Result: Up-regulated in Transcription
  misc_feature: MA Experiment 108595 PARAMETER Experiment Name: At_Ler-pi_Ovule_cDNA_P Parameter: Plant Line Value: null
  misc_feature: MA Experiment ID: 20000070 Result: Up-regulated in Transcription
  misc_feature: MA Experiment 20000070 PARAMETER Experiment Name: At_100uM_ABA_Mutants_cDNA_P Parameter: Plant Line Value: CS24
  misc_feature: MA Experiment 20000070 PARAMETER Experiment Name: At_100uM_ABA_Mutants_cDNA_P Parameter: Timepoint (hr) Value: 6
  misc_feature: MA Experiment 20000070 PARAMETER Experiment Name: At_100uM_ABA_Mutants_cDNA_P Parameter: Tissue Value: Aerial
  misc_feature: MA Experiment 20000070 PARAMETER Experiment Name: At_100uM_ABA_Mutants_cDNA_P Parameter: Treatment Value: 100uM ABA vs. No Treatment
  misc_feature: MA Experiment ID: 20000071 Result: Up-regulated in Transcription
  misc_feature: MA Experiment 20000071 PARAMETER Experiment Name: At_100uM_ABA_Mutants_cDNA_P Parameter: Plant Line Value: CS8104
  misc_feature: MA Experiment 20000071 PARAMETER Experiment Name: At_100uM_ABA_Mutants_cDNA_P Parameter: Timepoint (hr) Value: 6
  misc_feature: MA Experiment 20000071 PARAMETER Experiment Name: At_100uM_ABA_Mutants_cDNA_P Parameter: Tissue Value: Aerial
  misc_feature: MA Experiment 20000071 PARAMETER Experiment Name: At_100uM_ABA_Mutants_cDNA_P Parameter: Treatment Value: 100uM ABA vs. No Treatment
  misc_feature: MA Experiment ID: 20000072 Result: Up-regulated in Transcription
  misc_feature: MA Experiment 20000072 PARAMETER Experiment Name: At_100uM_ABA_Mutants_cDNA_P Parameter: Plant Line Value: CS8105
  misc_feature: MA Experiment 20000072 PARAMETER Experiment Name: At_100uM_ABA_Mutants_cDNA_P Parameter: Timepoint (hr) Value: 6
  misc_feature: MA Experiment 20000072 PARAMETER Experiment Name: At_100uM_ABA_Mutants_cDNA_P Parameter: Tissue Value: Aerial
  misc_feature: MA Experiment 20000072 PARAMETER Experiment Name: At_100uM_ABA_Mutants_cDNA_P Parameter: Treatment Value: 100uM ABA vs. No Treatment
  misc_feature: MA Experiment ID: 20000086 Result: Up-regulated in Transcription
  misc_feature: MA Experiment 20000086 PARAMETER Experiment Name: At_100uM_ABA_Mutants_cDNA_P Parameter: Plant Line Value: CS22
  misc_feature: MA Experiment 20000086 PARAMETER Experiment Name: At_100uM_ABA_Mutants_cDNA_P Parameter: Timepoint (hr) Value: 6
  misc_feature: MA Experiment 20000086 PARAMETER Experiment Name: At_100uM_ABA_Mutants_cDNA_P Parameter: Tissue Value: Aerial
  misc_feature: MA Experiment 20000086 PARAMETER Experiment Name: At_100uM_ABA_Mutants_cDNA_P Parameter: Treatment Value: 100uM ABA vs. No Treatment
  misc_feature: MA Experiment ID: 20000088 Result: Up-regulated in Transcription
  misc_feature: MA Experiment 20000088 PARAMETER Experiment Name: At_100uM_ABA_Mutants_cDNA_P Parameter: Plant Line Value: Landsberg
  misc_feature: MA Experiment 20000088 PARAMETER Experiment Name: At_100uM_ABA_Mutants_cDNA_P Parameter: Timepoint (hr) Value: 6
  misc_feature: MA Experiment 20000088 PARAMETER Experiment Name: At_100uM_ABA_Mutants_cDNA_P Parameter: Tissue Value: Aerial
  misc_feature: MA Experiment 20000088 PARAMETER Experiment Name: At_100uM_ABA_Mutants_cDNA_P Parameter: Treatment Value: 100uM ABA vs. No Treatment
  misc_feature: MA Experiment ID: 20000111 Result: Down-regulated in Transcription
  misc_feature: MA Experiment 20000111 PARAMETER Experiment Name: At_42deg_Heat_cDNA_P Parameter: Temperature (deg C) Value: 42 vs. 22
  misc_feature: MA Experiment 20000111 PARAMETER Experiment Name: At_42deg_Heat_cDNA_P Parameter: Timepoint (hr) Value: 6
  misc_feature: MA Experiment 20000111 PARAMETER Experiment Name: At_42deg_Heat_cDNA_P Parameter: Tissue Value: Aerial
  misc_feature: MA Experiment ID: 20000113 Result: Down-regulated in Transcription
  misc_feature: MA Experiment 20000113 PARAMETER Experiment Name: At_42deg_Heat_cDNA_P Parameter: Temperature (deg C) Value: 42 vs. 22
  misc_feature: MA Experiment 20000113 PARAMETER Experiment Name: At_42deg_Heat_cDNA_P Parameter: Timepoint (hr) Value: 8
  misc_feature: MA Experiment 20000113 PARAMETER Experiment Name: At_42deg_Heat_cDNA_P Parameter: Tissue Value: Aerial
  misc_feature: MA Experiment ID: 20000117 Result: Up-regulated in Transcription
  misc_feature: MA Experiment 20000117 PARAMETER Experiment Name: At_100uM_ABA_Mutants_cDNA_P Parameter: Plant Line Value: Columbia
  misc_feature: MA Experiment 20000117 PARAMETER Experiment Name: At_100uM_ABA_Mutants_cDNA_P Parameter: Timepoint (hr) Value: 6
  misc_feature: MA Experiment 20000117 PARAMETER Experiment Name: At_100uM_ABA_Mutants_cDNA_P Parameter: Tissue Value: Aerial
  misc_feature: MA Experiment 20000117 PARAMETER Experiment Name: At_100uM_ABA_Mutants_cDNA_P Parameter: Treatment Value: 100uM ABA vs. No Treatment
  misc_feature: MA Experiment ID: 20000173 Result: Down-regulated in Transcription
  misc_feature: MA Experiment 20000173 PARAMETER Experiment Name: At_42deg_Heat_P Parameter: Age (day) Value: 14
  misc_feature: MA Experiment 20000173 PARAMETER Experiment Name: At_42deg_Heat_P Parameter: Organism Value: A. thaliana
  misc_feature: MA Experiment 20000173 PARAMETER Experiment Name: At_42deg_Heat_P Parameter: Plant Line Value: WS
  misc_feature: MA Experiment 20000173 PARAMETER Experiment Name: At_42deg_Heat_P Parameter: Temperature (deg C) Value: 42 vs. 22
  misc_feature: MA Experiment 20000173 PARAMETER Experiment Name: At_42deg_Heat_P Parameter: Timepoint (hr) Value: 6
  misc_feature: MA Experiment 20000173 PARAMETER Experiment Name: At_42deg_Heat_P Parameter: Tissue Value: Aerial
  misc_feature: MA Experiment ID: 20000179 Result: Up-regulated in Transcription
  misc_feature: MA Experiment 20000179 PARAMETER Experiment Name: At_Germinating_Seeds_P Parameter: Age (hr) Value: 6 vs. 0
  misc_feature: MA Experiment 20000179 PARAMETER Experiment Name: At_Germinating_Seeds_P Parameter: Tissue Value: Germinating Seeds
  misc_feature: MA Experiment ID: 20000184 Result: Down-regulated in Transcription
  misc_feature: MA Experiment 20000184 PARAMETER Experiment Name: At_Shoots__P Parameter: Age (day) Value: 7
  misc_feature: MA Experiment 20000184 PARAMETER Experiment Name: At_Shoots__P Parameter: Tissue Value: Shoots vs. Whole Plant
  misc_feature: MA Experiment ID: 20000234 Result: Up-regulated in Transcription
  misc_feature: MA Experiment 20000234 PARAMETER Experiment Name: At_Siliques_P Parameter: Age (day) Value: 21
  misc_feature: MA Experiment 20000234 PARAMETER Experiment Name: At_Siliques_P Parameter: Organism Value: A. thaliana
  misc_feature: MA Experiment 20000234 PARAMETER Experiment Name: At_Siliques_P Parameter: Plant Line Value: WS
  misc_feature: MA Experiment 20000234 PARAMETER Experiment Name: At_Siliques_P Parameter: Tissue Value: Less Than 5mm Siliques vs. Whole Plant
  misc_feature: MA Experiment ID: 20000235 Result: Up-regulated in Transcription
  misc_feature: MA Experiment 20000235 PARAMETER Experiment Name: At_Siliques_P Parameter: Age (day) Value: 21
  misc_feature: MA Experiment 20000235 PARAMETER Experiment Name: At_Siliques_P Parameter: Organism Value: A. thaliana
  misc_feature: MA Experiment 20000235 PARAMETER Experiment Name: At_Siliques_P Parameter: Plant Line Value: WS
  misc_feature: MA Experiment 20000235 PARAMETER Experiment Name: At_Siliques_P Parameter: Tissue Value: 5-10mm Siliques vs. Whole Plant
  misc_feature: MA Experiment ID: 20000495 Result: Up-regulated in Transcription
  misc_feature: MA Experiment 20000495 PARAMETER Experiment Name: At_Guard_Cells_P Parameter: Harvest Date Value: 8/2/2002
  misc_feature: MA Experiment 20000495 PARAMETER Experiment Name: At_Guard_Cells_P Parameter: Organism Value: A. thaliana
  misc_feature: MA Experiment 20000495 PARAMETER Experiment Name: At_Guard_Cells_P Parameter: Tissue Value: Guard Cells vs. Leaves
  misc_feature: MA Experiment ID: 20000573 Result: Down-regulated in Transcription
  misc_feature: MA Experiment 20000573 PARAMETER Experiment Name: At_100uM_ABA_Mutants__P Parameter: Organism Value: A. thaliana
  misc_feature: MA Experiment 20000573 PARAMETER Experiment Name: At_100uM_ABA_Mutants__P Parameter: Plant Line Value: CS22 vs. Ler wt
  misc_feature: MA Experiment 20000573 PARAMETER Experiment Name: At_100uM_ABA_Mutants__P Parameter: Timepoint (hr) Value: N/A
  misc_feature: MA Experiment 20000573 PARAMETER Experiment Name: At_100uM_ABA_Mutants__P Parameter: Tissue Value: Whole Plant
  misc_feature: MA Experiment 20000573 PARAMETER Experiment Name: At_100uM_ABA_Mutants__P Parameter: Treatment Value: None
  misc_feature: MA Experiment ID: 20000574 Result: Down-regulated in Transcription
  misc_feature: MA Experiment 20000574 PARAMETER Experiment Name: At_100uM_ABA_Mutants__P Parameter: Organism Value: A. thaliana
  misc_feature: MA Experiment 20000574 PARAMETER Experiment Name: At_100uM_ABA_Mutants__P Parameter: Plant Line Value: CS23 vs. Ler wt
  misc_feature: MA Experiment 20000574 PARAMETER Experiment Name: At_100uM_ABA_Mutants__P Parameter: Timepoint (hr) Value: N/A
  misc_feature: MA Experiment 20000574 PARAMETER Experiment Name: At_100uM_ABA_Mutants__P Parameter: Tissue Value: Whole Plant
  misc_feature: MA Experiment 20000574 PARAMETER Experiment Name: At_100uM_ABA_Mutants__P Parameter: Treatment Value: None
  misc_feature: MA Experiment ID: 20001247 Result: Down-regulated in Transcription
  misc_feature: MA Experiment 20001247 PARAMETER Experiment Name: At_Far-red-induction_P Parameter: Age (day) Value: 7
  misc_feature: MA Experiment 20001247 PARAMETER Experiment Name: At_Far-red-induction_P Parameter: Light Value: Far-red vs. White
  misc_feature: MA Experiment 20001247 PARAMETER Experiment Name: At_Far-red-induction_P Parameter: Organism Value: A. thaliana
  misc_feature: MA Experiment 20001247 PARAMETER Experiment Name: At_Far-red-induction_P Parameter: Plant Line Value: Columbia
  misc_feature: MA Experiment 20001247 PARAMETER Experiment Name: At_Far-red-induction_P Parameter: Timepoint (hr) Value: 1
  misc_feature: MA Experiment 20001247 PARAMETER Experiment Name: At_Far-red-induction_P Parameter: Tissue Value: Whole Plant
  misc_feature: MA Experiment ID: 20001248 Result: Down-regulated in Transcription
  misc_feature: MA Experiment 20001248 PARAMETER Experiment Name: At_Far-red-induction_P Parameter: Age (day) Value: 7
  misc_feature: MA Experiment 20001248 PARAMETER Experiment Name: At_Far-red-induction_P Parameter: Light Value: Far-red vs. White
  misc_feature: MA Experiment 20001248 PARAMETER Experiment Name: At_Far-red-induction_P Parameter: Organism Value: A. thaliana
  misc_feature: MA Experiment 20001248 PARAMETER Experiment Name: At_Far-red-induction_P Parameter: Plant Line Value: Columbia
  misc_feature: MA Experiment 20001248 PARAMETER Experiment Name: At_Far-red-induction_P Parameter: Timepoint (hr) Value: 4
  misc_feature: MA Experiment 20001248 PARAMETER Experiment Name: At_Far-red-induction_P Parameter: Tissue Value: Whole Plant
  misc_feature: MA Experiment ID: 20001450 Result: Down-regulated in Transcription
  misc_feature: MA Experiment 20001450 PARAMETER Experiment Name: At_Far-red-induction_P Parameter: Age (day) Value: 7
  misc_feature: MA Experiment 20001450 PARAMETER Experiment Name: At_Far-red-induction_P Parameter: Light Value: Far-red vs. White
  misc_feature: MA Experiment 20001450 PARAMETER Experiment Name: At_Far-red-induction_P Parameter: Organism Value: A. thaliana
  misc_feature: MA Experiment 20001450 PARAMETER Experiment Name: At_Far-red-induction_P Parameter: Plant Line Value: Columbia
  misc_feature: MA Experiment 20001450 PARAMETER Experiment Name: At_Far-red-induction_P Parameter: Timepoint (hr) Value: 8
  misc_feature: MA Experiment 20001450 PARAMETER Experiment Name: At_Far-red-induction_P Parameter: Tissue Value: Whole Plant
  misc_feature: MA Experiment ID: 20001558 Result: Down-regulated in Transcription
  misc_feature: MA Experiment 20001558 PARAMETER Experiment Name: At_Drought_Soil_Dry_P Parameter: Age (day) Value: 27
  misc_feature: MA Experiment 20001558 PARAMETER Experiment Name: At_Drought_Soil_Dry_P Parameter: Organism Value: A. thaliana
  misc_feature: MA Experiment 20001558 PARAMETER Experiment Name: At_Drought_Soil_Dry_P Parameter: Plant Line Value: WS
  misc_feature: MA Experiment 20001558 PARAMETER Experiment Name: At_Drought_Soil_Dry_P Parameter: Post Timepoint (hr) Value: 6
  misc_feature: MA Experiment 20001558 PARAMETER Experiment Name: At_Drought_Soil_Dry_P Parameter: Post-Treatment Value: Re-Water vs. No Drought
  misc_feature: MA Experiment 20001558 PARAMETER Experiment Name: At_Drought_Soil_Dry_P Parameter: Timepoint (day) Value: 13
  misc_feature: MA Experiment 20001558 PARAMETER Experiment Name: At_Drought_Soil_Dry_P Parameter: Treatment Value: Drought vs. No Drought
  misc_feature: MA Experiment ID: 20001560 Result: Down-regulated in Transcription
  misc_feature: MA Experiment 20001560 PARAMETER Experiment Name: At_Drought_Soil_Dry_P Parameter: Age (day) Value: 28
  misc_feature: MA Experiment 20001560 PARAMETER Experiment Name: At_Drought_Soil_Dry_P Parameter: Organism Value: A. thaliana
  misc_feature: MA Experiment 20001560 PARAMETER Experiment Name: At_Drought_Soil_Dry_P Parameter: Plant Line Value: WS
  misc_feature: MA Experiment 20001560 PARAMETER Experiment Name: At_Drought_Soil_Dry_P Parameter: Post Timepoint (hr) Value: None
  misc_feature: MA Experiment 20001560 PARAMETER Experiment Name: At_Drought_Soil_Dry_P Parameter: Post-Treatment Value: None
  misc_feature: MA Experiment 20001560 PARAMETER Experiment Name: At_Drought_Soil_Dry_P Parameter: Timepoint (day) Value: 14
  misc_feature: MA Experiment 20001560 PARAMETER Experiment Name: At_Drought_Soil_Dry_P Parameter: Treatment Value: Drought vs. No Drought
  misc_feature: MA Experiment ID: 20001911 Result: Up-regulated in Transcription
  misc_feature: MA Experiment 20001911 PARAMETER Experiment Name: At_Drought_Reproduction_P Parameter: Age (day) Value: 40
  misc_feature: MA Experiment 20001911 PARAMETER Experiment Name: At_Drought_Reproduction_P Parameter: Organism Value: A. thaliana
  misc_feature: MA Experiment 20001911 PARAMETER Experiment Name: At_Drought_Reproduction_P Parameter: Plant Line Value: WS
  misc_feature: MA Experiment 20001911 PARAMETER Experiment Name: At_Drought_Reproduction_P Parameter: Timepoint (day) Value: 10
  misc_feature: MA Experiment 20001911 PARAMETER Experiment Name: At_Drought_Reproduction_P Parameter: Tissue Value: Flowers
  misc_feature: MA Experiment 20001911 PARAMETER Experiment Name: At_Drought_Reproduction_P Parameter: Treatment Value: Drought vs. No Drought
aaaaatcaaaaaaattcatatcatctttttgtctttttttaccagaatttcatccttatttcgtgctaaatcattttccaaacattcataatactttttgttggtttatggccaactaacaaaatatcctctagattttcttctttgtgttagtctatataaagcaataccacagtgatcctcttttttaattcattctgtgtttatgtcaataatcacaatggtttggttaatgaaagtttttgtctttgtgacattactctctttagtgtttgtaataacagaatcagctcctgaatctgctcttatcaccaaacttcctggtttcgaaggcacttttccttcgaaacattactccgggtatgtgacaattgataaggaacatggaaagaatctatggtattactttattgaatcggagaagaatccatcgaaagatccggtggtgctttggctcaatggtggtccaggttgttcaagcatggatggatttgtgtatgagcatggtccattcaatttcgaactaccaaagaaaaacaatagtctcccactcttgcatcttaatccttatagttggtccaaggtctctaacattatataccttgattctcctgttggtgtgggattctcttactcaaacaataagtctgattacataaccggtgatattaaaaccgcggttgactctcacgcgttccttctcaagtggttccaaatgtttcctgagtttcaatcaaatccttttttcatctctggagaatcttacgccggagtttatgtcccaactcttgcttcagaagttgtcatagggaacaaaaatggagtaaagccggctcttaacttcaaggggtatttggttggaaatggagttgcggatccgaagtttgatggaaatgcttttgtcccgtttgcacatgggatgggactaatctctgatgaactctttgagaacgttacaaaagcttgcaagggaaatttctatgaaatagagggactcgagtgcgaggaacagtatacgaaagttaacgatgatactaaccagttgaatatatacaacattcttgagccatgttaccacggaacatcgctatctgcattcgacattagatcgcttccttcaagtctccttcagctaggcaaaactgaaaaacggttacctataagaaaaagaatgtttggtcgagcgtggccagttcgtgcgcctgttcatccaggcattgtccctagctggtctcaacttcttgccgacgtcactgttccttgcattgatgatagagttgcaacagcgtggttgaacgatccagagattaggaaagctattcatactaaagaggagagcgagattggaaggtgggaactttgcagtgggaaactctcattctatcacgacgcaggaagcatgatcgatttccatagaaaccttacactaagtggatatagagctctcatttacagcggggatcacgatatgtgtgttccgtttactggctcggaagcttggacaaaatctcttggatacaaagttattgatgaatggagggcatggatatcaaatgaccaagtcgcggggtatacgcaaggatatgcaaacaatctcacatttttaaccatcaagggtgcaggacatacggttcctgagacaaaccgcgggaggctttagacttctatagccgatttctagaaggaagcaagatttaagagagctgtctcatcagtttcatattctgtgctgtatttaaaagtgatcatcttatagcaatatagaatcttgattgatttgaataagaaagatatattcttcaactcattattcaacatagtaaaaatcatttacctc

SEQ ID NO: 105358 - protein, 484 aa, Arabidopsis thaliana
  peptide (1)..(484): Ceres Seq. ID no. 13617058
  misc_feature (1)..(478): Homolog of NCBI NO: 22531054 NR Description: serine carboxypeptidase 1 precursor-like protein
  misc_feature (1)..(484): Homolog of NCBI NO: 30682276 NR Description: serine carboxypeptidase -related [Arabidopsis
  misc_feature (6)..(261): Homolog of NCBI NO: 25289790 NR Description: hypothetical protein AT4g12910 [imported] -
  misc_feature (275)..(484): Homolog of NCBI NO: 25289790 NR Description: hypothetical protein AT4g12910 [imported] -
  misc_feature (9)..(478): Homolog of NCBI NO: 9279723 NR Description: serine carboxypeptidase I [Arabidopsis thaliana]
  misc_feature (9)..(478): Homolog of NCBI NO: 15230836 NR Description: serine carboxypeptidase -related [Arabidopsis
  misc_feature (14)..(478): Homolog of NCBI NO: 7271957 NR Description: wound-inducible carboxypeptidase [Lycopersicon
  misc_feature (28)..(478): Homolog of NCBI NO: 2815493 NR Description: Serine carboxypeptidase I precursor
  misc_feature (25)..(478): Homolog of NCBI NO: 584892 NR Description: Serine carboxypeptidase I precursor
  misc_feature (19)..(478): Homolog of NCBI NO: 38346978 NR Description: OSJNBb0062H02.3 [Oryza sativa (japonica
MSIITMVWLMKVFVFVTLLSLVFVITESAPESALITKLPGFEGTFPSKHYSGYVTIDKEHGKNLWYYFIESEKNPSKDPVVLWLNGGPGCSSMDGFVYEHGPFNFELPKKNNSLPLLHLNPYSWSKVSNIIYLDSPVGVGFSYSNNKSDYITGDIKTAVDSHAFLLKWFQMFPEFQSNPFFISGESYAGVYVPTLASEVVIGNKNGVKPALNFKGYLVGNGVADPKFDGNAFVPFAHGMGLISDELFENVTKACKGNFYEIEGLECEEQYTKVNDDTNQLNIYNILEPCYHGTSLSAFDIRSLPSSLLQLGKTEKRLPIRKRMFGRAWPVRAPVHPGIVPSWSQLLADVTVPCIDDRVATAWLNDPEIRKAIHTKEESEIGRWELCSGKLSFYHDAGSMIDFHRNLTLSGYRALIYSGDHDMCVPFTGSEAWTKSLGYKVIDEWRAWISNDQVAGYTQGYANNLTFLTIKGAGHTVPETNRGRL

SEQ ID NO: 105359 - protein, 479 aa, Arabidopsis thaliana
  peptide (1)..(479): Ceres Seq. ID no. 13617059
  misc_feature (1)..(473): Homolog of NCBI NO: 22531054 NR Description: serine carboxypeptidase 1 precursor-like protein
  misc_feature (1)..(479): Homolog of NCBI NO: 30682276 NR Description: serine carboxypeptidase -related [Arabidopsis
  misc_feature (1)..(256): Homolog of NCBI NO: 25289790 NR Description: hypothetical protein AT4g12910 [imported] -
  misc_feature (270)..(479): Homolog of NCBI NO: 25289790 NR Description: hypothetical protein AT4g12910 [imported] -
  misc_feature (4)..(473): Homolog of NCBI NO: 9279723 NR Description: serine carboxypeptidase I [Arabidopsis thaliana]
  misc_feature (4)..(473): Homolog of NCBI NO: 15230836 NR Description: serine carboxypeptidase -related [Arabidopsis
  misc_feature (9)..(473): Homolog of NCBI NO: 7271957 NR Description: wound-inducible carboxypeptidase [Lycopersicon
  misc_feature (23)..(473): Homolog of NCBI NO: 2815493 NR Description: Serine carboxypeptidase I precursor
  misc_feature (20)..(473): Homolog of NCBI NO: 584892 NR Description: Serine carboxypeptidase I precursor
  misc_feature (14)..(473): Homolog of NCBI NO: 38346978 NR Description: OSJNBb0062H02.3 [Oryza sativa (japonica
MVWLMKVFVFVTLLSLVFVITESAPESALITKLPGFEGTFPSKHYSGYVTIDKEHGKNLWYYFIESEKNPSKDPVVLWLNGGPGCSSMDGFVYEHGPFNFELPKKNNSLPLLHLNPYSWSKVSNIIYLDSPVGVGFSYSNNKSDYITGDIKTAVDSHAFLLKWFQMFPEFQSNPFFISGESYAGVYVPTLASEVVIGNKNGVKPALNFKGYLVGNGVADPKFDGNAFVPFAHGMGLISDELFENVTKACKGNFYEIEGLECEEQYTKVNDDTNQLNIYNILEPCYHGTSLSAFDIRSLPSSLLQLGKTEKRLPIRKRMFGRAWPVRAPVHPGIVPSWSQLLADVTVPCIDDRVATAWLNDPEIRKAIHTKEESEIGRWELCSGKLSFYHDAGSMIDFHRNLTLSGYRALIYSGDHDMCVPFTGSEAWTKSLGYKVIDEWRAWISNDQVAGYTQGYANNLTFLTIKGAGHTVPETNRGRL

SEQ ID NO: 105360 - protein, 475 aa, Arabidopsis thaliana
  peptide (1)..(475): Ceres Seq. ID no. 13617060
  misc_feature (1)..(469): Homolog of NCBI NO: 22531054 NR Description: serine carboxypeptidase 1 precursor-like protein
  misc_feature (1)..(475): Homolog of NCBI NO: 30682276 NR Description: serine carboxypeptidase -related [Arabidopsis
  misc_feature (1)..(252): Homolog of NCBI NO: 25289790 NR Description: hypothetical protein AT4g12910 [imported] -
  misc_feature (266)..(475): Homolog of NCBI NO: 25289790 NR Description: hypothetical protein AT4g12910 [imported] -
  misc_feature (1)..(469): Homolog of NCBI NO: 9279723 NR Description: serine carboxypeptidase I [Arabidopsis thaliana]
  misc_feature (1)..(469): Homolog of NCBI NO: 15230836 NR Description: serine carboxypeptidase -related [Arabidopsis
  misc_feature (5)..(469): Homolog of NCBI NO: 7271957 NR Description: wound-inducible carboxypeptidase [Lycopersicon
  misc_feature (19)..(469): Homolog of NCBI NO: 2815493 NR Description: Serine carboxypeptidase I precursor
  misc_feature (16)..(469): Homolog of NCBI NO: 584892 NR Description: Serine carboxypeptidase I precursor
  misc_feature (10)..(469): Homolog of NCBI NO: 38346978 NR Description: OSJNBb0062H02.3 [Oryza sativa (japonica
MKVFVFVTLLSLVFVITESAPESALITKLPGFEGTFPSKHYSGYVTIDKEHGKNLWYYFIESEKNPSKDPVVLWLNGGPGCSSMDGFVYEHGPFNFELPKKNNSLPLLHLNPYSWSKVSNIIYLDSPVGVGFSYSNNKSDYITGDIKTAVDSHAFLLKWFQMFPEFQSNPFFISGESYAGVYVPTLASEVVIGNKNGVKPALNFKGYLVGNGVADPKFDGNAFVPFAHGMGLISDELFENVTKACKGNFYEIEGLECEEQYTKVNDDTNQLNIYNILEPCYHGTSLSAFDIRSLPSSLLQLGKTEKRLPIRKRMFGRAWPVRAPVHPGIVPSWSQLLADVTVPCIDDRVATAWLNDPEIRKAIHTKEESEIGRWELCSGKLSFYHDAGSMIDFHRNLTLSGYRALIYSGDHDMCVPFTGSEAWTKSLGYKVIDEWRAWISNDQVAGYTQGYANNLTFLTIKGAGHTVPETNRGRL

SEQ ID NO: 105361 - DNA, 1472 bp, Arabidopsis thaliana
  misc_feature (1)..(1472): Ceres Seq. ID no. 13617061
  misc_feature: MA Experiment ID: 108462 Result: Up-regulated in Transcription
  misc_feature: MA Experiment 108462 PARAMETER Experiment Name: At_Germinating_Seeds_cDNA_P Parameter: Age (day) Value: 2 vs. 0
  misc_feature: MA Experiment 108462 PARAMETER Experiment Name: At_Germinating_Seeds_cDNA_P Parameter: Tissue Value: Germinating Seeds
  misc_feature: MA Experiment ID: 108464 Result: Up-regulated in Transcription
  misc_feature: MA Experiment 108464 PARAMETER Experiment Name: At_Germinating_Seeds_cDNA_P Parameter: Age (day) Value: 4 vs. 0
  misc_feature: MA Experiment 108464 PARAMETER Experiment Name: At_Germinating_Seeds_cDNA_P Parameter: Tissue Value: Germinating Seeds
  misc_feature: MA Experiment ID: 108488 Result: Up-regulated in Transcription
  misc_feature: MA Experiment ID: 108489 Result: Down-regulated in Transcription
  misc_feature: MA Experiment ID: 108561 Result: Down-regulated in Transcription
  misc_feature: MA Experiment 108561 PARAMETER Experiment Name: At_100uM_ABA_cDNA_P Parameter: Timepoint (hr) Value: 6
  misc_feature: MA Experiment 108561 PARAMETER Experiment Name: At_100uM_ABA_cDNA_P Parameter: Tissue Value: Aerial
  misc_feature: MA Experiment 108561 PARAMETER Experiment Name: At_100uM_ABA_cDNA_P Parameter: Treatment Value: 100uM ABA vs. No Treatment
  misc_feature: MA Experiment ID: 108595 Result: Down-regulated in Transcription
  misc_feature: MA Experiment 108595 PARAMETER Experiment Name: At_Ler-pi_Ovule_cDNA_P Parameter: Plant Line Value: null
  misc_feature: MA Experiment ID: 108607 Result: Down-regulated in Transcription
  misc_feature: MA Experiment 108607 PARAMETER Experiment Name: At_100uM_ABA_cDNA_P Parameter: Timepoint (hr) Value: 4
  misc_feature: MA Experiment 108607 PARAMETER Experiment Name: At_100uM_ABA_cDNA_P Parameter: Tissue Value: Aerial
  misc_feature: MA Experiment 108607 PARAMETER Experiment Name: At_100uM_ABA_cDNA_P Parameter: Treatment Value: 100uM ABA vs. No Treatment
  misc_feature: MA Experiment ID: 108668 Result: Down-regulated in Transcription
  misc_feature: MA Experiment 108668 PARAMETER Experiment Name: At_2mM_SA_cDNA_P Parameter: Plant Line Value: WS
  misc_feature: MA Experiment 108668 PARAMETER Experiment Name: At_2mM_SA_cDNA_P Parameter: Timepoint (hr) Value: 6
  misc_feature: MA Experiment 108668 PARAMETER Experiment Name: At_2mM_SA_cDNA_P Parameter: Treatment Value: 2mM SA vs. No Treatment
  misc_feature: MA Experiment ID: 20000069 Result: Down-regulated in Transcription
  misc_feature: MA Experiment 20000069 PARAMETER Experiment Name: At_100uM_ABA_Mutants_cDNA_P Parameter: Plant Line Value: CS23
  misc_feature: MA Experiment 20000069 PARAMETER Experiment Name: At_100uM_ABA_Mutants_cDNA_P Parameter: Timepoint (hr) Value: 6
  misc_feature: MA Experiment 20000069 PARAMETER Experiment Name: At_100uM_ABA_Mutants_cDNA_P Parameter: Tissue Value: Aerial
  misc_feature: MA Experiment 20000069 PARAMETER Experiment Name: At_100uM_ABA_Mutants_cDNA_P Parameter: Treatment Value: 100uM ABA vs. No Treatment
  misc_feature: MA Experiment ID: 20000070 Result: Down-regulated in Transcription
  misc_feature: MA Experiment 20000070 PARAMETER Experiment Name: At_100uM_ABA_Mutants_cDNA_P Parameter: Plant Line Value: CS24
  misc_feature: MA Experiment 20000070 PARAMETER Experiment Name: At_100uM_ABA_Mutants_cDNA_P Parameter: Timepoint (hr) Value: 6
  misc_feature: MA Experiment 20000070 PARAMETER Experiment Name: At_100uM_ABA_Mutants_cDNA_P Parameter: Tissue Value: Aerial
  misc_feature: MA Experiment 20000070 PARAMETER Experiment Name: At_100uM_ABA_Mutants_cDNA_P Parameter: Treatment Value: 100uM ABA vs. No Treatment
  misc_feature: MA Experiment ID: 20000071 Result: Down-regulated in Transcription
  misc_feature: MA Experiment 20000071 PARAMETER Experiment Name: At_100uM_ABA_Mutants_cDNA_P Parameter: Plant Line Value: CS8104
  misc_feature: MA Experiment 20000071 PARAMETER Experiment Name: At_100uM_ABA_Mutants_cDNA_P Parameter: Timepoint (hr) Value: 6
  misc_feature: MA Experiment 20000071 PARAMETER Experiment Name: At_100uM_ABA_Mutants_cDNA_P Parameter: Tissue Value: Aerial
  misc_feature: MA Experiment 20000071 PARAMETER Experiment Name: At_100uM_ABA_Mutants_cDNA_P Parameter: Treatment Value: 100uM ABA vs. No Treatment
  misc_feature: MA Experiment ID: 20000072 Result: Down-regulated in Transcription
  misc_feature: MA Experiment 20000072 PARAMETER Experiment Name: At_100uM_ABA_Mutants_cDNA_P Parameter: Plant Line Value: CS8105
  misc_feature: MA Experiment 20000072 PARAMETER Experiment Name: At_100uM_ABA_Mutants_cDNA_P Parameter: Timepoint (hr) Value: 6
  misc_feature: MA Experiment 20000072 PARAMETER Experiment Name: At_100uM_ABA_Mutants_cDNA_P Parameter: Tissue Value: Aerial
  misc_feature: MA Experiment 20000072 PARAMETER Experiment Name: At_100uM_ABA_Mutants_cDNA_P Parameter: Treatment Value: 100uM ABA vs. No Treatment
  misc_feature: MA Experiment ID: 20000086 Result: Down-regulated in Transcription
  misc_feature: MA Experiment 20000086 PARAMETER Experiment Name: At_100uM_ABA_Mutants_cDNA_P Parameter: Plant Line Value: CS22
  misc_feature: MA Experiment 20000086 PARAMETER Experiment Name: At_100uM_ABA_Mutants_cDNA_P Parameter: Timepoint (hr) Value: 6
  misc_feature: MA Experiment 20000086 PARAMETER Experiment Name: At_100uM_ABA_Mutants_cDNA_P Parameter: Tissue Value: Aerial
  misc_feature: MA Experiment 20000086 PARAMETER Experiment Name: At_100uM_ABA_Mutants_cDNA_P Parameter: Treatment Value: 100uM ABA vs. No Treatment
  misc_feature: MA Experiment ID: 20000087 Result: Down-regulated in Transcription
  misc_feature: MA Experiment 20000087 PARAMETER Experiment Name: At_100uM_ABA_Mutants_cDNA_P Parameter: Plant Line Value: WS
  misc_feature: MA Experiment 20000087 PARAMETER Experiment Name: At_100uM_ABA_Mutants_cDNA_P Parameter: Timepoint (hr) Value: 6
  misc_feature: MA Experiment 20000087 PARAMETER Experiment Name: At_100uM_ABA_Mutants_cDNA_P Parameter: Tissue Value: Aerial
  misc_feature: MA Experiment 20000087 PARAMETER Experiment Name: At_100uM_ABA_Mutants_cDNA_P Parameter: Treatment Value: 100uM ABA vs. No Treatment
  misc_feature: MA Experiment ID: 20000088 Result: Down-regulated in Transcription
  misc_feature: MA Experiment 20000088 PARAMETER Experiment Name: At_100uM_ABA_Mutants_cDNA_P Parameter: Plant Line Value: Landsberg
  misc_feature: MA Experiment 20000088 PARAMETER Experiment Name: At_100uM_ABA_Mutants_cDNA_P Parameter: Timepoint (hr) Value: 6
  misc_feature: MA Experiment 20000088 PARAMETER Experiment Name: At_100uM_ABA_Mutants_cDNA_P Parameter: Tissue Value: Aerial
  misc_feature: MA Experiment 20000088 PARAMETER Experiment Name: At_100uM_ABA_Mutants_cDNA_P Parameter: Treatment Value: 100uM ABA vs. No Treatment
  misc_feature: MA Experiment ID: 20000090 Result: Down-regulated in Transcription
  misc_feature: MA Experiment ID: 20000117 Result: Down-regulated in Transcription
  misc_feature: MA Experiment 20000117 PARAMETER Experiment Name: At_100uM_ABA_Mutants_cDNA_P Parameter: Plant Line Value: Columbia
  misc_feature: MA Experiment 20000117 PARAMETER Experiment Name: At_100uM_ABA_Mutants_cDNA_P Parameter: Timepoint (hr) Value: 6
  misc_feature: MA Experiment 20000117 PARAMETER Experiment Name: At_100uM_ABA_Mutants_cDNA_P Parameter: Tissue Value: Aerial
  misc_feature: MA Experiment 20000117 PARAMETER Experiment Name: At_100uM_ABA_Mutants_cDNA_P Parameter: Treatment Value: 100uM ABA vs. No Treatment
  misc_feature: MA Experiment ID: 20000185 Result: Down-regulated in Transcription
  misc_feature: MA Experiment 20000185 PARAMETER Experiment Name: At_Roots__P Parameter: Age (day) Value: 7 vs. 21
  misc_feature: MA Experiment 20000185 PARAMETER Experiment Name: At_Roots__P Parameter: Organism Value: A. thaliana
  misc_feature: MA Experiment 20000185 PARAMETER Experiment Name: At_Roots__P Parameter: Tissue Value: Roots vs. Whole Plant
  misc_feature: MA Experiment ID: 20000438 Result: Up-regulated in Transcription
  misc_feature: MA Experiment 20000438 PARAMETER Experiment Name: At_Shoots__P Parameter: Age (day) Value: 14
  misc_feature: MA Experiment 20000438 PARAMETER Experiment Name: At_Shoots__P Parameter: Tissue Value: Shoots vs. Whole Plant
  misc_feature: MA Experiment ID: 20001248 Result: Down-regulated in Transcription
  misc_feature: MA Experiment 20001248 PARAMETER Experiment Name: At_Far-red-induction_P Parameter: Age (day) Value: 7
  misc_feature: MA Experiment 20001248 PARAMETER Experiment Name: At_Far-red-induction_P Parameter: Light Value: Far-red vs. White
  misc_feature: MA Experiment 20001248 PARAMETER Experiment Name: At_Far-red-induction_P Parameter: Organism Value: A. thaliana
  misc_feature: MA Experiment 20001248 PARAMETER Experiment Name: At_Far-red-induction_P Parameter: Plant Line Value: Columbia
  misc_feature: MA Experiment 20001248 PARAMETER Experiment Name: At_Far-red-induction_P Parameter: Timepoint (hr) Value: 4
  misc_feature: MA Experiment 20001248 PARAMETER Experiment Name: At_Far-red-induction_P Parameter: Tissue Value: Whole Plant
  misc_feature: MA Experiment ID: 20001556 Result: Down-regulated in Transcription
  misc_feature: MA Experiment 20001556 PARAMETER Experiment Name: At_Drought_Soil_Dry_P Parameter: Age (day) Value: 26
  misc_feature: MA Experiment 20001556 PARAMETER Experiment Name: At_Drought_Soil_Dry_P Parameter: Organism Value: A. thaliana
  misc_feature: MA Experiment 20001556 PARAMETER Experiment Name: At_Drought_Soil_Dry_P Parameter: Plant Line Value: WS
  misc_feature: MA Experiment 20001556 PARAMETER Experiment Name: At_Drought_Soil_Dry_P Parameter: Post Timepoint (hr) Value: None
  misc_feature: MA Experiment 20001556 PARAMETER Experiment Name: At_Drought_Soil_Dry_P Parameter: Post-Treatment Value: None
  misc_feature: MA Experiment 20001556 PARAMETER Experiment Name: At_Drought_Soil_Dry_P Parameter: Timepoint (day) Value: 12
  misc_feature: MA Experiment 20001556 PARAMETER Experiment Name: At_Drought_Soil_Dry_P Parameter: Treatment Value: Drought vs. No Drought
  misc_feature: MA Experiment ID: 20001560 Result: Down-regulated in Transcription
  misc_feature: MA Experiment 20001560 PARAMETER Experiment Name: At_Drought_Soil_Dry_P Parameter: Age (day) Value: 28
  misc_feature: MA Experiment 20001560 PARAMETER Experiment Name: At_Drought_Soil_Dry_P Parameter: Organism Value: A. thaliana
  misc_feature: MA Experiment 20001560 PARAMETER Experiment Name: At_Drought_Soil_Dry_P Parameter: Plant Line Value: WS
  misc_feature: MA Experiment 20001560 PARAMETER Experiment Name: At_Drought_Soil_Dry_P Parameter: Post Timepoint (hr) Value: None
  misc_feature: MA Experiment 20001560 PARAMETER Experiment Name: At_Drought_Soil_Dry_P Parameter: Post-Treatment Value: None
  misc_feature: MA Experiment 20001560 PARAMETER Experiment Name: At_Drought_Soil_Dry_P Parameter: Timepoint (day) Value: 14
  misc_feature: MA Experiment 20001560 PARAMETER Experiment Name: At_Drought_Soil_Dry_P Parameter: Treatment Value: Drought vs. No Drought
  misc_feature: MA Experiment ID: 20001904 Result: Down-regulated in Transcription
  misc_feature: MA Experiment 20001904 PARAMETER Experiment Name: At_Drought_Reproduction_P Parameter: Age (day) Value: 37
  misc_feature: MA Experiment 20001904 PARAMETER Experiment Name: At_Drought_Reproduction_P Parameter: Organism Value: A. thaliana
  misc_feature: MA Experiment 20001904 PARAMETER Experiment Name: At_Drought_Reproduction_P Parameter: Plant Line Value: WS
  misc_feature: MA Experiment 20001904 PARAMETER Experiment Name: At_Drought_Reproduction_P Parameter: Timepoint (day) Value: 7
  misc_feature: MA Experiment 20001904 PARAMETER Experiment Name: At_Drought_Reproduction_P Parameter: Tissue Value: Rosettes
  misc_feature: MA Experiment 20001904 PARAMETER Experiment Name: At_Drought_Reproduction_P Parameter: Treatment Value: Drought vs. No Drought
  misc_feature: MA Experiment ID: 20001905 Result: Down-regulated in Transcription
  misc_feature: MA Experiment 20001905 PARAMETER Experiment Name: At_Drought_Reproduction_P Parameter: Age (day) Value: 40
  misc_feature: MA Experiment 20001905 PARAMETER Experiment Name: At_Drought_Reproduction_P Parameter: Organism Value: A. thaliana
  misc_feature: MA Experiment 20001905 PARAMETER Experiment Name: At_Drought_Reproduction_P Parameter: Plant Line Value: WS
  misc_feature: MA Experiment 20001905 PARAMETER Experiment Name: At_Drought_Reproduction_P Parameter: Timepoint (day) Value: 10
  misc_feature: MA Experiment 20001905 PARAMETER Experiment Name: At_Drought_Reproduction_P Parameter: Tissue Value: Rosettes
  misc_feature: MA Experiment 20001905 PARAMETER Experiment Name: At_Drought_Reproduction_P Parameter: Treatment Value: Drought vs. No Drought
  misc_feature: MA Experiment ID: 20001911 Result: Down-regulated in Transcription
  misc_feature: MA Experiment 20001911 PARAMETER Experiment Name: At_Drought_Reproduction_P Parameter: Age (day) Value: 40
  misc_feature: MA Experiment 20001911 PARAMETER Experiment Name: At_Drought_Reproduction_P Parameter: Organism Value: A. thaliana
  misc_feature: MA Experiment 20001911 PARAMETER Experiment Name: At_Drought_Reproduction_P Parameter: Plant Line Value: WS
  misc_feature: MA Experiment 20001911 PARAMETER Experiment Name: At_Drought_Reproduction_P Parameter: Timepoint (day) Value: 10
  misc_feature: MA Experiment 20001911 PARAMETER Experiment Name: At_Drought_Reproduction_P Parameter: Tissue Value: Flowers
  misc_feature: MA Experiment 20001911 PARAMETER Experiment Name: At_Drought_Reproduction_P Parameter: Treatment Value: Drought vs. No Drought
acaattctttgcatcatcatcattcatcatggattcttcttaccttagaatctctctttcttttctcttctgggctttactactctcaccggctgtgtcacagtcatcttcttgttcgtcacagacattttccggcgtcaaatcttaccctcactgtctcgacctccctgatcttaaagccattctccattactcttatgacgcatctaacacaactctcgccgttgttttctctgctccaccgtcaaaacctggtggttggatcgcttgggctattaaccctaaatccaccggcatggctggatctcaagccctcgttgcctctaaggaccctagcaccggcgttgcttccgtgacgacccttaacatcgtctcttacagctctctggttccctcgaaactgtcctttgacgtgtgggatgttaaggcggaggaggcggctaatgacggtggagctttacgaatctttgcgaaagtgaaggttccggcggatttagcggcgagtgggaaggttaaccaggtttggcaggttggtccgggagtgtctaatgggaggatacaggctcatgatttcagcggtcccaatcttaactcagtgggatcactcgatttaaccgggaccacccccggagtccctgtctccggaggtggtggtgccggtaattctagaatccacaagagaaatatccatggaatattgaacgcagtgagttggggacttctatttcccattggagcaatgatagctaggtatatgagaatctttgaatcagcagatcctgcttggttttacctccacgtgtcatgccaattctctgcttatgtcatcggtgttgccggatgggccaccggactcaagcttggttcagaatctaaaggtattcagtacaacactcaccggaacatcggcatctgtctcttctctatagccactcttcagatgtttgcgatgctgttgcggccaaggaaggaccacaagtttagattcgtttggaatatttaccaccacggagttggatactctatcctcatccttggaatcatcaatgttttcaaaggtcttagcatcttgaatccaaagcatacttacaagacggcttatatcgctgtgattgggaccttaggaggcatcacgttactcttggaagttgttacttgggtcattgtcctcaagagaaaatctgccaagtctacaaagcctctcaaggcctaatggtgttggtaattcaaaggatttgtattgttttattttcttttttttttgaagttagaaattgcattgtctttctccacaaattatgattcatctcttgacgttgcttgttttgaggatgatgattatgacttgtgtgttttatgtatagtaggagaaacacatatatgtcttagtgtttgttctttgtagctctgccttttatttcgtgtgtttttgtggttcagaatacttgtagggaattataaactaatttttc

SEQ ID NO: 105362 - protein, 403 aa, Arabidopsis thaliana; identical to SEQ ID NO: 26972
  peptide (1)..(403): Ceres Seq. ID no. 13617062
  misc_feature (99)..(237): Pfam Name: Protein of unknown function (DUF568) Pfam Description: Protein of unknown function (DUF568)
  misc_feature (10)..(403): Homolog of NCBI NO: 15235545 NR Description: auxin-induced protein, putative [Arabidopsis
  misc_feature (10)..(403): Homolog of NCBI NO: 21593814 NR Description: unknown [Arabidopsis thaliana]
  misc_feature (12)..(402): Homolog of NCBI NO: 18404500 NR Description: auxin-induced protein family [Arabidopsis >gi|9294186|dbj|BAB02088.1| similarity to unknown protein [Arabidopsis thaliana]
  misc_feature (26)..(403): Homolog of NCBI NO: 24414270 NR Description: Putative membrane protein [Oryza sativa (japonica
  misc_feature (13)..(397): Homolog of NCBI NO: 18086563 NR Description: AT4g17280/dl4675c [Arabidopsis thaliana]
  misc_feature (12)..(398): Homolog of NCBI NO: 15238124 NR Description: auxin-induced protein, putative [Arabidopsis >gi|9758781|dbj|BAB09079.1| gene_id:MNJ7.12~pir||H71441~similar
  misc_feature (10)..(394): Homolog of NCBI NO: 18421491 NR Description: auxin-induced protein family [Arabidopsis >gi|9758647|dbj|BAB09271.1| gene_id:MXH1.11~pir||T10200~similar unknown protein [Arabidopsis thaliana]
  misc_feature (10)..(394): Homolog of NCBI NO: 21592781 NR Description: putative membrane protein [Arabidopsis thaliana]
  misc_feature (10)..(393): Homolog of NCBI NO: 13785209 NR Description: putative membrane protein [Solanum tuberosum]
  misc_feature (20)..(399): Homolog of NCBI NO: 13785213 NR Description: putative membrane protein [Solanum tuberosum]

SEQ ID NO: 105363 - protein, 394 aa, Arabidopsis thaliana; identical to SEQ ID NO: 26973
  peptide (1)..(394): Ceres Seq. ID no. 13617063
  misc_feature (90)..(228): Pfam Name: Protein of unknown function (DUF568) Pfam Description: Protein of unknown function (DUF568)
  misc_feature (1)..(394): Homolog of NCBI NO: 15235545 NR Description: auxin-induced protein, putative [Arabidopsis
  misc_feature (1)..(394): Homolog of NCBI NO: 21593814 NR Description: unknown [Arabidopsis thaliana]
  misc_feature (3)..(393): Homolog of NCBI NO: 18404500 NR Description: auxin-induced protein family [Arabidopsis >gi|9294186|dbj|BAB02088.1| similarity to unknown protein [Arabidopsis thaliana]
  misc_feature (17)..(394): Homolog of NCBI NO: 24414270 NR Description: Putative membrane protein [Oryza sativa (japonica
  misc_feature (4)..(388): Homolog of NCBI NO: 18086563 NR Description: AT4g17280/dl4675c [Arabidopsis thaliana]
  misc_feature (3)..(389): Homolog of NCBI NO: 15238124 NR Description: auxin-induced protein, putative [Arabidopsis >gi|9758781|dbj|BAB09079.1| gene_id:MNJ7.12~pir||H71441~similar
  misc_feature (1)..(385): Homolog of NCBI NO: 18421491 NR Description: auxin-induced protein family [Arabidopsis >gi|9758647|dbj|BAB09271.1| gene_id:MXH1.11~pir||T10200~similar unknown protein [Arabidopsis thaliana]
  misc_feature (1)..(385): Homolog of NCBI NO: 21592781 NR Description: putative membrane protein [Arabidopsis thaliana]
  misc_feature (1)..(384): Homolog of NCBI NO: 13785209 NR Description: putative membrane protein [Solanum tuberosum]
  misc_feature (11)..(390): Homolog of NCBI NO: 13785213 NR Description: putative membrane protein [Solanum tuberosum]

SEQ ID NO: 105364 - protein, 305 aa, Arabidopsis thaliana; identical to SEQ ID NO: 26974
  peptide (1)..(305): Ceres Seq. ID no. 13617064
  misc_feature (1)..(139): Pfam Name: Protein of unknown function (DUF568) Pfam Description: Protein of unknown function (DUF568)
  misc_feature (1)..(305): Homolog of NCBI NO: 15235545 NR Description: auxin-induced protein, putative [Arabidopsis
  misc_feature (1)..(305): Homolog of NCBI NO: 21593814 NR Description: unknown [Arabidopsis thaliana]
  misc_feature (1)..(304): Homolog of NCBI NO: 18404500 NR Description: auxin-induced protein family [Arabidopsis >gi|9294186|dbj|BAB02088.1| similarity to unknown protein [Arabidopsis thaliana]
  misc_feature (1)..(305): Homolog of NCBI NO: 24414270 NR Description: Putative membrane protein [Oryza sativa (japonica
  misc_feature (1)..(299): Homolog of NCBI NO: 18086563 NR Description: AT4g17280/dl4675c [Arabidopsis thaliana]
  misc_feature (1)..(300): Homolog of NCBI NO: 15238124 NR Description: auxin-induced protein, putative [Arabidopsis >gi|9758781|dbj|BAB09079.1| gene_id:MNJ7.12~pir||H71441~similar
  misc_feature (1)..(296): Homolog of NCBI NO: 18421491 NR Description: auxin-induced protein family [Arabidopsis >gi|9758647|dbj|BAB09271.1| gene_id:MXH1.11~pir||T10200~similar unknown protein [Arabidopsis thaliana]
  misc_feature (1)..(296): Homolog of NCBI NO: 21592781 NR Description: putative membrane protein [Arabidopsis thaliana]
  misc_feature (1)..(295): Homolog of NCBI NO: 13785209 NR Description: putative membrane protein [Solanum tuberosum]
  misc_feature (1)..(301): Homolog of NCBI NO: 13785213 NR Description: putative membrane protein [Solanum tuberosum]

SEQ ID NO: 105365 - DNA, 1281 bp, Arabidopsis thaliana
  misc_feature (1)..(1281): Ceres Seq. ID no. 13617065
  misc_feature: MA Experiment ID: 108434 Result: Down-regulated in Transcription
  misc_feature: MA Experiment 108434 PARAMETER Experiment Name: At_Root_Tips_cDNA_P Parameter: Tissue Value: Root Tips
  misc_feature: MA Experiment ID: 108462 Result: Up-regulated in Transcription
  misc_feature: MA Experiment 108462 PARAMETER Experiment Name: At_Germinating_Seeds_cDNA_P Parameter: Age (day) Value: 2 vs. 0
  misc_feature: MA Experiment 108462 PARAMETER Experiment Name: At_Germinating_Seeds_cDNA_P Parameter: Tissue Value: Germinating Seeds
  misc_feature: MA Experiment ID: 108463 Result: Up-regulated in Transcription
  misc_feature: MA Experiment 108463 PARAMETER Experiment Name: At_Germinating_Seeds_cDNA_P Parameter: Age (day) Value: 3 vs. 0
  misc_feature: MA Experiment 108463 PARAMETER Experiment Name: At_Germinating_Seeds_cDNA_P Parameter: Tissue Value: Germinating Seeds
  misc_feature: MA Experiment ID: 108501 Result: Up-regulated in Transcription
  misc_feature: MA Experiment 108501 PARAMETER Experiment Name: At_ap2_floral_buds_cDNA_P Parameter: Plant Line Value: ap2 (Ler.)
  misc_feature: MA Experiment 108501 PARAMETER Experiment Name: At_ap2_floral_buds_cDNA_P Parameter: Tissue Value: Closed Flower
  misc_feature: MA Experiment ID: 108577 Result: Up-regulated in Transcription
  misc_feature: MA Experiment 108577 PARAMETER Experiment Name: At_42deg_Heat_cDNA_P Parameter: Temperature (deg C) Value: 42 vs. 22
  misc_feature: MA Experiment 108577 PARAMETER Experiment Name: At_42deg_Heat_cDNA_P Parameter: Timepoint (hr) Value: 6
  misc_feature: MA Experiment 108577 PARAMETER Experiment Name: At_42deg_Heat_cDNA_P Parameter: Tissue Value: Aerial
  misc_feature: MA Experiment ID: 108595 Result: Down-regulated in Transcription
  misc_feature: MA Experiment 108595 PARAMETER Experiment Name: At_Ler-pi_Ovule_cDNA_P Parameter: Plant Line Value: null
  misc_feature: MA Experiment ID: 20000111 Result: Up-regulated in Transcription
  misc_feature: MA Experiment 20000111 PARAMETER Experiment Name: At_42deg_Heat_cDNA_P Parameter: Temperature (deg C) Value: 42 vs. 22
  misc_feature: MA Experiment 20000111 PARAMETER Experiment Name: At_42deg_Heat_cDNA_P Parameter: Timepoint (hr) Value: 6
  misc_feature: MA Experiment 20000111 PARAMETER Experiment Name: At_42deg_Heat_cDNA_P Parameter: Tissue Value: Aerial
  misc_feature: MA Experiment ID: 20000173 Result: Up-regulated in Transcription
  misc_feature: MA Experiment 20000173 PARAMETER Experiment Name: At_42deg_Heat_P Parameter: Age (day) Value: 14
  misc_feature: MA Experiment 20000173 PARAMETER Experiment Name: At_42deg_Heat_P Parameter: Organism Value: A. thaliana
  misc_feature: MA Experiment 20000173 PARAMETER Experiment Name: At_42deg_Heat_P Parameter: Plant Line Value: WS
  misc_feature: MA Experiment 20000173 PARAMETER Experiment Name: At_42deg_Heat_P Parameter: Temperature (deg C) Value: 42 vs. 22
  misc_feature: MA Experiment 20000173 PARAMETER Experiment Name: At_42deg_Heat_P Parameter: Timepoint (hr) Value: 6
  misc_feature: MA Experiment 20000173 PARAMETER Experiment Name: At_42deg_Heat_P Parameter: Tissue Value: Aerial
  misc_feature: MA Experiment ID: 20000180 Result: Up-regulated in Transcription
  misc_feature: MA Experiment 20000180 PARAMETER Experiment Name: At_Germinating_Seeds_P Parameter: Age (hr) Value: 24 vs. 0
  misc_feature: MA Experiment 20000180 PARAMETER Experiment Name: At_Germinating_Seeds_P Parameter: Tissue Value: Germinating Seeds
  misc_feature: MA Experiment ID: 20000184 Result: Up-regulated in Transcription
  misc_feature: MA Experiment 20000184 PARAMETER Experiment Name: At_Shoots__P Parameter: Age (day) Value: 7
  misc_feature: MA Experiment 20000184 PARAMETER Experiment Name: At_Shoots__P Parameter: Tissue Value: Shoots vs. Whole Plant
  misc_feature: MA Experiment ID: 20000224 Result: Down-regulated in Transcription
  misc_feature: MA Experiment ID: 20000438 Result: Up-regulated in Transcription
  misc_feature: MA Experiment 20000438 PARAMETER Experiment Name: At_Shoots__P Parameter: Age (day) Value: 14
  misc_feature: MA Experiment 20000438 PARAMETER Experiment Name: At_Shoots__P Parameter: Tissue Value: Shoots vs. Whole Plant
  misc_feature: MA Experiment ID: 20000441 Result: Up-regulated in Transcription
  misc_feature: MA Experiment 20000441 PARAMETER Experiment Name: At_1uM_BR-BRZ__P Parameter: Tissue Value: Shoot Apices
  misc_feature: MA Experiment 20000441 PARAMETER Experiment Name: At_1uM_BR-BRZ__P Parameter: Treatment Value: 1uM BR vs. No Treatment
  misc_feature: MA Experiment ID: 20000443 Result: Up-regulated in Transcription
  misc_feature: MA Experiment 20000443 PARAMETER Experiment Name: At_1uM_BR-BRZ__P Parameter: Tissue Value: Shoot Apices
  misc_feature: MA Experiment 20000443 PARAMETER Experiment Name: At_1uM_BR-BRZ__P Parameter: Treatment Value: 1uM BRZ vs. No Treatment
  misc_feature: MA Experiment ID: 20001248 Result: Down-regulated in Transcription
  misc_feature: MA Experiment 20001248 PARAMETER Experiment Name: At_Far-red-induction_P Parameter: Age (day) Value: 7
  misc_feature: MA Experiment 20001248 PARAMETER Experiment Name: At_Far-red-induction_P Parameter: Light Value: Far-red vs. White
  misc_feature: MA Experiment 20001248 PARAMETER Experiment Name: At_Far-red-induction_P Parameter: Organism Value: A. thaliana
  misc_feature: MA Experiment 20001248 PARAMETER Experiment Name: At_Far-red-induction_P Parameter: Plant Line Value: Columbia
  misc_feature: MA Experiment 20001248 PARAMETER Experiment Name: At_Far-red-induction_P Parameter: Timepoint (hr) Value: 4
  misc_feature: MA Experiment 20001248 PARAMETER Experiment Name: At_Far-red-induction_P Parameter: Tissue Value: Whole Plant
  misc_feature: MA Experiment ID: 20001560 Result: Down-regulated in Transcription
  misc_feature: MA Experiment 20001560 PARAMETER Experiment Name: At_Drought_Soil_Dry_P Parameter: Age (day) Value: 28
  misc_feature: MA Experiment 20001560 PARAMETER Experiment Name: At_Drought_Soil_Dry_P Parameter: Organism Value: A. thaliana
  misc_feature: MA Experiment 20001560 PARAMETER Experiment Name: At_Drought_Soil_Dry_P Parameter: Plant Line Value: WS
  misc_feature: MA Experiment 20001560 PARAMETER Experiment Name: At_Drought_Soil_Dry_P Parameter: Post Timepoint (hr) Value: None
  misc_feature: MA Experiment 20001560 PARAMETER Experiment Name: At_Drought_Soil_Dry_P Parameter: Post-Treatment Value: None
  misc_feature: MA Experiment 20001560 PARAMETER Experiment Name: At_Drought_Soil_Dry_P Parameter: Timepoint (day) Value: 14
  misc_feature: MA Experiment 20001560 PARAMETER Experiment Name: At_Drought_Soil_Dry_P Parameter: Treatment Value: Drought vs. No Drought
  misc_feature: MA Experiment ID: 20001911 Result: Up-regulated in Transcription
  misc_feature: MA Experiment 20001911 PARAMETER Experiment Name: At_Drought_Reproduction_P Parameter: Age (day) Value: 40
  misc_feature: MA Experiment 20001911 PARAMETER Experiment Name: At_Drought_Reproduction_P Parameter: Organism Value: A. thaliana
  misc_feature: MA Experiment 20001911 PARAMETER Experiment Name: At_Drought_Reproduction_P Parameter: Plant Line Value: WS
  misc_feature: MA Experiment 20001911 PARAMETER Experiment Name: At_Drought_Reproduction_P Parameter: Timepoint (day) Value: 10
  misc_feature: MA Experiment 20001911 PARAMETER Experiment Name: At_Drought_Reproduction_P Parameter: Tissue Value: Flowers
  misc_feature: MA Experiment 20001911 PARAMETER Experiment Name: At_Drought_Reproduction_P Parameter: Treatment Value: Drought vs. No Drought
acaaccactttttatatgatataccgcttttaccccttaagcctctccgcgtaaaaccgagaacaaaatcttaagcaccgttgttccgattcagagatcatcgtcgtcgtcgttcagaaaccttcaaaaatggctggaaaactcatgcacgctcttcagtacaactcttacggtggtggcgccgccggattagagcatgttcaagttccggttccaacaccaaagagtaatgaggtttgcctgaaattagaagctactagtctaaaccctgttgattggaaaattcagaaaggaatgatccgcccatttctgccccgcaagttcccctgcattccagctactgatgttgctggagaggtcgttgaggttggatcaggagtaaaaaattttaaggctggtgacaaagttgtagcggttcttagccatctaggtggaggtggacttgctgagttcgctgttgcaaccgagaagctgactgtcaaaagacctcaagaagtgggagcagctgaagcagcagctttacctgtggcgggtctaaccgctctccaagctcttactaatcctgcggggttgaagctggatggtacaggcaagaaggcgaacatcctggtcacagcagcatctggtggggttggtcactatgcagtccagctggcaaaacttgcaaatgctcacgtaaccgctacatgtggtgcccggaacatagagtttgtcaaatcgttgggagcggatgaggttctcgactacaagactcccgagggagccgccctcaagagtccgtcgggtaaaaaatatgacgctgtggtccattgtgcaaacgggattccattttcggtattcgaaccaaatttgtcggaaaacgggaaggtgatagacatcacaccggggcctaatgcaatgtggacttatgcggttaagaaaataaccatgtcaaagaagcagttagtgccactcttgttgatcccaaaagctgagaatttggagtttatggtgaatctagtgaaagaagggaaagtgaagacagtgattgactcaaagcatcctttgagcaaagcggaggatgcttgggccaaaagtatcgatggtcatgctactgggaagatcattgtcgagccataagagcgttgtagccatctttgactgtctgtgaatgtgataatagatgttaaaagtttgcgtaccgtttacagaatgttttatgttgttttgtttaatatacccgagtatgtcgaaagttacatgaaaagaaaatttggatgaaataaataatacttgttaggt

SEQ ID NO: 105366 - protein, 329 aa, Arabidopsis thaliana; identical to SEQ ID NO: 27334
  peptide (1)..(329): Ceres Seq. ID no. 13617066
  misc_feature (1)..(329): Homolog of NCBI NO: 15235549 NR Description: oxidoreductase, zinc-binding dehydrogenase family
  misc_feature (1)..(329): Homolog of NCBI NO: 24370984 NR Description: quinone-oxidoreductase homologue [Spinacia
  misc_feature (1)..(329): Homolog of NCBI NO: 12484050 NR Description: quinone-oxidoreductase QR1 [Triphysaria
  misc_feature (6)..(329): Homolog of NCBI NO: 38016531 NR Description: fiber quinone-oxidoreductase [Gossypium
  misc_feature (5)..(328): Homolog of NCBI NO: 21742152 NR Description: OSJNBa0069D17.1 [Oryza sativa (japonica
  misc_feature (1)..(281): Homolog of NCBI NO: 5701738 NR Description: LEDI-4 protein [Lithospermum erythrorhizon]
  misc_feature (6)..(328): Homolog of NCBI NO: 32487602 NR Description: OSJNBa0034E24.2 [Oryza sativa (japonica
  misc_feature (6)..(328): Homolog of NCBI NO: 38346453 NR Description: OSJNBa0018J19.14 [Oryza sativa (japonica
  misc_feature (6)..(328): Homolog of NCBI NO: 38346442 NR Description: OSJNBa0018J19.3 [Oryza sativa (japonica
  misc_feature (6)..(328): Homolog of NCBI NO: 38346450 NR Description: OSJNBa0018J19.11 [Oryza sativa (japonica

SEQ ID NO: 105367 - protein, 324 aa, Arabidopsis thaliana; identical to SEQ ID NO: 27335
  peptide (1)..(324): Ceres Seq. ID no. 13617067
  misc_feature (1)..(324): Homolog of NCBI NO: 15235549 NR Description: oxidoreductase, zinc-binding dehydrogenase family
  misc_feature (1)..(324): Homolog of NCBI NO: 24370984 NR Description: quinone-oxidoreductase homologue [Spinacia
  misc_feature (1)..(324): Homolog of NCBI NO: 12484050 NR Description: quinone-oxidoreductase QR1 [Triphysaria
  misc_feature (1)..(324): Homolog of NCBI NO: 38016531 NR Description: fiber quinone-oxidoreductase [Gossypium
  misc_feature (1)..(323): Homolog of NCBI NO: 21742152 NR Description: OSJNBa0069D17.1 [Oryza sativa (japonica
  misc_feature (1)..(276): Homolog of NCBI NO: 5701738 NR Description: LEDI-4 protein [Lithospermum erythrorhizon]
  misc_feature (1)..(323): Homolog of NCBI NO: 32487602 NR Description: OSJNBa0034E24.2 [Oryza sativa (japonica
  misc_feature (1)..(323): Homolog of NCBI NO: 38346453 NR Description: OSJNBa0018J19.14 [Oryza sativa (japonica
  misc_feature (1)..(323): Homolog of NCBI NO: 38346442 NR Description: OSJNBa0018J19.3 [Oryza sativa (japonica
  misc_feature (1)..(323): Homolog of NCBI NO: 38346450 NR Description: OSJNBa0018J19.11 [Oryza sativa (japonica

SEQ ID NO: 105368 - protein, 274 aa, Arabidopsis thaliana; identical to SEQ ID NO: 27336
  peptide (1)..(274): Ceres Seq. ID no. 13617068
  misc_feature (1)..(274): Homolog of NCBI NO: 15235549 NR Description: oxidoreductase, zinc-binding dehydrogenase family
  misc_feature (1)..(274): Homolog of NCBI NO: 24370984 NR Description: quinone-oxidoreductase homologue [Spinacia
  misc_feature (1)..(274): Homolog of NCBI NO: 12484050 NR Description: quinone-oxidoreductase QR1 [Triphysaria
  misc_feature (1)..(274): Homolog of NCBI NO: 38016531 NR Description: fiber quinone-oxidoreductase [Gossypium
  misc_feature (1)..(273): Homolog of NCBI NO: 21742152 NR Description: OSJNBa0069D17.1 [Oryza sativa (japonica
  misc_feature (1)..(226): Homolog of NCBI NO: 5701738 NR Description: LEDI-4 protein [Lithospermum erythrorhizon]
  misc_feature (1)..(273): Homolog of NCBI NO: 32487602 NR Description: OSJNBa0034E24.2 [Oryza sativa (japonica
  misc_feature (1)..(273): Homolog of NCBI NO: 38346453 NR Description: OSJNBa0018J19.14 [Oryza sativa (japonica
  misc_feature (1)..(273): Homolog of NCBI NO: 38346442 NR Description: OSJNBa0018J19.3 [Oryza sativa (japonica
  misc_feature (1)..(273): Homolog of NCBI NO: 38346450 NR Description: OSJNBa0018J19.11 [Oryza sativa (japonica

SEQ ID NO: 105369 - DNA, 922 bp, Arabidopsis thaliana
  misc_feature (1)..(922): Ceres Seq. ID no. 13617077
  misc_feature: MA Experiment ID: 108434 Result: Down-regulated in Transcription
  misc_feature: MA Experiment 108434 PARAMETER Experiment Name: At_Root_Tips_cDNA_P Parameter: Tissue Value: Root Tips
  misc_feature: MA Experiment ID: 108435 Result: Down-regulated in Transcription
  misc_feature: MA Experiment 108435 PARAMETER Experiment Name: At_stm_Mutants_cDNA_P Parameter: Plant Line Value: wt Landsburg vs stm
  misc_feature: MA Experiment 108435 PARAMETER Experiment Name: At_stm_Mutants_cDNA_P Parameter: Tissue Value: Shoot Apical Meristem Region
  misc_feature: MA Experiment ID: 108461 Result: Down-regulated in Transcription
  misc_feature: MA Experiment 108461 PARAMETER Experiment Name: At_Germinating_Seeds_cDNA_P Parameter: Age (day) Value: 1 vs. 0
  misc_feature: MA Experiment 108461 PARAMETER Experiment Name: At_Germinating_Seeds_cDNA_P Parameter: Tissue Value: Germinating Seeds
  misc_feature: MA Experiment ID: 108462 Result: Up-regulated in Transcription
  misc_feature: MA Experiment 108462 PARAMETER Experiment Name: At_Germinating_Seeds_cDNA_P Parameter: Age (day) Value: 2 vs. 0
  misc_feature: MA Experiment 108462 PARAMETER Experiment Name: At_Germinating_Seeds_cDNA_P Parameter: Tissue Value: Germinating Seeds
  misc_feature: MA Experiment ID: 108463 Result: Up-regulated in Transcription
  misc_feature: MA Experiment 108463 PARAMETER Experiment Name: At_Germinating_Seeds_cDNA_P Parameter: Age (day) Value: 3 vs. 0
  misc_feature: MA Experiment 108463 PARAMETER Experiment Name: At_Germinating_Seeds_cDNA_P Parameter: Tissue Value: Germinating Seeds
  misc_feature: MA Experiment ID: 108464 Result: Up-regulated in Transcription
  misc_feature: MA Experiment 108464 PARAMETER Experiment Name: At_Germinating_Seeds_cDNA_P Parameter: Age (day) Value: 4 vs. 0
  misc_feature: MA Experiment 108464 PARAMETER Experiment Name: At_Germinating_Seeds_cDNA_P Parameter: Tissue Value: Germinating Seeds
  misc_feature: MA Experiment ID: 108469 Result: Up-regulated in Transcription
  misc_feature: MA Experiment ID: 20000070 Result: Up-regulated in Transcription
  misc_feature: MA Experiment 20000070 PARAMETER Experiment Name: At_100uM_ABA_Mutants_cDNA_P Parameter: Plant Line Value: CS24
  misc_feature: MA Experiment 20000070 PARAMETER Experiment Name: At_100uM_ABA_Mutants_cDNA_P Parameter: Timepoint (hr) Value: 6
  misc_feature: MA Experiment 20000070 PARAMETER Experiment Name: At_100uM_ABA_Mutants_cDNA_P Parameter: Tissue Value: Aerial
  misc_feature: MA Experiment 20000070 PARAMETER Experiment Name: At_100uM_ABA_Mutants_cDNA_P Parameter: Treatment Value: 100uM ABA vs. No Treatment
  misc_feature: MA Experiment ID: 20000071 Result: Up-regulated in Transcription
  misc_feature: MA Experiment 20000071 PARAMETER Experiment Name: At_100uM_ABA_Mutants_cDNA_P Parameter: Plant Line Value: CS8104
  misc_feature: MA Experiment 20000071 PARAMETER Experiment Name: At_100uM_ABA_Mutants_cDNA_P Parameter: Timepoint (hr) Value: 6
  misc_feature: MA Experiment 20000071 PARAMETER Experiment Name: At_100uM_ABA_Mutants_cDNA_P Parameter: Tissue Value: Aerial
  misc_feature: MA Experiment 20000071 PARAMETER Experiment Name: At_100uM_ABA_Mutants_cDNA_P Parameter: Treatment Value: 100uM ABA vs. No Treatment
  misc_feature: MA Experiment ID: 20000089 Result: Up-regulated in Transcription
  misc_feature: MA Experiment ID: 20000090 Result: Up-regulated in Transcription
  misc_feature: MA Experiment ID: 20000117 Result: Up-regulated in Transcription
  misc_feature: MA Experiment 20000117 PARAMETER Experiment Name: At_100uM_ABA_Mutants_cDNA_P Parameter: Plant Line Value: Columbia
  misc_feature: MA Experiment 20000117 PARAMETER Experiment Name: At_100uM_ABA_Mutants_cDNA_P Parameter: Timepoint (hr) Value: 6
  misc_feature: MA Experiment 20000117 PARAMETER Experiment Name: At_100uM_ABA_Mutants_cDNA_P Parameter: Tissue Value: Aerial
  misc_feature: MA Experiment 20000117 PARAMETER Experiment Name: At_100uM_ABA_Mutants_cDNA_P Parameter: Treatment Value: 100uM ABA vs. No Treatment
  misc_feature: MA Experiment ID: 20000179 Result: Down-regulated in Transcription
  misc_feature: MA Experiment 20000179 PARAMETER Experiment Name: At_Germinating_Seeds_P Parameter: Age (hr) Value: 6 vs. 0
  misc_feature: MA Experiment 20000179 PARAMETER Experiment Name: At_Germinating_Seeds_P Parameter: Tissue Value: Germinating Seeds
  misc_feature: MA Experiment ID: 20000182 Result: Up-regulated in Transcription
  misc_feature: MA Experiment 20000182 PARAMETER Experiment Name: At_2mM_SA_P Parameter: Age (day) Value: 14
  misc_feature: MA Experiment 20000182 PARAMETER Experiment Name: At_2mM_SA_P Parameter: Organism Value: A. thaliana
  misc_feature: MA Experiment 20000182 PARAMETER Experiment Name: At_2mM_SA_P Parameter: Plant Line Value: WS
  misc_feature: MA Experiment 20000182 PARAMETER Experiment Name: At_2mM_SA_P Parameter: Timepoint (hr) Value: 6
  misc_feature: MA Experiment 20000182 PARAMETER Experiment Name: At_2mM_SA_P Parameter: Tissue Value: Aerial
  misc_feature: MA Experiment 20000182 PARAMETER Experiment Name: At_2mM_SA_P Parameter: Treatment Value: 2mM SA vs. No Treatment
  misc_feature: MA Experiment ID: 20000185 Result: Up-regulated in Transcription
  misc_feature: MA Experiment 20000185 PARAMETER Experiment Name: At_Roots__P Parameter: Age (day) Value: 7 vs. 21
  misc_feature: MA Experiment 20000185 PARAMETER Experiment Name: At_Roots__P Parameter: Organism Value: A. thaliana
  misc_feature: MA Experiment 20000185 PARAMETER Experiment Name: At_Roots__P Parameter: Tissue Value: Roots vs. Whole Plant
  misc_feature: MA Experiment ID: 20000227 Result: Up-regulated in Transcription
  misc_feature: MA Experiment 20000227 PARAMETER Experiment Name: At_Root-Tips-vs-Tops_P Parameter: Tissue Value: Root Tips vs. Root Tops
  misc_feature: MA Experiment ID: 20000234 Result: Down-regulated in Transcription
  misc_feature: MA Experiment 20000234 PARAMETER Experiment Name: At_Siliques_P Parameter: Age (day) Value: 21
  misc_feature: MA Experiment 20000234 PARAMETER Experiment Name: At_Siliques_P Parameter: Organism Value: A. thaliana
  misc_feature: MA Experiment 20000234 PARAMETER Experiment Name: At_Siliques_P Parameter: Plant Line Value: WS
  misc_feature: MA Experiment 20000234 PARAMETER Experiment Name: At_Siliques_P Parameter: Tissue Value: Less Than 5mm Siliques vs. Whole Plant
  misc_feature: MA Experiment ID: 20000235 Result: Down-regulated in Transcription
  misc_feature: MA Experiment 20000235 PARAMETER Experiment Name: At_Siliques_P Parameter: Age (day) Value: 21
  misc_feature: MA Experiment 20000235 PARAMETER Experiment Name: At_Siliques_P Parameter: Organism Value: A. thaliana
  misc_feature: MA Experiment 20000235 PARAMETER Experiment Name: At_Siliques_P Parameter: Plant Line Value: WS
  misc_feature: MA Experiment 20000235 PARAMETER Experiment Name: At_Siliques_P Parameter: Tissue Value: 5-10mm Siliques vs. Whole Plant
  misc_feature: MA Experiment ID: 20000264 Result: Down-regulated in Transcription
  misc_feature: MA Experiment 20000264 PARAMETER Experiment Name: At_Open_Flower_P Parameter: Age (day) Value: 21
  misc_feature: MA Experiment 20000264 PARAMETER Experiment Name: At_Open_Flower_P Parameter: Plant Line Value: WS
  misc_feature: MA Experiment 20000264 PARAMETER Experiment Name: At_Open_Flower_P Parameter: Tissue Value: Open Flower vs. Whole Plant
  misc_feature: MA Experiment ID: 20000265 Result: Down-regulated in Transcription
  misc_feature: MA Experiment 20000265 PARAMETER Experiment Name: At_Open_Flower_P Parameter: Age (day) Value: 21
  misc_feature: MA Experiment 20000265 PARAMETER Experiment Name: At_Open_Flower_P Parameter: Plant Line Value: WS
  misc_feature: MA Experiment 20000265 PARAMETER Experiment Name: At_Open_Flower_P Parameter: Tissue Value: Closed Flower vs. Whole Plant
  misc_feature: MA Experiment ID: 20000286 Result: Down-regulated in Transcription
  misc_feature: MA Experiment 20000286 PARAMETER Experiment Name: At_Open_Flower_P Parameter: Age (day) Value: 21
  misc_feature: MA Experiment 20000286 PARAMETER Experiment Name: At_Open_Flower_P Parameter: Plant Line Value: WS
  misc_feature: MA Experiment 20000286 PARAMETER Experiment Name: At_Open_Flower_P Parameter: Tissue Value: Half Open vs. Whole Plant
  misc_feature: MA Experiment ID: 20000439 Result: Up-regulated in Transcription
  misc_feature: MA Experiment 20000439 PARAMETER Experiment Name: At_Roots__P Parameter: Age (day) Value: 14 vs. 21
  misc_feature: MA Experiment 20000439 PARAMETER Experiment Name: At_Roots__P Parameter: Organism Value: A. thaliana
  misc_feature: MA Experiment 20000439 PARAMETER Experiment Name: At_Roots__P Parameter: Tissue Value: Roots vs. Whole Plant
  misc_feature: MA Experiment ID: 20000456 Result: Up-regulated in Transcription
  misc_feature: MA Experiment 20000456 PARAMETER Experiment Name: At_100uM_BA_P Parameter: Age (day) Value: 14
  misc_feature: MA Experiment 20000456 PARAMETER Experiment Name: At_100uM_BA_P Parameter: Organism Value: A. thaliana
  misc_feature: MA Experiment 20000456 PARAMETER Experiment Name: At_100uM_BA_P Parameter: Plant Line Value: WS
  misc_feature: MA Experiment 20000456 PARAMETER Experiment Name: At_100uM_BA_P Parameter: Timepoint (hr) Value: 6
  misc_feature: MA Experiment 20000456 PARAMETER Experiment Name: At_100uM_BA_P Parameter: Tissue Value: Aerial
  misc_feature: MA Experiment 20000456 PARAMETER Experiment Name: At_100uM_BA_P Parameter: Treatment Value: 100uM BA vs. No Treatment
  misc_feature: MA Experiment ID: 20000573 Result: Up-regulated in Transcription
  misc_feature: MA Experiment 20000573 PARAMETER Experiment Name: At_100uM_ABA_Mutants__P Parameter: Organism Value: A. thaliana
  misc_feature: MA Experiment 20000573 PARAMETER Experiment Name: At_100uM_ABA_Mutants__P Parameter: Plant Line Value: CS22 vs. Ler wt
  misc_feature: MA Experiment 20000573 PARAMETER Experiment Name: At_100uM_ABA_Mutants__P Parameter: Timepoint (hr) Value: N/A
  misc_feature: MA Experiment 20000573 PARAMETER Experiment Name: At_100uM_ABA_Mutants__P Parameter: Tissue Value: Whole Plant
  misc_feature: MA Experiment 20000573 PARAMETER Experiment Name: At_100uM_ABA_Mutants__P Parameter: Treatment Value: None
  misc_feature: MA Experiment ID: 20000574 Result: Up-regulated in Transcription
  misc_feature: MA Experiment 20000574 PARAMETER Experiment Name: At_100uM_ABA_Mutants__P Parameter: Organism Value: A. thaliana
  misc_feature: MA Experiment 20000574 PARAMETER Experiment Name: At_100uM_ABA_Mutants__P Parameter: Plant Line Value: CS23 vs. Ler wt
  misc_feature: MA Experiment 20000574 PARAMETER Experiment Name: At_100uM_ABA_Mutants__P Parameter: Timepoint (hr) Value: N/A
  misc_feature: MA Experiment 20000574 PARAMETER Experiment Name: At_100uM_ABA_Mutants__P Parameter: Tissue Value: Whole Plant
  misc_feature: MA Experiment 20000574 PARAMETER Experiment Name: At_100uM_ABA_Mutants__P Parameter: Treatment Value: None
  misc_feature: MA Experiment ID: 20000709 Result: Up-regulated in Transcription
  misc_feature: MA Experiment 20000709 PARAMETER Experiment Name: At_15mM_NH4NO3_L-to-H_P Parameter: Age (hr) Value: 14
  misc_feature: MA Experiment 20000709 PARAMETER Experiment Name: At_15mM_NH4NO3_L-to-H_P Parameter: Organism Value: A. thaliana
  misc_feature: MA Experiment 20000709 PARAMETER Experiment Name: At_15mM_NH4NO3_L-to-H_P Parameter: Plant Line Value: WS
  misc_feature: MA Experiment 20000709 PARAMETER Experiment Name: At_15mM_NH4NO3_L-to-H_P Parameter: Timepoint (hr) Value: 4
  misc_feature: MA Experiment 20000709 PARAMETER Experiment Name: At_15mM_NH4NO3_L-to-H_P Parameter: Tissue Value: Aerial
  misc_feature: MA Experiment 20000709 PARAMETER Experiment Name: At_15mM_NH4NO3_L-to-H_P Parameter: Treatment Value: 15mM NH4NO3 vs. 30mM Mannitol
  misc_feature: MA Experiment ID: 20000794 Result: Down-regulated in Transcription
  misc_feature: MA Experiment 20000794 PARAMETER Experiment Name: At_Petals_P Parameter: Age (day) Value: 23-25 days
  misc_feature: MA Experiment 20000794 PARAMETER Experiment Name: At_Petals_P Parameter: Plant Line Value: WS
  misc_feature: MA Experiment 20000794 PARAMETER Experiment Name: At_Petals_P Parameter: Tissue Value: Petals vs. Whole plant
  misc_feature: MA Experiment ID: 20001451 Result: Up-regulated in Transcription
  misc_feature: MA Experiment 20001451 PARAMETER Experiment Name: At_Far-red-induction_P Parameter: Age (day) Value: 7
  misc_feature: MA Experiment 20001451 PARAMETER Experiment Name: At_Far-red-induction_P Parameter: Light Value: Far-red vs. White
  misc_feature: MA Experiment 20001451 PARAMETER Experiment Name: At_Far-red-induction_P Parameter: Organism Value: A. thaliana
  misc_feature: MA Experiment 20001451 PARAMETER Experiment Name: At_Far-red-induction_P Parameter: Plant Line Value: Columbia
  misc_feature: MA Experiment 20001451 PARAMETER Experiment Name: At_Far-red-induction_P Parameter: Timepoint (hr) Value: 24
  misc_feature: MA Experiment 20001451 PARAMETER Experiment Name: At_Far-red-induction_P Parameter: Tissue Value: Whole Plant
  misc_feature: MA Experiment ID: 20001457 Result: Down-regulated in Transcription
  misc_feature: MA Experiment 20001457 PARAMETER Experiment Name: At_50mM_NH4NO3_L-to-H_P Parameter: Age (day) Value: Undefined
  misc_feature: MA Experiment 20001457 PARAMETER Experiment Name: At_50mM_NH4NO3_L-to-H_P Parameter: Organism Value: Undefined
  misc_feature: MA Experiment 20001457 PARAMETER Experiment Name: At_50mM_NH4NO3_L-to-H_P Parameter: Plant Line Value: Undefined
  misc_feature: MA Experiment 20001457 PARAMETER Experiment Name: At_50mM_NH4NO3_L-to-H_P Parameter: Timepoint (hr) Value: 0.5
  misc_feature: MA Experiment 20001457 PARAMETER Experiment Name: At_50mM_NH4NO3_L-to-H_P Parameter: Tissue Value: Siliques
  misc_feature: MA Experiment 20001457 PARAMETER Experiment Name: At_50mM_NH4NO3_L-to-H_P Parameter: Treatment Value: 50mM NH4NO3 vs. 100mM Manitol
  misc_feature: MA Experiment ID: 20001557 Result: Up-regulated in Transcription
  misc_feature: MA Experiment 20001557 PARAMETER Experiment Name: At_Drought_Soil_Dry_P Parameter: Age (day) Value: 27
  misc_feature: MA Experiment 20001557 PARAMETER Experiment Name: At_Drought_Soil_Dry_P Parameter: Organism Value: A. thaliana
  misc_feature: MA Experiment 20001557 PARAMETER Experiment Name: At_Drought_Soil_Dry_P Parameter: Plant Line Value: WS
  misc_feature: MA Experiment 20001557 PARAMETER Experiment Name: At_Drought_Soil_Dry_P Parameter: Post Timepoint (hr) Value: 3
  misc_feature: MA Experiment 20001557 PARAMETER Experiment Name: At_Drought_Soil_Dry_P Parameter: Post-Treatment Value: Re-Water vs. No Drought
  misc_feature: MA Experiment 20001557 PARAMETER Experiment Name: At_Drought_Soil_Dry_P Parameter: Timepoint (day) Value: 13
  misc_feature: MA Experiment 20001557 PARAMETER Experiment Name: At_Drought_Soil_Dry_P Parameter: Treatment Value: Drought vs. No Drought
  misc_feature: MA Experiment ID: 20001559 Result: Down-regulated in Transcription
  misc_feature: MA Experiment 20001559 PARAMETER Experiment Name: At_Drought_Soil_Dry_P Parameter: Age (day) Value: 28
  misc_feature: MA Experiment 20001559 PARAMETER Experiment Name: At_Drought_Soil_Dry_P Parameter: Organism Value: A. thaliana
  misc_feature: MA Experiment 20001559 PARAMETER Experiment Name: At_Drought_Soil_Dry_P Parameter: Plant Line Value: WS
  misc_feature: MA Experiment 20001559 PARAMETER Experiment Name: At_Drought_Soil_Dry_P Parameter: Post Timepoint (hr) Value: 29
  misc_feature: MA Experiment 20001559 PARAMETER Experiment Name: At_Drought_Soil_Dry_P Parameter: Post-Treatment Value: Re-Water vs. No Drought
  misc_feature: MA Experiment 20001559 PARAMETER Experiment Name: At_Drought_Soil_Dry_P Parameter: Timepoint (day) Value: 14
  misc_feature: MA Experiment 20001559 PARAMETER Experiment Name: At_Drought_Soil_Dry_P Parameter: Treatment Value: Drought vs. No Drought
  misc_feature: MA Experiment ID: 20001560 Result: Up-regulated in Transcription
  misc_feature: MA Experiment 20001560 PARAMETER Experiment Name: At_Drought_Soil_Dry_P Parameter: Age (day) Value: 28
  misc_feature: MA Experiment 20001560 PARAMETER Experiment Name: At_Drought_Soil_Dry_P Parameter: Organism Value: A. thaliana
  misc_feature: MA Experiment 20001560 PARAMETER Experiment Name: At_Drought_Soil_Dry_P Parameter: Plant Line Value: WS
  misc_feature: MA Experiment 20001560 PARAMETER Experiment Name: At_Drought_Soil_Dry_P Parameter: Post Timepoint (hr) Value: None
  misc_feature: MA Experiment 20001560 PARAMETER Experiment Name: At_Drought_Soil_Dry_P Parameter: Post-Treatment Value: None
  misc_feature: MA Experiment 20001560 PARAMETER Experiment Name: At_Drought_Soil_Dry_P Parameter: Timepoint (day) Value: 14
  misc_feature: MA Experiment 20001560 PARAMETER Experiment Name: At_Drought_Soil_Dry_P Parameter: Treatment Value: Drought vs. No Drought
aaaaattcagaggaaaaaaaacacgatcgagaaatggagaataatccaagaagctcatcgtctctccctctagccgggcgtgtagctatagtgaccggagccaccagaggcatgggccgtgaaatcgcgattcacctccactctcttggtgcaagagtcaccatcaattatgtctcgagctcatcaaaagctgaactcttggtttcagaactaaacgactcatctcaattaaagtcagcgatcgcagttaaagcagatgtgtcagacccggaccagatcaacaacttgtttgatcaaacagaacaagagttcggatctaaagttcacatcgtcgtgaattgtgcaggtgttttggatccaaagtatccatctttatccgagacgacactagaagatttcgataacacattcacaataaacacaagagggtctttcttgtgttgcaaggaagcagctaaaagggttatgagaggaggtggtggaagaatcattatgatgtctacatcaatggttggtggtctcgccccgggttatggagtttacgcagcatcaaaggccgccgttgagacaatggtgaaagtgttggcgaaggagcttaagggaagccggataaccgcgaattgcgtggcgccagggccggttgcgacggagatgttttatgctggaaagagtgatgaaacggtgaaaatgcttgcaggggcttgtcctatggggaggatcggtgagtcaaaggatataaccgagattgtagggtttttggccggtgatggtggtgaatggattaacggtcaagttattagagccaatggaggctttgttgtctaataaatgaagaactaacattggaatttgatgttgtcttcttcttttcgtgtgttgatctacttttatgtcaatgatgatgagttgtttattgggcaag

SEQ ID NO: 105370 - protein, 274 aa, Arabidopsis thaliana; identical to SEQ ID NO: 25824
  peptide (1)..(274): Ceres Seq. ID no. 13617078
  misc_feature (12)..(274): Homolog of NCBI NO: 15235621 NR Description: short-chain dehydrogenase/reductase family protein
  misc_feature (18)..(273): Homolog of NCBI NO: 15229203 NR Description: short-chain dehydrogenase/reductase family protein
  misc_feature (18)..(273): Homolog of NCBI NO: 9758903 NR Description: Brn1-like protein [Arabidopsis thaliana]
  misc_feature (18)..(258): Homolog of NCBI NO: 30686710 NR Description: short-chain dehydrogenase/reductase family
  misc_feature (19)..(271): Homolog of NCBI NO: 34395018 NR Description: putative short-chain dehydrogenase/reductase
  misc_feature (18)..(271): Homolog of NCBI NO: 30679011 NR Description: short-chain type dehydrogenase/reductase -related
  misc_feature (14)..(273): Homolog of NCBI NO: 34393370 NR Description: putative short-chain dehydrogenase/reductase
  misc_feature (11)..(273): Homolog of NCBI NO: 1711355 NR Description: SHORT-CHAIN TYPE DEHYDROGENASE/REDUCTASE
  misc_feature (18)..(272): Homolog of NCBI NO: 37534988 NR Description: putative short-chain alcohol dehydrogenase [Oryza
  misc_feature (20)..(273): Homolog of NCBI NO: 34395019 NR Description: putative short-chain dehydrogenase/reductase

SEQ ID NO: 105371 - protein, 263 aa, Arabidopsis thaliana; identical to SEQ ID NO: 25825
  peptide (1)..(263): Ceres Seq. ID no. 13617079
  misc_feature (1)..(263): Homolog of NCBI NO: 15235621 NR Description: short-chain dehydrogenase/reductase family protein
  misc_feature (7)..(262): Homolog of NCBI NO: 15229203 NR Description: short-chain dehydrogenase/reductase family protein
  misc_feature (7)..(262): Homolog of NCBI NO: 9758903 NR Description: Brn1-like protein [Arabidopsis thaliana]
  misc_feature (7)..(247): Homolog of NCBI NO: 30686710 NR Description: short-chain dehydrogenase/reductase family
  misc_feature (8)..(260): Homolog of NCBI NO: 34395018 NR Description: putative short-chain dehydrogenase/reductase
  misc_feature (7)..(260): Homolog of NCBI NO: 30679011 NR Description: short-chain type dehydrogenase/reductase -related
  misc_feature (3)..(262): Homolog of NCBI NO: 34393370 NR Description: putative short-chain dehydrogenase/reductase
  misc_feature (1)..(262): Homolog of NCBI NO: 1711355 NR Description: SHORT-CHAIN TYPE DEHYDROGENASE/REDUCTASE
  misc_feature (7)..(261): Homolog of NCBI NO: 37534988 NR Description: putative short-chain alcohol dehydrogenase [Oryza
  misc_feature (9)..(262): Homolog of NCBI NO: 34395019 NR Description: putative short-chain dehydrogenase/reductase

SEQ ID NO: 105372 - protein, 237 aa, Arabidopsis thaliana; identical to SEQ ID NO: 25826
  peptide (1)..(237): Ceres Seq. ID no. 13617080
  misc_feature (1)..(237): Homolog of NCBI NO: 15235621 NR Description: short-chain dehydrogenase/reductase family protein
  misc_feature (1)..(236): Homolog of NCBI NO: 15229203 NR Description: short-chain dehydrogenase/reductase family protein
  misc_feature (1)..(236): Homolog of NCBI NO: 9758903 NR Description: Brn1-like protein [Arabidopsis thaliana]
  misc_feature (1)..(221): Homolog of NCBI NO: 30686710 NR Description: short-chain dehydrogenase/reductase family
  misc_feature (1)..(234): Homolog of NCBI NO: 34395018 NR Description: putative short-chain dehydrogenase/reductase
  misc_feature (1)..(234): Homolog of NCBI NO: 30679011 NR Description: short-chain type dehydrogenase/reductase -related
  misc_feature (1)..(236): Homolog of NCBI NO: 34393370 NR Description: putative short-chain dehydrogenase/reductase
  misc_feature (1)..(236): Homolog of NCBI NO: 1711355 NR Description: SHORT-CHAIN TYPE DEHYDROGENASE/REDUCTASE
  misc_feature (1)..(235): Homolog of NCBI NO: 37534988 NR Description: putative short-chain alcohol dehydrogenase [Oryza
  misc_feature (1)..(236): Homolog of NCBI NO: 34395019 NR Description: putative short-chain dehydrogenase/reductase

SEQ ID NO: 105373 - DNA, 718 bp, Arabidopsis thaliana
  misc_feature (1)..(718): Ceres Seq. ID no. 13617085
  misc_feature: MA Experiment ID: 108433 Result: Up-regulated in Transcription
  misc_feature: MA Experiment 108433 PARAMETER Experiment Name: At_rhl_Mutant2_cDNA_P Parameter: Age (day) Value: 7
  misc_feature: MA Experiment 108433 PARAMETER Experiment Name: At_rhl_Mutant2_cDNA_P Parameter: Organism Value: A. thaliana
  misc_feature: MA Experiment 108433 PARAMETER Experiment Name: At_rhl_Mutant2_cDNA_P Parameter: Plant Line Value: rhl Mutant vs. wt landsburg
  misc_feature: MA Experiment 108433 PARAMETER Experiment Name: At_rhl_Mutant2_cDNA_P Parameter: Tissue Value: Roots
  misc_feature: MA Experiment ID: 108573 Result: Down-regulated in Transcription
  misc_feature: MA Experiment 108573 PARAMETER Experiment Name: At_Drought_cDNA_P Parameter: Timepoint (hr) Value: 6
  misc_feature: MA Experiment 108573 PARAMETER Experiment Name: At_Drought_cDNA_P Parameter: Tissue Value: Aerial
  misc_feature: MA Experiment 108573 PARAMETER Experiment Name: At_Drought_cDNA_P Parameter: Treatment Value: Drought vs. No Drought
  misc_feature: MA Experiment ID: 108585 Result: Down-regulated in Transcription
  misc_feature: MA Experiment 108585 PARAMETER Experiment Name: At_5mM_NaNP_cDNA_P Parameter: Timepoint (hr) Value: 6
  misc_feature: MA Experiment 108585 PARAMETER Experiment Name: At_5mM_NaNP_cDNA_P Parameter: Tissue Value: Aerial
  misc_feature: MA Experiment 108585 PARAMETER Experiment Name: At_5mM_NaNP_cDNA_P Parameter: Treatment Value: null
  misc_feature: MA Experiment ID: 108595 Result: Down-regulated in Transcription
  misc_feature: MA Experiment 108595 PARAMETER Experiment Name: At_Ler-pi_Ovule_cDNA_P Parameter: Plant Line Value: null
  misc_feature: MA Experiment ID: 20000113 Result: Up-regulated in Transcription
  misc_feature: MA Experiment 20000113 PARAMETER Experiment Name: At_42deg_Heat_cDNA_P Parameter: Temperature (deg C) Value: 42 vs. 22
  misc_feature: MA Experiment 20000113 PARAMETER Experiment Name: At_42deg_Heat_cDNA_P Parameter: Timepoint (hr) Value: 8
  misc_feature: MA Experiment 20000113 PARAMETER Experiment Name: At_42deg_Heat_cDNA_P Parameter: Tissue Value: Aerial
  misc_feature: MA Experiment ID: 20000184 Result: Down-regulated in Transcription
  misc_feature: MA Experiment 20000184 PARAMETER Experiment Name: At_Shoots__P Parameter: Age (day) Value: 7
  misc_feature: MA Experiment 20000184 PARAMETER Experiment Name: At_Shoots__P Parameter: Tissue Value: Shoots vs. Whole Plant
  misc_feature: MA Experiment ID: 20000185 Result: Down-regulated in Transcription
  misc_feature: MA Experiment 20000185 PARAMETER Experiment Name: At_Roots__P Parameter: Age (day) Value: 7 vs. 21
  misc_feature: MA Experiment 20000185 PARAMETER Experiment Name: At_Roots__P Parameter: Organism Value: A. thaliana
  misc_feature: MA Experiment 20000185 PARAMETER Experiment Name: At_Roots__P Parameter: Tissue Value: Roots vs. Whole Plant
  misc_feature: MA Experiment ID: 20000439 Result: Down-regulated in Transcription
  misc_feature: MA Experiment 20000439 PARAMETER Experiment Name: At_Roots__P Parameter: Age (day) Value: 14 vs. 21
  misc_feature: MA Experiment 20000439 PARAMETER Experiment Name: At_Roots__P Parameter: Organism Value: A. thaliana
  misc_feature: MA Experiment 20000439 PARAMETER Experiment Name: At_Roots__P Parameter: Tissue Value: Roots vs. Whole Plant
  misc_feature: MA Experiment ID: 20001557 Result: Down-regulated in Transcription
  misc_feature: MA Experiment 20001557 PARAMETER Experiment Name: At_Drought_Soil_Dry_P Parameter: Age (day) Value: 27
  misc_feature: MA Experiment 20001557 PARAMETER Experiment Name: At_Drought_Soil_Dry_P Parameter: Organism Value: A. thaliana
  misc_feature: MA Experiment 20001557 PARAMETER Experiment Name: At_Drought_Soil_Dry_P Parameter: Plant Line Value: WS
  misc_feature: MA Experiment 20001557 PARAMETER Experiment Name: At_Drought_Soil_Dry_P Parameter: Post Timepoint (hr) Value: 3
  misc_feature: MA Experiment 20001557 PARAMETER Experiment Name: At_Drought_Soil_Dry_P Parameter: Post-Treatment Value: Re-Water vs. No Drought
  misc_feature: MA Experiment 20001557 PARAMETER Experiment Name: At_Drought_Soil_Dry_P Parameter: Timepoint (day) Value: 13
  misc_feature: MA Experiment 20001557 PARAMETER Experiment Name: At_Drought_Soil_Dry_P Parameter: Treatment Value: Drought vs. No Drought
agagagacagagagagagatgagtagcttcacgattccatctccttcctccttctctctttccaattcatataatcaaacctctcctcattccttcactctccgcaattctcgttccaattttgagttccaccggttacgattagatgtggagtctcgaagaagaagcacttctttacggtccaattgctccaccaaaggtacagattcaggtgaaaatgagaacaaaagtgtgttagatgctttctttttggggaaagcattagctgaggttatcaatgagagaattgagtctactgttggagaagtgttgagtactattggaaagtttcaagctgagcaacagaaacaagttcaagagattcaggaagaggttcttgaaagagctaagaaagctaaggaaagagcagctcgagaaactatggaggaacaaggacttgttgcttccaaaccagtagccattactcgaaatccggatgctgttgttgttgcctctgtaacttctacatcgaccgttgagagcaagactataatggttgatgtagaggaaagctcgagttccagtgatgaagactgaacgatggtttcaagggtttaagttgaagatttggtaatagcagcagagacttgtctaaaagggttaagatatatgtacttgaaaaaacgatgtaaacaatgtaagttgatataaatcaaggttaaaccagcattgatacatg

SEQ ID NO: 105374 - protein, 191 aa, Arabidopsis thaliana
  peptide (1)..(191): Ceres Seq. ID no. 13617086
  misc_feature (7)..(191): Homolog of NCBI NO: 15235625 NR Description: expressed protein [Arabidopsis thaliana]
  misc_feature (7)..(191): Homolog of NCBI NO: 21553912 NR Description: unknown [Arabidopsis thaliana]
  misc_feature (78)..(136): Homolog of NCBI NO: 23130619 NR Description: hypothetical protein [Nostoc punctiforme]
  misc_feature (78)..(145): Homolog of NCBI NO: 17232006 NR Description: hypothetical protein [Nostoc sp. PCC 7120]
  misc_feature (78)..(168): Homolog of NCBI NO: 16330265 NR Description: unknown protein [Synechocystis sp. PCC 6803]
RETEREMSSFTIPSPSSFSLSNSYNQTSPHSFTLRNSRSNFEFHRLRLDVESRRRSTSLRSNCSTKGTDSGENENKSVLDAFFLGKALAEVINERIESTVGEVLSTIGKFQAEQQKQVQEIQEEVLERAKKAKERAARETMEEQGLVASKPVAITRNPDAVVVASVTSTSTVESKTIMVDVEESSSSSDED

SEQ ID NO: 105375 - protein, 185 aa, Arabidopsis thaliana; identical to SEQ ID NO: 30509
  peptide (1)..(185): Ceres Seq. ID no. 13617087
  misc_feature (1)..(185): Homolog of NCBI NO: 15235625 NR Description: expressed protein [Arabidopsis thaliana]
  misc_feature (1)..(185): Homolog of NCBI NO: 21553912 NR Description: unknown [Arabidopsis thaliana]
  misc_feature (72)..(130): Homolog of NCBI NO: 23130619 NR Description: hypothetical protein [Nostoc punctiforme]
  misc_feature (72)..(139): Homolog of NCBI NO: 17232006 NR Description: hypothetical protein [Nostoc sp. PCC 7120]
  misc_feature (72)..(162): Homolog of NCBI NO: 16330265 NR Description: unknown protein [Synechocystis sp. PCC 6803]

SEQ ID NO: 105376 - DNA, 1793 bp, Arabidopsis thaliana
  misc_feature (1)..(1793): Ceres Seq. ID no. 13617088
  misc_feature: MA Experiment ID: 20000169 Result: Up-regulated in Transcription
  misc_feature: MA Experiment 20000169 PARAMETER Experiment Name: At_100uM_ABA_P Parameter: Age (day) Value: 14
  misc_feature: MA Experiment 20000169 PARAMETER Experiment Name: At_100uM_ABA_P Parameter: Organism Value: A. thaliana
  misc_feature: MA Experiment 20000169 PARAMETER Experiment Name: At_100uM_ABA_P Parameter: Plant Line Value: WS
  misc_feature: MA Experiment 20000169 PARAMETER Experiment Name: At_100uM_ABA_P Parameter: Timepoint (hr) Value: 6
  misc_feature: MA Experiment 20000169 PARAMETER Experiment Name: At_100uM_ABA_P Parameter: Tissue Value: Aerial
  misc_feature: MA Experiment 20000169 PARAMETER Experiment Name: At_100uM_ABA_P Parameter: Treatment Value: 100uM ABA vs. No Treatment
  misc_feature: MA Experiment ID: 20000173 Result: Down-regulated in Transcription
  misc_feature: MA Experiment 20000173 PARAMETER Experiment Name: At_42deg_Heat_P Parameter: Age (day) Value: 14
  misc_feature: MA Experiment 20000173 PARAMETER Experiment Name: At_42deg_Heat_P Parameter: Organism Value: A. thaliana
  misc_feature: MA Experiment 20000173 PARAMETER Experiment Name: At_42deg_Heat_P Parameter: Plant Line Value: WS
  misc_feature: MA Experiment 20000173 PARAMETER Experiment Name: At_42deg_Heat_P Parameter: Temperature (deg C) Value: 42 vs. 22
  misc_feature: MA Experiment 20000173 PARAMETER Experiment Name: At_42deg_Heat_P Parameter: Timepoint (hr) Value: 6
  misc_feature: MA Experiment 20000173 PARAMETER Experiment Name: At_42deg_Heat_P Parameter: Tissue Value: Aerial
  misc_feature: MA Experiment ID: 20000180 Result: Up-regulated in Transcription
  misc_feature: MA Experiment 20000180 PARAMETER Experiment Name: At_Germinating_Seeds_P Parameter: Age (hr) Value: 24 vs. 0
  misc_feature: MA Experiment 20000180 PARAMETER Experiment Name: At_Germinating_Seeds_P Parameter: Tissue Value: Germinating Seeds
  misc_feature: MA Experiment ID: 20000184 Result: Down-regulated in Transcription
  misc_feature: MA Experiment 20000184 PARAMETER Experiment Name: At_Shoots__P Parameter: Age (day) Value: 7
  misc_feature: MA Experiment 20000184 PARAMETER Experiment Name: At_Shoots__P Parameter: Tissue Value: Shoots vs. Whole Plant
  misc_feature: MA Experiment ID: 20000185 Result: Down-regulated in Transcription
  misc_feature: MA Experiment 20000185 PARAMETER Experiment Name: At_Roots__P Parameter: Age (day) Value: 7 vs. 21
  misc_feature: MA Experiment 20000185 PARAMETER Experiment Name: At_Roots__P Parameter: Organism Value: A. thaliana
  misc_feature: MA Experiment 20000185 PARAMETER Experiment Name: At_Roots__P Parameter: Tissue Value: Roots vs. Whole Plant
  misc_feature: MA Experiment ID: 20000234 Result: Down-regulated in Transcription
  misc_feature: MA Experiment 20000234 PARAMETER Experiment Name: At_Siliques_P Parameter: Age (day) Value: 21
  misc_feature: MA Experiment 20000234 PARAMETER Experiment Name: At_Siliques_P Parameter: Organism Value: A. thaliana
  misc_feature: MA Experiment 20000234 PARAMETER Experiment Name: At_Siliques_P Parameter: Plant Line Value: WS
  misc_feature: MA Experiment 20000234 PARAMETER Experiment Name: At_Siliques_P Parameter: Tissue Value: Less Than 5mm Siliques vs. Whole Plant
  misc_feature: MA Experiment ID: 20000264 Result: Up-regulated in Transcription
  misc_feature: MA Experiment 20000264 PARAMETER Experiment Name: At_Open_Flower_P Parameter: Age (day) Value: 21
  misc_feature: MA Experiment 20000264 PARAMETER Experiment Name: At_Open_Flower_P Parameter: Plant Line Value: WS
  misc_feature: MA Experiment 20000264 PARAMETER Experiment Name: At_Open_Flower_P Parameter: Tissue Value: Open Flower vs. Whole Plant
  misc_feature: MA Experiment ID: 20000438 Result: Down-regulated in Transcription
  misc_feature: MA Experiment 20000438 PARAMETER Experiment Name: At_Shoots__P Parameter: Age (day) Value: 14
  misc_feature: MA Experiment 20000438 PARAMETER Experiment Name: At_Shoots__P Parameter: Tissue Value: Shoots vs. Whole Plant
  misc_feature: MA Experiment ID: 20000439 Result: Down-regulated in Transcription
  misc_feature: MA Experiment 20000439 PARAMETER Experiment Name: At_Roots__P Parameter: Age (day) Value: 14 vs. 21
  misc_feature: MA Experiment 20000439 PARAMETER Experiment Name: At_Roots__P Parameter: Organism Value: A. thaliana
  misc_feature: MA Experiment 20000439 PARAMETER Experiment Name: At_Roots__P Parameter: Tissue Value: Roots vs. Whole Plant
  misc_feature: MA Experiment ID: 20000453 Result: Up-regulated in Transcription
  misc_feature: MA Experiment 20000453 PARAMETER Experiment Name: At_100uM_ABA_P Parameter: Age (day) Value: 15
  misc_feature: MA Experiment 20000453 PARAMETER Experiment Name: At_100uM_ABA_P Parameter: Organism Value: A. thaliana
  misc_feature: MA Experiment 20000453 PARAMETER Experiment Name: At_100uM_ABA_P Parameter: Plant Line Value: WS
  misc_feature: MA Experiment 20000453 PARAMETER Experiment Name: At_100uM_ABA_P Parameter: Timepoint (hr) Value: 24
  misc_feature: MA Experiment 20000453 PARAMETER Experiment Name: At_100uM_ABA_P Parameter: Tissue Value: Aerial
  misc_feature: MA Experiment 20000453 PARAMETER Experiment Name: At_100uM_ABA_P Parameter: Treatment Value: 100uM ABA vs. No Treatment
  misc_feature: MA Experiment ID: 20000455 Result: Up-regulated in Transcription
  misc_feature: MA Experiment 20000455 PARAMETER Experiment Name: At_100uM_ABA_P Parameter: Age (day) Value: 16
  misc_feature: MA Experiment 20000455 PARAMETER Experiment Name: At_100uM_ABA_P Parameter: Organism Value: A. thaliana
  misc_feature: MA Experiment 20000455 PARAMETER Experiment Name: At_100uM_ABA_P Parameter: Plant Line Value: WS
  misc_feature: MA Experiment 20000455 PARAMETER Experiment Name: At_100uM_ABA_P Parameter: Timepoint (hr) Value: 48
  misc_feature: MA Experiment 20000455 PARAMETER Experiment Name: At_100uM_ABA_P Parameter: Tissue Value: Aerial
  misc_feature: MA Experiment 20000455 PARAMETER Experiment Name: At_100uM_ABA_P Parameter: Treatment Value: 100uM ABA vs. No Treatment
  misc_feature: MA Experiment ID: 20000456 Result: Down-regulated in Transcription
  misc_feature: MA Experiment 20000456 PARAMETER Experiment Name: At_100uM_BA_P Parameter: Age (day) Value: 14
  misc_feature: MA Experiment 20000456 PARAMETER Experiment Name: At_100uM_BA_P Parameter: Organism Value: A. thaliana
  misc_feature: MA Experiment 20000456 PARAMETER Experiment Name: At_100uM_BA_P Parameter: Plant Line Value: WS
  misc_feature: MA Experiment 20000456 PARAMETER Experiment Name: At_100uM_BA_P Parameter: Timepoint (hr) Value: 6
  misc_feature: MA Experiment 20000456 PARAMETER Experiment Name: At_100uM_BA_P Parameter: Tissue Value: Aerial
  misc_feature: MA Experiment 20000456 PARAMETER Experiment Name: At_100uM_BA_P Parameter: Treatment Value: 100uM BA vs. No Treatment
  misc_feature: MA Experiment ID: 20000460 Result: Down-regulated in Transcription
  misc_feature: MA Experiment 20000460 PARAMETER Experiment Name: At_10percent_PEG_P Parameter: Age (day) Value: 12
  misc_feature: MA Experiment 20000460 PARAMETER Experiment Name: At_10percent_PEG_P Parameter: Organism Value: A. thaliana
  misc_feature: MA Experiment 20000460 PARAMETER Experiment Name: At_10percent_PEG_P Parameter: Plant Line Value: WS
  misc_feature: MA Experiment 20000460 PARAMETER Experiment Name: At_10percent_PEG_P Parameter: Timepoint (day) Value: 12
  misc_feature: MA Experiment 20000460 PARAMETER Experiment Name: At_10percent_PEG_P Parameter: Tissue Value: Whole Plant
  misc_feature: MA Experiment 20000460 PARAMETER Experiment Name: At_10percent_PEG_P Parameter: Treatment Value: 10percent PEG vs. No Treatment
  misc_feature: MA Experiment ID: 20000527 Result: Down-regulated in Transcription
  misc_feature: MA Experiment 20000527 PARAMETER Experiment Name: At_10percent_PEG_P Parameter: Age (day) Value: 20
  misc_feature: MA Experiment 20000527 PARAMETER Experiment Name: At_10percent_PEG_P Parameter: Organism Value: A. thaliana
  misc_feature: MA Experiment 20000527 PARAMETER Experiment Name: At_10percent_PEG_P Parameter: Plant Line Value: WS
  misc_feature: MA Experiment 20000527 PARAMETER Experiment Name: At_10percent_PEG_P Parameter: Timepoint (day) Value: 20
  misc_feature: MA Experiment 20000527 PARAMETER Experiment Name: At_10percent_PEG_P Parameter: Tissue Value: Whole Plant
  misc_feature: MA Experiment 20000527 PARAMETER Experiment Name: At_10percent_PEG_P Parameter: Treatment Value: 10percent PEG vs. No Treatment
  misc_feature: MA Experiment ID: 20000794 Result: Up-regulated in Transcription
  misc_feature: MA Experiment 20000794 PARAMETER Experiment Name: At_Petals_P Parameter: Age (day) Value: 23-25 days
  misc_feature: MA Experiment 20000794 PARAMETER Experiment Name: At_Petals_P Parameter: Plant Line Value: WS
  misc_feature: MA Experiment 20000794 PARAMETER Experiment Name: At_Petals_P Parameter: Tissue Value: Petals vs. Whole plant
  misc_feature: MA Experiment ID: 20001247 Result: Down-regulated in Transcription
  misc_feature: MA Experiment 20001247 PARAMETER Experiment Name: At_Far-red-induction_P Parameter: Age (day) Value: 7
  misc_feature: MA Experiment 20001247 PARAMETER Experiment Name: At_Far-red-induction_P Parameter: Light Value: Far-red vs. White
  misc_feature: MA Experiment 20001247 PARAMETER Experiment Name: At_Far-red-induction_P Parameter: Organism Value: A. thaliana
  misc_feature: MA Experiment 20001247 PARAMETER Experiment Name: At_Far-red-induction_P Parameter: Plant Line Value: Columbia
  misc_feature: MA Experiment 20001247 PARAMETER Experiment Name: At_Far-red-induction_P Parameter: Timepoint (hr) Value: 1
  misc_feature: MA Experiment 20001247 PARAMETER Experiment Name: At_Far-red-induction_P Parameter: Tissue Value: Whole Plant
  misc_feature: MA Experiment ID: 20001904 Result: Up-regulated in Transcription
  misc_feature: MA Experiment 20001904 PARAMETER Experiment Name: At_Drought_Reproduction_P Parameter: Age (day) Value: 37
  misc_feature: MA Experiment 20001904 PARAMETER Experiment Name: At_Drought_Reproduction_P Parameter: Organism Value: A. thaliana
  misc_feature: MA Experiment 20001904 PARAMETER Experiment Name: At_Drought_Reproduction_P Parameter: Plant Line Value: WS
  misc_feature: MA Experiment 20001904 PARAMETER Experiment Name: At_Drought_Reproduction_P Parameter: Timepoint (day) Value: 7
  misc_feature: MA Experiment 20001904 PARAMETER Experiment Name: At_Drought_Reproduction_P Parameter: Tissue Value: Rosettes
  misc_feature: MA Experiment 20001904 PARAMETER Experiment Name: At_Drought_Reproduction_P Parameter: Treatment Value: Drought vs. No Drought
  misc_feature: MA Experiment ID: 20001905 Result: Up-regulated in Transcription
  misc_feature: MA Experiment 20001905 PARAMETER Experiment Name: At_Drought_Reproduction_P Parameter: Age (day) Value: 40
  misc_feature: MA Experiment 20001905 PARAMETER Experiment Name: At_Drought_Reproduction_P Parameter: Organism Value: A. thaliana
  misc_feature: MA Experiment 20001905 PARAMETER Experiment Name: At_Drought_Reproduction_P Parameter: Plant Line Value: WS
  misc_feature: MA Experiment 20001905 PARAMETER Experiment Name: At_Drought_Reproduction_P Parameter: Timepoint (day) Value: 10
  misc_feature: MA Experiment 20001905 PARAMETER Experiment Name: At_Drought_Reproduction_P Parameter: Tissue Value: Rosettes
  misc_feature: MA Experiment 20001905 PARAMETER Experiment Name: At_Drought_Reproduction_P Parameter: Treatment Value: Drought vs. No Drought
aaatatctaacaatctatcttttgggtccctaaaaaagctccttcgtttatcttgttttctaagttatctttttgtatgagtttcaaagcttatcattatctcactcttcttccatagctatgactactttaacgaagattcaagtgtacccacaagtcttggagcaccgtctcttcttcagagatccgatacgggtcgggtcaagattgacttgtagagaacgtagtaatagggtttatgtgcatcggtgtgagaaaaaagttgaaagaaagagaaaagttgagaaatttaagggaaatgggtcgtgggattctttgaaatctgggtttttagggtttagtaaattagggttcttgtctaaagatgagtataatcagaaagttgaaaacttggagatggttttctcttcggttgctgttcaaattgcgagatacattgtgacgatgacaagtactggagctattcttttgattgggtttcaattatcaggtggagatagttcgatgaactcattggtttggtatagttggcttggtggaattatcattggaaccatgactggtgctaacatggttttggaagatcattatcgagccggtccacggaatgttgttataaccggaagcactaggggactagggaaagctcttgctagagagtttcttctctctggagacagagtcattgtcacatctcgcagttctgaatctgttgatatgactgtcaaagagctagagcaaaatctcaaagagattatgagtaacgctagcgagtcagctagaaagaaactgagtgatgctaaggtagttggtattgcctgtgatgtttgcaaacccgaagacgttgagaagctgtcgaatttcgctgtaaaagagcttggttccatcaacatatggataaacaatgctggtactaacaaaggttttagaccgctactcgagttcacggaagaagatatcacacagattgtctccacaaatttgattggatcaattctatgtacacgaggggctatggatgtgatgagcagacagcacagtggtggacacatctttaacatggatggtgctggctctggaggttcaagtactcctctcactgccgtatatggttcaacaaaatgtggacttaggcagtttcatgggtctatagtgaaagaaagccaaaaaacaaacgttggccttcacactgcatcccctggcatggttctgacagaacttcttctcagtggttcgagcattaaaaacaagcagatgtttaacataatctgtgagcttcctgagacagtagctagaactttggtaccacgaatgcgagttgtgaaaggttcgggaaaagccgtcaattacctaactcctcctcggatattgttagctattgtcacttcctggctaaggagaggccgatggtttgatgaccaaggacgggcgttatatgcagcagaagcagatagactaaggaactgggcagagaacaggacgaggttgtcgttaacagacgcgatggagatgtatacagagaatacttgggtctctgttttctctctttctgttgtttgcgctttcatcatcttacaaagcacaacacctagctcttttccaggcacataacaaacatcttcctcggatgtgttttaagaaaattgtaaacgtacatgttatgtataaaaaacatatatataacagaaccgatttgttcatgtaaacacttcttatagttgtagaatgtgtcgttgttgaaaacaatgaaaaaatagattgtaataaacttttatcagattgtagtattttct

SEQ ID NO: 105377 - protein, 496 aa, Arabidopsis thaliana; identical to SEQ ID NO: 39043
  peptide (1)..(496): Ceres Seq. ID no. 13617089
  misc_feature (1)..(496): Homolog of NCBI NO: 18413962 NR Description: short-chain dehydrogenase/reductase family [Arabidopsis thaliana] >gi|16323186|gb|AAL15327.1|
  misc_feature (70)..(496): Homolog of NCBI NO: 7485669 NR Description: hypothetical protein F17N18.140 - Arabidopsis >gi|4753659|emb|CAB41935.1| putative protein [Arabidopsis >gi|7268027|emb|CAB78367.1| putative protein [Arabidopsis
  misc_feature (165)..(488): Homolog of NCBI NO: 34904226 NR Description: P0443E07.30 [Oryza sativa (japonica
  misc_feature (83)..(169): Homolog of NCBI NO: 34904226 NR Description: P0443E07.30 [Oryza sativa (japonica
  misc_feature (161)..(405): Homolog of NCBI NO: 10178029 NR Description: gene_id:MUG13.25~pir||T07705~similar to unknown
  misc_feature (161)..(405): Homolog of NCBI NO: 18414726 NR Description: short-chain dehydrogenase/reductase family [Arabidopsis thaliana] >gi|21553369|gb|AAM62462.1| unknown
  misc_feature (140)..(401): Homolog of NCBI NO: 29244639 NR Description: putative oxidoreductase protein [Oryza sativa
  misc_feature (164)..(436): Homolog of NCBI NO: 21673969 NR Description: oxidoreductase, short-chain
  misc_feature (228)..(391): Homolog of NCBI NO: 15672756 NR Description: 3-oxoacyl-acyl carrier protein reductase
  misc_feature (162)..(227): Homolog of NCBI NO: 15672756 NR Description: 3-oxoacyl-acyl carrier protein reductase

SEQ ID NO: 105378 - protein, 404 aa, Arabidopsis thaliana; identical to SEQ ID NO: 39044
  peptide (1)..(404): Ceres Seq. ID no. 13617090
  misc_feature (1)..(404): Homolog of NCBI NO: 18413962 NR Description: short-chain dehydrogenase/reductase family [Arabidopsis thaliana] >gi|16323186|gb|AAL15327.1|
  misc_feature (1)..(404): Homolog of NCBI NO: 7485669 NR Description: hypothetical protein F17N18.140 - Arabidopsis >gi|4753659|emb|CAB41935.1| putative protein [Arabidopsis >gi|7268027|emb|CAB78367.1| putative protein [Arabidopsis
  misc_feature (73)..(396): Homolog of NCBI NO: 34904226 NR Description: P0443E07.30 [Oryza sativa (japonica
  misc_feature (1)..(77): Homolog of NCBI NO: 34904226 NR Description: P0443E07.30 [Oryza sativa (japonica
  misc_feature (69)..(313): Homolog of NCBI NO: 10178029 NR Description: gene_id:MUG13.25~pir||T07705~similar to unknown
  misc_feature (69)..(313): Homolog of NCBI NO: 18414726 NR Description: short-chain dehydrogenase/reductase family [Arabidopsis thaliana] >gi|21553369|gb|AAM62462.1| unknown
  misc_feature (48)..(309): Homolog of NCBI NO: 29244639 NR Description: putative oxidoreductase protein [Oryza sativa
  misc_feature (72)..(344): Homolog of NCBI NO: 21673969 NR Description: oxidoreductase, short-chain
  misc_feature (136)..(299): Homolog of NCBI NO: 15672756 NR Description: 3-oxoacyl-acyl carrier protein reductase
  misc_feature (70)..(135): Homolog of NCBI NO: 15672756 NR Description: 3-oxoacyl-acyl carrier protein reductase

SEQ ID NO: 105379 - protein, 388 aa, Arabidopsis thaliana; identical to SEQ ID NO: 39045
  peptide (1)..(388): Ceres Seq. ID no. 13617091
  misc_feature (1)..(388): Homolog of NCBI NO: 18413962 NR Description: short-chain dehydrogenase/reductase family [Arabidopsis thaliana] >gi|16323186|gb|AAL15327.1|
  misc_feature (1)..(388): Homolog of NCBI NO: 7485669 NR Description: hypothetical protein F17N18.140 - Arabidopsis >gi|4753659|emb|CAB41935.1| putative protein [Arabidopsis >gi|7268027|emb|CAB78367.1| putative protein [Arabidopsis
  misc_feature (57)..(380): Homolog of NCBI NO: 34904226 NR Description: P0443E07.30 [Oryza sativa (japonica
  misc_feature (1)..(61): Homolog of NCBI NO: 34904226 NR Description: P0443E07.30 [Oryza sativa (japonica
  misc_feature (53)..(297): Homolog of NCBI NO: 10178029 NR Description: gene_id:MUG13.25~pir||T07705~similar to unknown
  misc_feature (53)..(297): Homolog of NCBI NO: 18414726 NR Description: short-chain dehydrogenase/reductase family [Arabidopsis thaliana] >gi|21553369|gb|AAM62462.1| unknown
  misc_feature (32)..(293): Homolog of NCBI NO: 29244639 NR Description: putative oxidoreductase protein [Oryza sativa
  misc_feature (56)..(328): Homolog of NCBI NO: 21673969 NR Description: oxidoreductase, short-chain
  misc_feature (120)..(283): Homolog of NCBI NO: 15672756 NR Description: 3-oxoacyl-acyl carrier protein reductase
  misc_feature (54)..(119): Homolog of NCBI NO: 15672756 NR Description: 3-oxoacyl-acyl carrier protein reductase

SEQ ID NO: 105380 - DNA, 1154 bp, Arabidopsis thaliana
  misc_feature (1)..(1154): Ceres Seq. ID no. 13617108
  misc_feature: MA Experiment ID: 20000314 Result: Down-regulated in Transcription
  misc_feature: MA Experiment 20000314 PARAMETER Experiment Name: At_14day_Shoots-Roots_Sub_P Parameter: Age (day) Value: 14
  misc_feature: MA Experiment 20000314 PARAMETER Experiment Name: At_14day_Shoots-Roots_Sub_P Parameter: Organism Value: A. thaliana
  misc_feature: MA Experiment 20000314 PARAMETER Experiment Name: At_14day_Shoots-Roots_Sub_P Parameter: Plant Line Value: WS
  misc_feature: MA Experiment 20000314 PARAMETER Experiment Name: At_14day_Shoots-Roots_Sub_P Parameter: Tissue Value: Roots vs. Whole Plant
  misc_feature: MA Experiment ID: 20000315 Result: Down-regulated in Transcription
  misc_feature: MA Experiment 20000315 PARAMETER Experiment Name: At_14day_Shoots-Roots_Sub_P Parameter: Age (day) Value: 14
  misc_feature: MA Experiment 20000315 PARAMETER Experiment Name: At_14day_Shoots-Roots_Sub_P Parameter: Organism Value: A. thaliana
  misc_feature: MA Experiment 20000315 PARAMETER Experiment Name: At_14day_Shoots-Roots_Sub_P Parameter: Plant Line Value: WS
  misc_feature: MA Experiment 20000315 PARAMETER Experiment Name: At_14day_Shoots-Roots_Sub_P Parameter: Tissue Value: Shoots vs. Whole Plant
atcaactcgtttcttcgctgtcttagaaatccacaatatctttcttcacactttctttcactttcccgggaaaacagccgagaaaataaaagaaacgaagaaaagtttgttcctttgtggggatcaaagaagaatgtactcggcgattcggtcttcgcttcctctagatggcagcttgggagactactctgacggaaccaatcttcccatcgacgcttgtctggtcctaaccactgaccccaagcctcgccttcgttggacctctgagctccatgaaagattcgttgacgccgtcactcagctcggcggacccgacaaagcaacgcctaaaactataatgagaacaatgggagtgaagggtctcactctttaccatctcaaatctcatcttcagaaattccgcttggggaggcaatcttgtaaagaatcaattgacaactctaaggatgtttcttgtgttgcggagagtcaggacactggttcatcttcaacatcatccttaagattggctgctcaagaacagaacgagagttaccaggtcactgaagctttgcgtgcccagatggaagtccaaagaagactacacgagcaactagaggtgcaaaggcgactccagttaaggatcgaggcacaagggaagtacctgcaatcaattctagagaaagcttgcaaggctatagaggagcaagctgttgcatttgctgggttagaggcagctagagaagagctttcagagctagccataaaggcctccatcaccaatgggtgccaaggaacaacaagcaccttcgacacaaccaaaatgatgattccatccttatccgagcttgcagtagcaatagagcacaagaacaactgttcagcagagagctctctgacttccagcactgtaggaagtccggtatcagctgcgttgatgaagaagagacaacgaggagtgtttggaaatggagatagtgtggttgttggtcatgatgctggatgggttatgcctagtagtagcattggatgaagttagcaagagagagagagagagcgagaccagattttagcttatttaattttgctatgttgtatttaactctaaactctgtcatcaaacttgtcttagcgtctatgtatatatttgttgaatctgtagcctctcttttagt

SEQ ID NO: 105381 - protein, 336 aa, Arabidopsis thaliana; identical to SEQ ID NO: 24416
  peptide (1)..(336): Ceres Seq. ID no. 13617109
  misc_feature (83)..(134): Pfam Name: Myb-like DNA-binding domain Pfam Description: Myb-like DNA-binding domain
  misc_feature (45)..(336): Homolog of NCBI NO: 18414049 NR Description: expressed protein [Arabidopsis thaliana]
  misc_feature (45)..(336): Homolog of NCBI NO: 7485694 NR Description: hypothetical protein F18A5.30 - Arabidopsis >gi|4455293|emb|CAB36828.1| putative protein [Arabidopsis >gi|7268068|emb|CAB78406.1| putative protein [Arabidopsis
  misc_feature (45)..(336): Homolog of NCBI NO: 18404044 NR Description: transfactor -related [Arabidopsis thaliana] AT3g24120/MUJ8_3 [Arabidopsis thaliana] AT3g24120/MUJ8_3 [Arabidopsis thaliana]
  misc_feature (45)..(336): Homolog of NCBI NO: 11994231 NR Description: contains similarity to transfactor~gene_id:MUJ8.2
  misc_feature (188)..(336): Homolog of NCBI NO: 19698927 NR Description: putative protein [Arabidopsis thaliana]
  misc_feature (71)..(239): Homolog of NCBI NO: 25406584 NR Description: hypothetical protein T8K14.15 [imported] - thaliana >gi|4835766|gb|AAD30233.1|AC007202_15 Contains
  misc_feature (67)..(313): Homolog of NCBI NO: 6223653 NR Description: transfactor-like [Arabidopsis thaliana]
  misc_feature (55)..(234): Homolog of NCBI NO: 29647444 NR Description: P0410E11.32 [Oryza sativa (japonica
  misc_feature (71)..(239): Homolog of NCBI NO: 30699418 NR Description: transfactor -related [Arabidopsis thaliana]
  misc_feature (41)..(309): Homolog of NCBI NO: 14596181 NR Description: transfactor-like protein [Arabidopsis thaliana]

SEQ ID NO: 105382 - protein, 292 aa, Arabidopsis thaliana; identical to SEQ ID NO: 24417
  peptide (1)..(292): Ceres Seq. ID no. 13617110
  misc_feature (39)..(90): Pfam Name: Myb-like DNA-binding domain Pfam Description: Myb-like DNA-binding domain
  misc_feature (1)..(292): Homolog of NCBI NO: 18414049 NR Description: expressed protein [Arabidopsis thaliana]
  misc_feature (1)..(292): Homolog of NCBI NO: 7485694 NR Description: hypothetical protein F18A5.30 - Arabidopsis >gi|4455293|emb|CAB36828.1| putative protein [Arabidopsis >gi|7268068|emb|CAB78406.1| putative protein [Arabidopsis
  misc_feature (1)..(292): Homolog of NCBI NO: 18404044 NR Description: transfactor -related [Arabidopsis thaliana] AT3g24120/MUJ8_3 [Arabidopsis thaliana] AT3g24120/MUJ8_3 [Arabidopsis thaliana]
  misc_feature (1)..(292): Homolog of NCBI NO: 11994231 NR Description: contains similarity to transfactor~gene_id:MUJ8.2
  misc_feature (144)..(292): Homolog of NCBI NO: 19698927 NR Description: putative protein [Arabidopsis thaliana]
  misc_feature (27)..(195): Homolog of NCBI NO: 25406584 NR Description: hypothetical protein T8K14.15 [imported] - thaliana >gi|4835766|gb|AAD30233.1|AC007202_15 Contains
  misc_feature (23)..(269): Homolog of NCBI NO: 6223653 NR Description: transfactor-like [Arabidopsis thaliana]
  misc_feature (11)..(190): Homolog of NCBI NO: 29647444 NR Description: P0410E11.32 [Oryza sativa (japonica
  misc_feature (27)..(195): Homolog of NCBI NO: 30699418 NR Description: transfactor -related [Arabidopsis thaliana]
  misc_feature (1)..(265): Homolog of NCBI NO: 14596181 NR Description: transfactor-like protein [Arabidopsis thaliana]

SEQ ID NO: 105383 - protein, 224 aa, Arabidopsis thaliana; identical to SEQ ID NO: 24418
  peptide (1)..(224): Ceres Seq. ID no. 13617111
  misc_feature (1)..(224): Homolog of NCBI NO: 18414049 NR Description: expressed protein [Arabidopsis thaliana]
  misc_feature (1)..(224): Homolog of NCBI NO: 7485694 NR Description: hypothetical protein F18A5.30 - Arabidopsis >gi|4455293|emb|CAB36828.1| putative protein [Arabidopsis >gi|7268068|emb|CAB78406.1| putative protein [Arabidopsis
  misc_feature (1)..(224): Homolog of NCBI NO: 18404044 NR Description: transfactor -related [Arabidopsis thaliana] AT3g24120/MUJ8_3 [Arabidopsis thaliana] AT3g24120/MUJ8_3 [Arabidopsis thaliana]
  misc_feature (1)..(224): Homolog of NCBI NO: 11994231 NR Description: contains similarity to transfactor~gene_id:MUJ8.2
  misc_feature (76)..(224): Homolog of NCBI NO: 19698927 NR Description: putative protein [Arabidopsis thaliana]
  misc_feature (1)..(127): Homolog of NCBI NO: 25406584 NR Description: hypothetical protein T8K14.15 [imported] - thaliana >gi|4835766|gb|AAD30233.1|AC007202_15 Contains
  misc_feature (1)..(201): Homolog of NCBI NO: 6223653 NR Description: transfactor-like [Arabidopsis thaliana]
  misc_feature (1)..(122): Homolog of NCBI NO: 29647444 NR Description: P0410E11.32 [Oryza sativa (japonica
  misc_feature (1)..(127): Homolog of NCBI NO: 30699418 NR Description: transfactor -related [Arabidopsis thaliana]
  misc_feature (1)..(197): Homolog of NCBI NO: 14596181 NR Description: transfactor-like protein [Arabidopsis thaliana]

SEQ ID NO: 105384 - DNA, 1013 bp, Arabidopsis thaliana
  misc_feature (1)..(1013): Ceres Seq. ID no. 13617112
  misc_feature: MA Experiment ID: 108434 Result: Down-regulated in Transcription
  misc_feature: MA Experiment 108434 PARAMETER Experiment Name: At_Root_Tips_cDNA_P Parameter: Tissue Value: Root Tips
  misc_feature: MA Experiment ID: 108461 Result: Up-regulated in Transcription
  misc_feature: MA Experiment 108461 PARAMETER Experiment Name: At_Germinating_Seeds_cDNA_P Parameter: Age (day) Value: 1 vs. 0
  misc_feature: MA Experiment 108461 PARAMETER Experiment Name: At_Germinating_Seeds_cDNA_P Parameter: Tissue Value: Germinating Seeds
  misc_feature: MA Experiment ID: 108462 Result: Up-regulated in Transcription
  misc_feature: MA Experiment 108462 PARAMETER Experiment Name: At_Germinating_Seeds_cDNA_P Parameter: Age (day) Value: 2 vs. 0
  misc_feature: MA Experiment 108462 PARAMETER Experiment Name: At_Germinating_Seeds_cDNA_P Parameter: Tissue Value: Germinating Seeds
  misc_feature: MA Experiment ID: 108463 Result: Up-regulated in Transcription
  misc_feature: MA Experiment 108463 PARAMETER Experiment Name: At_Germinating_Seeds_cDNA_P Parameter: Age (day) Value: 3 vs. 0
  misc_feature: MA Experiment 108463 PARAMETER Experiment Name: At_Germinating_Seeds_cDNA_P Parameter: Tissue Value: Germinating Seeds
  misc_feature: MA Experiment ID: 108464 Result: Up-regulated in Transcription
  misc_feature: MA Experiment 108464 PARAMETER Experiment Name: At_Germinating_Seeds_cDNA_P Parameter: Age (day) Value: 4 vs. 0
  misc_feature: MA Experiment 108464 PARAMETER Experiment Name: At_Germinating_Seeds_cDNA_P Parameter: Tissue Value: Germinating Seeds
  misc_feature: MA Experiment ID: 108595 Result: Up-regulated in Transcription
  misc_feature: MA Experiment 108595 PARAMETER Experiment Name: At_Ler-pi_Ovule_cDNA_P Parameter: Plant Line Value: null
  misc_feature: MA Experiment ID: 20000180 Result: Up-regulated in Transcription
  misc_feature: MA Experiment 20000180 PARAMETER Experiment Name: At_Germinating_Seeds_P Parameter: Age (hr) Value: 24 vs. 0
  misc_feature: MA Experiment 20000180 PARAMETER Experiment Name: At_Germinating_Seeds_P Parameter: Tissue Value: Germinating Seeds
  misc_feature: MA Experiment ID: 20000185 Result: Up-regulated in Transcription
  misc_feature: MA Experiment 20000185 PARAMETER Experiment Name: At_Roots__P Parameter: Age (day) Value: 7 vs. 21
  misc_feature: MA Experiment 20000185 PARAMETER Experiment Name: At_Roots__P Parameter: Organism Value: A. thaliana
  misc_feature: MA Experiment 20000185 PARAMETER Experiment Name: At_Roots__P Parameter: Tissue Value: Roots vs. Whole Plant
  misc_feature: MA Experiment ID: 20000227 Result: Down-regulated in Transcription
  misc_feature: MA Experiment 20000227 PARAMETER Experiment Name: At_Root-Tips-vs-Tops_P Parameter: Tissue Value: Root Tips vs. Root Tops
  misc_feature: MA Experiment ID: 20000439 Result: Up-regulated in Transcription
  misc_feature: MA Experiment 20000439 PARAMETER Experiment Name: At_Roots__P Parameter: Age (day) Value: 14 vs. 21
  misc_feature: MA Experiment 20000439 PARAMETER Experiment Name: At_Roots__P Parameter: Organism Value: A. thaliana
  misc_feature: MA Experiment 20000439 PARAMETER Experiment Name: At_Roots__P Parameter: Tissue Value: Roots vs. Whole Plant
acaacatcatatctcaagttcaccacccaaaagaaaaaacacacacacatcttagagagatgaaagagactaattttggcgagaaaacgcgcgttctggtagttggtgggacgggatcattggggaggaggattgtaagtgcgtgtttggctgagggacacgagacttatgttctccagcggccggagattggagtggacatcgagaaggtgcagctacttctttctttcaaaagactcggcgcacatcttgtggaaggctcattctccgatcaccaaagccttgtctctgccgtaaagcaagtcgacgtggttgtctccgccatgtccggtgtccacttccgcacccacaacatccccgttcagctcaagctcgtcgcagccatcaaagaggccggtaacgtcaagcgtttcttaccatcagaatttggaatggatccgtcacgtatgggacatgccatgccaccaggaagtgaaacatttgatcaaaaaatggaaatacgaaatgcaattaaggccgccgggatctcccacacatacctcgtcggtgcttgttttgccgcatacttcggcggaaatttatctcaaatgggaactttgttccctccgaaaaacaaagttgatatttatggggacggaaatgttaaagtggtgttcgtagatgaagatgacatggcaaaatatacagcgaagacgcttaatgatccccgaacgttgaataaaactgtgtatgttagacctaccgacaacattctcacacaaatggaactagttcagatatgggagaaactaaccgaaaaagagttggagaagacctatgtttcaggaaacgactttcttgctgacattgaagataaggagatatcacaccaagcgggactaggacacttttatcacatatactacgaaggttgtctcacagatcatgaagttggagacgacgaagaagctactaaactctatccggatgtgaagtacaaacgcatggatgaatatttgaaaattttcgtataa

SEQ ID NO: 105385 - protein, 336 aa, Arabidopsis thaliana
  peptide (1)..(336): Ceres Seq. ID no. 13617113
  misc_feature (26)..(336): Pfam Name: Isoflavone reductase Pfam Description: Isoflavone reductase
  misc_feature (20)..(336): Homolog of NCBI NO: 15236330 NR Description: pinoresinol-lariciresinol reductase, putative
  misc_feature (20)..(336): Homolog of NCBI NO: 15222571 NR Description: pinoresinol-lariciresinol reductase, putative
  misc_feature (20)..(336): Homolog of NCBI NO: 21592830 NR Description: pinoresinol-lariciresinol reductase, putative
  misc_feature (28)..(336): Homolog of NCBI NO: 1708424 NR Description: ISOFLAVONE REDUCTASE HOMOLOG
  misc_feature (28)..(336): Homolog of NCBI NO: 1769556 NR Description: Forsythia x intermedia
  misc_feature (29)..(336): Homolog of NCBI NO: 7578917 NR Description: pinoresinol-lariciresinol reductase TH2 [Tsuga
  misc_feature (27)..(336): Homolog of NCBI NO: 38492951 NR Description: Chain A, Crystal Structures Of And Phenylcoumaran Benzylic Ether Reductases, And Their To Isoflavone Reductases >gi|38492952|pdb|1QYD|B Chain B, Crystal
  misc_feature (27)..(336): Homolog of NCBI NO: 7542588 NR Description: pinoresinol-lariciresinol reductase [Thuja
  misc_feature (27)..(336): Homolog of NCBI NO: 7542583 NR Description: pinoresinol-lariciresinol reductase [Thuja
  misc_feature (27)..(336): Homolog of NCBI NO: 7542585 NR Description: pinoresinol-lariciresinol reductase [Thuja >gi|7578913|gb|AAF64183.1|AF242500_1 phenylcoumaran benzylic
NIISQVHHPKEKTHTHLREMKETNFGEKTRVLVVGGTGSLGRRIVSACLAEGHETYVLQRPEIGVDIEKVQLLLSFKRLGAHLVEGSFSDHQSLVSAVKQVDVVVSAMSGVHFRTHNIPVQLKLVAAIKEAGNVKRFLPSEFGMDPSRMGHAMPPGSETFDQKMEIRNAIKAAGISHTYLVGACFAAYFGGNLSQMGTLFPPKNKVDIYGDGNVKVVFVDEDDMAKYTAKTLNDPRTLNKTVYVRPTDNILTQMELVQIWEKLTEKELEKTYVSGNDFLADIEDKEISHQAGLGHFYHIYYEGCLTDHEVGDDEEATKLYPDVKYKRMDEYLKIFV

SEQ ID NO: 105386 - protein, 317 aa, Arabidopsis thaliana; identical to SEQ ID NO: 22360
  peptide (1)..(317): Ceres Seq. ID no. 13617114
  misc_feature (7)..(317): Pfam Name: Isoflavone reductase Pfam Description: Isoflavone reductase
  misc_feature (1)..(317): Homolog of NCBI NO: 15236330 NR Description: pinoresinol-lariciresinol reductase, putative
  misc_feature (1)..(317): Homolog of NCBI NO: 15222571 NR Description: pinoresinol-lariciresinol reductase, putative
  misc_feature (1)..(317): Homolog of NCBI NO: 21592830 NR Description: pinoresinol-lariciresinol reductase, putative
  misc_feature (9)..(317): Homolog of NCBI NO: 1708424 NR Description: ISOFLAVONE REDUCTASE HOMOLOG
  misc_feature (9)..(317): Homolog of NCBI NO: 1769556 NR Description: Forsythia x intermedia
  misc_feature (10)..(317): Homolog of NCBI NO: 7578917 NR Description: pinoresinol-lariciresinol reductase TH2 [Tsuga
  misc_feature (8)..(317): Homolog of NCBI NO: 38492951 NR Description: Chain A, Crystal Structures Of And Phenylcoumaran Benzylic Ether Reductases, And Their To Isoflavone Reductases >gi|38492952|pdb|1QYD|B Chain B, Crystal
  misc_feature (8)..(317): Homolog of NCBI NO: 7542588 NR Description: pinoresinol-lariciresinol reductase [Thuja
  misc_feature (8)..(317): Homolog of NCBI NO: 7542583 NR Description: pinoresinol-lariciresinol reductase [Thuja
  misc_feature (8)..(317): Homolog of NCBI NO: 7542585 NR Description: pinoresinol-lariciresinol reductase [Thuja >gi|7578913|gb|AAF64183.1|AF242500_1 phenylcoumaran benzylic

SEQ ID NO: 105387 - protein, 229 aa, Arabidopsis thaliana; identical to SEQ ID NO: 22361
  peptide (1)..(229): Ceres Seq. ID no. 13617115
  misc_feature (1)..(229): Pfam Name: Isoflavone reductase Pfam Description: Isoflavone reductase
  misc_feature (1)..(229): Homolog of NCBI NO: 15236330 NR Description: pinoresinol-lariciresinol reductase, putative
  misc_feature (1)..(229): Homolog of NCBI NO: 15222571 NR Description: pinoresinol-lariciresinol reductase, putative
  misc_feature (1)..(229): Homolog of NCBI NO: 21592830 NR Description: pinoresinol-lariciresinol reductase, putative
  misc_feature (1)..(229): Homolog of NCBI NO: 1708424 NR Description: ISOFLAVONE REDUCTASE HOMOLOG
  misc_feature (1)..(229): Homolog of NCBI NO: 1769556 NR Description: Forsythia x intermedia
  misc_feature (1)..(229): Homolog of NCBI NO: 7578917 NR Description: pinoresinol-lariciresinol reductase TH2 [Tsuga
  misc_feature (1)..(229): Homolog of NCBI NO: 38492951 NR Description: Chain A, Crystal Structures Of And Phenylcoumaran Benzylic Ether Reductases, And Their To Isoflavone Reductases >gi|38492952|pdb|1QYD|B Chain B, Crystal
  misc_feature (1)..(229): Homolog of NCBI NO: 7542588 NR Description: pinoresinol-lariciresinol reductase [Thuja
  misc_feature (1)..(229): Homolog of NCBI NO: 7542583 NR Description: pinoresinol-lariciresinol reductase [Thuja
  misc_feature (1)..(229): Homolog of NCBI NO: 7542585 NR Description: pinoresinol-lariciresinol reductase [Thuja >gi|7578913|gb|AAF64183.1|AF242500_1 phenylcoumaran benzylic

SEQ ID NO: 105388 - DNA, 1553 bp, Arabidopsis thaliana
  misc_feature (1)..(1553): Ceres Seq. ID no. 13617122
  misc_feature: MA Experiment ID: 108434 Result: Up-regulated in Transcription
  misc_feature: MA Experiment 108434 PARAMETER Experiment Name: At_Root_Tips_cDNA_P Parameter: Tissue Value: Root Tips
  misc_feature: MA Experiment ID: 108561 Result: Up-regulated in Transcription
  misc_feature: MA Experiment 108561 PARAMETER Experiment Name: At_100uM_ABA_cDNA_P Parameter: Timepoint (hr) Value: 6
  misc_feature: MA Experiment 108561 PARAMETER Experiment Name: At_100uM_ABA_cDNA_P Parameter: Tissue Value: Aerial
  misc_feature: MA Experiment 108561 PARAMETER Experiment Name: At_100uM_ABA_cDNA_P Parameter: Treatment Value: 100uM ABA vs. No Treatment
  misc_feature: MA Experiment ID: 108573 Result: Up-regulated in Transcription
  misc_feature: MA Experiment 108573 PARAMETER Experiment Name: At_Drought_cDNA_P Parameter: Timepoint (hr) Value: 6
  misc_feature: MA Experiment 108573 PARAMETER Experiment Name: At_Drought_cDNA_P Parameter: Tissue Value: Aerial
  misc_feature: MA Experiment 108573 PARAMETER Experiment Name: At_Drought_cDNA_P Parameter: Treatment Value: Drought vs. No Drought
  misc_feature: MA Experiment ID: 108585 Result: Down-regulated in Transcription
  misc_feature: MA Experiment 108585 PARAMETER Experiment Name: At_5mM_NaNP_cDNA_P Parameter: Timepoint (hr) Value: 6
  misc_feature: MA Experiment 108585 PARAMETER Experiment Name: At_5mM_NaNP_cDNA_P Parameter: Tissue Value: Aerial
  misc_feature: MA Experiment 108585 PARAMETER Experiment Name: At_5mM_NaNP_cDNA_P Parameter: Treatment Value: null
  misc_feature: MA Experiment ID: 108607 Result: Up-regulated in Transcription
  misc_feature: MA Experiment 108607 PARAMETER Experiment Name: At_100uM_ABA_cDNA_P Parameter: Timepoint (hr) Value: 4
  misc_feature: MA Experiment 108607 PARAMETER Experiment Name: At_100uM_ABA_cDNA_P Parameter: Tissue Value: Aerial
  misc_feature: MA Experiment 108607 PARAMETER Experiment Name: At_100uM_ABA_cDNA_P Parameter: Treatment Value: 100uM ABA vs. No Treatment
  misc_feature: MA Experiment ID: 20000068 Result: Up-regulated in Transcription
  misc_feature: MA Experiment ID: 20000069 Result: Up-regulated in Transcription
  misc_feature: MA Experiment 20000069 PARAMETER Experiment Name: At_100uM_ABA_Mutants_cDNA_P Parameter: Plant Line Value: CS23
  misc_feature: MA Experiment 20000069 PARAMETER Experiment Name: At_100uM_ABA_Mutants_cDNA_P Parameter: Timepoint (hr) Value: 6
  misc_feature: MA Experiment 20000069 PARAMETER Experiment Name: At_100uM_ABA_Mutants_cDNA_P Parameter: Tissue Value: Aerial
  misc_feature: MA Experiment 20000069 PARAMETER Experiment Name: At_100uM_ABA_Mutants_cDNA_P Parameter: Treatment Value: 100uM ABA vs. No Treatment
  misc_feature: MA Experiment ID: 20000071 Result: Up-regulated in Transcription
  misc_feature: MA Experiment 20000071 PARAMETER Experiment Name: At_100uM_ABA_Mutants_cDNA_P Parameter: Plant Line Value: CS8104
  misc_feature: MA Experiment 20000071 PARAMETER Experiment Name: At_100uM_ABA_Mutants_cDNA_P Parameter: Timepoint (hr) Value: 6
  misc_feature: MA Experiment 20000071 PARAMETER Experiment Name: At_100uM_ABA_Mutants_cDNA_P Parameter: Tissue Value: Aerial
  misc_feature: MA Experiment 20000071 PARAMETER Experiment Name: At_100uM_ABA_Mutants_cDNA_P Parameter: Treatment Value: 100uM ABA vs. No Treatment
  misc_feature: MA Experiment ID: 20000117 Result: Up-regulated in Transcription
  misc_feature: MA Experiment 20000117 PARAMETER Experiment Name: At_100uM_ABA_Mutants_cDNA_P Parameter: Plant Line Value: Columbia
  misc_feature: MA Experiment 20000117 PARAMETER Experiment Name: At_100uM_ABA_Mutants_cDNA_P Parameter: Timepoint (hr) Value: 6
  misc_feature: MA Experiment 20000117 PARAMETER Experiment Name: At_100uM_ABA_Mutants_cDNA_P Parameter: Tissue Value: Aerial
  misc_feature: MA Experiment 20000117 PARAMETER Experiment Name: At_100uM_ABA_Mutants_cDNA_P Parameter: Treatment Value: 100uM ABA vs. No Treatment
  misc_feature: MA Experiment ID: 20000166 Result: Up-regulated in Transcription
  misc_feature: MA Experiment 20000166 PARAMETER Experiment Name: At_100uM_ABA_P Parameter: Age (day) Value: 14
  misc_feature: MA Experiment 20000166 PARAMETER Experiment Name: At_100uM_ABA_P Parameter: Organism Value: A. thaliana
  misc_feature: MA Experiment 20000166 PARAMETER Experiment Name: At_100uM_ABA_P Parameter: Plant Line Value: WS
  misc_feature: MA Experiment 20000166 PARAMETER Experiment Name: At_100uM_ABA_P Parameter: Timepoint (hr) Value: 1
  misc_feature: MA Experiment 20000166 PARAMETER Experiment Name: At_100uM_ABA_P Parameter: Tissue Value: Aerial
  misc_feature: MA Experiment 20000166 PARAMETER Experiment Name: At_100uM_ABA_P Parameter: Treatment Value: 100uM ABA vs. No Treatment
  misc_feature: MA Experiment ID: 20000169 Result: Up-regulated in Transcription
  misc_feature: MA Experiment 20000169 PARAMETER Experiment Name: At_100uM_ABA_P Parameter: Age (day) Value: 14
  misc_feature: MA Experiment 20000169 PARAMETER Experiment Name: At_100uM_ABA_P Parameter: Organism Value: A. thaliana
  misc_feature: MA Experiment 20000169 PARAMETER Experiment Name: At_100uM_ABA_P Parameter: Plant Line Value: WS
  misc_feature: MA Experiment 20000169 PARAMETER Experiment Name: At_100uM_ABA_P Parameter: Timepoint (hr) Value: 6
  misc_feature: MA Experiment 20000169 PARAMETER Experiment Name: At_100uM_ABA_P Parameter: Tissue Value: Aerial
  misc_feature: MA Experiment 20000169 PARAMETER Experiment Name: At_100uM_ABA_P Parameter: Treatment Value: 100uM ABA vs. No Treatment
  misc_feature: MA Experiment ID: 20000185 Result: Down-regulated in Transcription
  misc_feature: MA Experiment 20000185 PARAMETER Experiment Name: At_Roots__P Parameter: Age (day) Value: 7 vs. 21
  misc_feature: MA Experiment 20000185 PARAMETER Experiment Name: At_Roots__P Parameter: Organism Value: A. thaliana
  misc_feature: MA Experiment 20000185 PARAMETER Experiment Name: At_Roots__P Parameter: Tissue Value: Roots vs. Whole Plant
  misc_feature: MA Experiment ID: 20000224 Result: Up-regulated in Transcription
  misc_feature: MA Experiment ID: 20000264 Result: Up-regulated in Transcription
  misc_feature: MA Experiment 20000264 PARAMETER Experiment Name: At_Open_Flower_P Parameter: Age (day) Value: 21
  misc_feature: MA Experiment 20000264 PARAMETER Experiment Name: At_Open_Flower_P Parameter: Plant Line Value: WS
  misc_feature: MA Experiment 20000264 PARAMETER Experiment Name: At_Open_Flower_P Parameter: Tissue Value: Open Flower vs. Whole Plant
  misc_feature: MA Experiment ID: 20000265 Result: Up-regulated in Transcription
  misc_feature: MA Experiment 20000265 PARAMETER Experiment Name: At_Open_Flower_P Parameter: Age (day) Value: 21
  misc_feature: MA Experiment 20000265 PARAMETER Experiment Name: At_Open_Flower_P Parameter: Plant Line Value: WS
  misc_feature: MA Experiment 20000265 PARAMETER Experiment Name: At_Open_Flower_P Parameter: Tissue Value: Closed Flower vs. Whole Plant
  misc_feature: MA Experiment ID: 20000267 Result: Up-regulated in Transcription
  misc_feature: MA Experiment 20000267 PARAMETER Experiment Name: At_Drought_P Parameter: Age (day) Value: 7
  misc_feature: MA Experiment 20000267 PARAMETER Experiment Name: At_Drought_P Parameter: Organism Value: A. thaliana
  misc_feature: MA Experiment 20000267 PARAMETER Experiment Name: At_Drought_P Parameter: Plant Line Value: WS
  misc_feature: MA Experiment 20000267 PARAMETER Experiment Name: At_Drought_P Parameter: Timepoint (hr) Value: 6
  misc_feature: MA Experiment 20000267 PARAMETER Experiment Name: At_Drought_P Parameter: Tissue Value: Whole Plant
  misc_feature: MA Experiment 20000267 PARAMETER Experiment Name: At_Drought_P Parameter: Treatment Value: Drought vs. No Drought
  misc_feature: MA Experiment ID: 20000268 Result: Up-regulated in Transcription
  misc_feature: MA Experiment 20000268 PARAMETER Experiment Name: At_100mM_NaCl__P Parameter: Age (day) Value: 14
  misc_feature: MA Experiment 20000268 PARAMETER Experiment Name: At_100mM_NaCl__P Parameter: Organism Value: A. thaliana
  misc_feature: MA Experiment 20000268 PARAMETER Experiment Name: At_100mM_NaCl__P Parameter: Plant Line Value: WS
  misc_feature: MA Experiment 20000268 PARAMETER Experiment Name: At_100mM_NaCl__P Parameter: Timepoint (hr) Value: 6
  misc_feature: MA Experiment 20000268 PARAMETER Experiment Name: At_100mM_NaCl__P Parameter: Tissue Value: Whole Plant
  misc_feature: MA Experiment 20000268 PARAMETER Experiment Name: At_100mM_NaCl__P Parameter: Treatment Value: 100mM NaCl vs. No Treatment
  misc_feature: MA Experiment ID: 20000286 Result: Up-regulated in Transcription
  misc_feature: MA Experiment 20000286 PARAMETER Experiment Name: At_Open_Flower_P Parameter: Age (day) Value: 21
  misc_feature: MA Experiment 20000286 PARAMETER Experiment Name: At_Open_Flower_P Parameter: Plant Line Value: WS
  misc_feature: MA Experiment 20000286 PARAMETER Experiment Name: At_Open_Flower_P Parameter: Tissue Value: Half Open vs. Whole Plant
  misc_feature: MA Experiment ID: 20000436 Result: Up-regulated in Transcription
  misc_feature: MA Experiment 20000436 PARAMETER Experiment Name: At_Drought_P Parameter: Age (day) Value: 7
  misc_feature: MA Experiment 20000436 PARAMETER Experiment Name: At_Drought_P Parameter: Organism Value: A. thaliana
  misc_feature: MA Experiment 20000436 PARAMETER Experiment Name: At_Drought_P Parameter: Plant Line Value: WS
  misc_feature: MA Experiment 20000436 PARAMETER Experiment Name: At_Drought_P Parameter: Timepoint (hr) Value: 12
  misc_feature: MA Experiment 20000436 PARAMETER Experiment Name: At_Drought_P Parameter: Tissue Value: Whole Plant
  misc_feature: MA Experiment 20000436 PARAMETER Experiment Name: At_Drought_P Parameter: Treatment Value: Drought vs. No Drought
  misc_feature: MA Experiment ID: 20000437 Result: Up-regulated in Transcription
  misc_feature: MA Experiment 20000437 PARAMETER Experiment Name: At_Drought_P Parameter: Age (day) Value: 8
  misc_feature: MA Experiment 20000437 PARAMETER Experiment Name: At_Drought_P Parameter: Organism Value: A. thaliana
  misc_feature: MA Experiment 20000437 PARAMETER Experiment Name: At_Drought_P Parameter: Plant Line Value: WS
  misc_feature: MA Experiment 20000437 PARAMETER Experiment Name: At_Drought_P Parameter: Timepoint (hr) Value: 24
  misc_feature: MA Experiment 20000437 PARAMETER Experiment Name: At_Drought_P Parameter: Tissue Value: Whole Plant
  misc_feature: MA Experiment 20000437 PARAMETER Experiment Name: At_Drought_P Parameter: Treatment Value: Drought vs. No Drought
  misc_feature: MA Experiment ID: 20000438 Result: Up-regulated in Transcription
  misc_feature: MA Experiment 20000438 PARAMETER Experiment Name: At_Shoots__P Parameter: Age (day) Value: 14
  misc_feature: MA Experiment 20000438 PARAMETER Experiment Name: At_Shoots__P Parameter: Tissue Value: Shoots vs. Whole Plant
  misc_feature: MA Experiment ID: 20000439 Result: Down-regulated in Transcription
  misc_feature: MA Experiment 20000439 PARAMETER Experiment Name: At_Roots__P Parameter: Age (day) Value: 14 vs. 21
  misc_feature: MA Experiment 20000439 PARAMETER Experiment Name: At_Roots__P Parameter: Organism Value: A. thaliana
  misc_feature: MA Experiment 20000439 PARAMETER Experiment Name: At_Roots__P Parameter: Tissue Value: Roots vs. Whole Plant
  misc_feature: MA Experiment ID: 20000453 Result: Up-regulated in Transcription
  misc_feature: MA Experiment 20000453 PARAMETER Experiment Name: At_100uM_ABA_P Parameter: Age (day) Value: 15
  misc_feature: MA Experiment 20000453 PARAMETER Experiment Name: At_100uM_ABA_P Parameter: Organism Value: A. thaliana
  misc_feature: MA Experiment 20000453 PARAMETER Experiment Name: At_100uM_ABA_P Parameter: Plant Line Value: WS
  misc_feature: MA Experiment 20000453 PARAMETER Experiment Name: At_100uM_ABA_P Parameter: Timepoint (hr) Value: 24
  misc_feature: MA Experiment 20000453 PARAMETER Experiment Name: At_100uM_ABA_P Parameter: Tissue Value: Aerial
  misc_feature: MA Experiment 20000453 PARAMETER Experiment Name: At_100uM_ABA_P Parameter: Treatment Value: 100uM ABA vs. No Treatment
  misc_feature: MA Experiment ID: 20000527 Result: Up-regulated in Transcription
  misc_feature: MA Experiment 20000527 PARAMETER Experiment Name: At_10percent_PEG_P Parameter: Age (day) Value: 20
  misc_feature: MA Experiment 20000527 PARAMETER Experiment Name: At_10percent_PEG_P Parameter: Organism Value: A. thaliana
  misc_feature: MA Experiment 20000527 PARAMETER Experiment Name: At_10percent_PEG_P Parameter: Plant Line Value: WS
  misc_feature: MA Experiment 20000527 PARAMETER Experiment Name: At_10percent_PEG_P Parameter: Timepoint (day) Value: 20
  misc_feature: MA Experiment 20000527 PARAMETER Experiment Name: At_10percent_PEG_P Parameter: Tissue Value: Whole Plant
  misc_feature: MA Experiment 20000527 PARAMETER Experiment Name: At_10percent_PEG_P Parameter: Treatment Value: 10percent PEG vs. No Treatment
  misc_feature: MA Experiment ID: 20000573 Result: Down-regulated in Transcription
  misc_feature: MA Experiment 20000573 PARAMETER Experiment Name: At_100uM_ABA_Mutants__P Parameter: Organism Value: A. thaliana
  misc_feature: MA Experiment 20000573 PARAMETER Experiment Name: At_100uM_ABA_Mutants__P Parameter: Plant Line Value: CS22 vs. Ler wt
  misc_feature: MA Experiment 20000573 PARAMETER Experiment Name: At_100uM_ABA_Mutants__P Parameter: Timepoint (hr) Value: N/A
  misc_feature: MA Experiment 20000573 PARAMETER Experiment Name: At_100uM_ABA_Mutants__P Parameter: Tissue Value: Whole Plant
  misc_feature: MA Experiment 20000573 PARAMETER Experiment Name: At_100uM_ABA_Mutants__P Parameter: Treatment Value: None
  misc_feature: MA Experiment ID: 20000794 Result: Up-regulated in Transcription
  misc_feature: MA Experiment 20000794 PARAMETER Experiment Name: At_Petals_P Parameter: Age (day) Value: 23-25 days
  misc_feature: MA Experiment 20000794 PARAMETER Experiment Name: At_Petals_P Parameter: Plant Line Value: WS
  misc_feature: MA Experiment 20000794 PARAMETER Experiment Name: At_Petals_P Parameter: Tissue Value: Petals vs. Whole plant
  misc_feature: MA Experiment ID: 20001248 Result: Down-regulated in Transcription
  misc_feature: MA Experiment 20001248 PARAMETER Experiment Name: At_Far-red-induction_P Parameter: Age (day) Value: 7
  misc_feature: MA Experiment 20001248 PARAMETER Experiment Name: At_Far-red-induction_P Parameter: Light Value: Far-red vs. White
  misc_feature: MA Experiment 20001248 PARAMETER Experiment Name: At_Far-red-induction_P Parameter: Organism Value: A. thaliana
  misc_feature: MA Experiment 20001248 PARAMETER Experiment Name: At_Far-red-induction_P Parameter: Plant Line Value: Columbia
  misc_feature: MA Experiment 20001248 PARAMETER Experiment Name: At_Far-red-induction_P Parameter: Timepoint (hr) Value: 4
  misc_feature: MA Experiment 20001248 PARAMETER Experiment Name: At_Far-red-induction_P Parameter: Tissue Value: Whole Plant
  misc_feature: MA Experiment ID: 20001554 Result: Up-regulated in Transcription
  misc_feature: MA Experiment 20001554 PARAMETER Experiment Name: At_Drought_Soil_Dry_P Parameter: Age (day) Value: 21
  misc_feature: MA Experiment 20001554 PARAMETER Experiment Name: At_Drought_Soil_Dry_P Parameter: Organism Value: A. thaliana
  misc_feature: MA Experiment 20001554 PARAMETER Experiment Name: At_Drought_Soil_Dry_P Parameter: Plant Line Value: WS
  misc_feature: MA Experiment 20001554 PARAMETER Experiment Name: At_Drought_Soil_Dry_P Parameter: Post Timepoint (hr) Value: None
  misc_feature: MA Experiment 20001554 PARAMETER Experiment Name: At_Drought_Soil_Dry_P Parameter: Post-Treatment Value: None
  misc_feature: MA Experiment 20001554 PARAMETER Experiment Name: At_Drought_Soil_Dry_P Parameter: Timepoint (day) Value: 7
  misc_feature: MA Experiment 20001554 PARAMETER Experiment Name: At_Drought_Soil_Dry_P Parameter: Treatment Value: Drought vs. No Drought
  misc_feature: MA Experiment ID: 20001555 Result: Up-regulated in Transcription
  misc_feature: MA Experiment 20001555 PARAMETER Experiment Name: At_Drought_Soil_Dry_P Parameter: Age (day) Value: 24
  misc_feature: MA Experiment 20001555 PARAMETER Experiment Name: At_Drought_Soil_Dry_P Parameter: Organism Value: A. thaliana
  misc_feature: MA Experiment 20001555 PARAMETER Experiment Name: At_Drought_Soil_Dry_P Parameter: Plant Line Value: WS
  misc_feature: MA Experiment 20001555 PARAMETER Experiment Name: At_Drought_Soil_Dry_P Parameter: Post Timepoint (hr) Value: None
  misc_feature: MA Experiment 20001555 PARAMETER Experiment Name: At_Drought_Soil_Dry_P Parameter: Post-Treatment Value: None
  misc_feature: MA Experiment 20001555 PARAMETER Experiment Name: At_Drought_Soil_Dry_P Parameter: Timepoint (day) Value: 10
  misc_feature: MA Experiment 20001555 PARAMETER Experiment Name: At_Drought_Soil_Dry_P Parameter: Treatment Value: Drought vs. No Drought
  misc_feature: MA Experiment ID: 20001558 Result: Down-regulated in Transcription
  misc_feature: MA Experiment 20001558 PARAMETER Experiment Name: At_Drought_Soil_Dry_P Parameter: Age (day) Value: 27
  misc_feature: MA Experiment 20001558 PARAMETER Experiment Name: At_Drought_Soil_Dry_P Parameter: Organism Value: A. thaliana
  misc_feature: MA Experiment 20001558 PARAMETER Experiment Name: At_Drought_Soil_Dry_P Parameter: Plant Line Value: WS
  misc_feature: MA Experiment 20001558 PARAMETER Experiment Name: At_Drought_Soil_Dry_P Parameter: Post Timepoint (hr) Value: 6
  misc_feature: MA Experiment 20001558 PARAMETER Experiment Name: At_Drought_Soil_Dry_P Parameter: Post-Treatment Value: Re-Water vs. No Drought
  misc_feature: MA Experiment 20001558 PARAMETER Experiment Name: At_Drought_Soil_Dry_P Parameter: Timepoint (day) Value: 13
  misc_feature: MA Experiment 20001558 PARAMETER Experiment Name: At_Drought_Soil_Dry_P Parameter: Treatment Value: Drought vs. No Drought
  misc_feature: MA Experiment ID: 20001757 Result: Down-regulated in Transcription
  misc_feature: MA Experiment 20001757 PARAMETER Experiment Name: At_50mM_NH4NO3_L-to-H_P Parameter: Timepoint (hr) Value: 6
  misc_feature: MA Experiment 20001757 PARAMETER Experiment Name: At_50mM_NH4NO3_L-to-H_P Parameter: Tissue Value: Leaf
  misc_feature: MA Experiment 20001757 PARAMETER Experiment Name: At_50mM_NH4NO3_L-to-H_P Parameter: Treatment Value: 50mM NH4NO3 vs 100mM Mannitol
  misc_feature: MA Experiment ID: 20001904 Result: Up-regulated in Transcription
  misc_feature: MA Experiment 20001904 PARAMETER Experiment Name: At_Drought_Reproduction_P Parameter: Age (day) Value: 37
  misc_feature: MA Experiment 20001904 PARAMETER Experiment Name: At_Drought_Reproduction_P Parameter: Organism Value: A. thaliana
  misc_feature: MA Experiment 20001904 PARAMETER Experiment Name: At_Drought_Reproduction_P Parameter: Plant Line Value: WS
  misc_feature: MA Experiment 20001904 PARAMETER Experiment Name: At_Drought_Reproduction_P Parameter: Timepoint (day) Value: 7
  misc_feature: MA Experiment 20001904 PARAMETER Experiment Name: At_Drought_Reproduction_P Parameter: Tissue Value: Rosettes
  misc_feature: MA Experiment 20001904 PARAMETER Experiment Name: At_Drought_Reproduction_P Parameter: Treatment Value: Drought vs. No Drought
  misc_feature: MA Experiment ID: 20001905 Result: Up-regulated in Transcription
  misc_feature: MA Experiment 20001905 PARAMETER Experiment Name: At_Drought_Reproduction_P Parameter: Age (day) Value: 40
  misc_feature: MA Experiment 20001905 PARAMETER Experiment Name: At_Drought_Reproduction_P Parameter: Organism Value: A. thaliana
  misc_feature: MA Experiment 20001905 PARAMETER Experiment Name: At_Drought_Reproduction_P Parameter: Plant Line Value: WS
  misc_feature: MA Experiment 20001905 PARAMETER Experiment Name: At_Drought_Reproduction_P Parameter: Timepoint (day) Value: 10
  misc_feature: MA Experiment 20001905 PARAMETER Experiment Name: At_Drought_Reproduction_P Parameter: Tissue Value: Rosettes
  misc_feature: MA Experiment 20001905 PARAMETER Experiment Name: At_Drought_Reproduction_P Parameter: Treatment Value: Drought vs. No Drought
  misc_feature: MA Experiment ID: 20001906 Result: Up-regulated in Transcription
  misc_feature: MA Experiment 20001906 PARAMETER Experiment Name: At_Drought_Reproduction_P Parameter: Age (day) Value: 35
  misc_feature: MA Experiment 20001906 PARAMETER Experiment Name: At_Drought_Reproduction_P Parameter: Organism Value: A. thaliana
  misc_feature: MA Experiment 20001906 PARAMETER Experiment Name: At_Drought_Reproduction_P Parameter: Plant Line Value: WS
  misc_feature: MA Experiment 20001906 PARAMETER Experiment Name: At_Drought_Reproduction_P Parameter: Timepoint (day) Value: 5
  misc_feature: MA Experiment 20001906 PARAMETER Experiment Name: At_Drought_Reproduction_P Parameter: Tissue Value: Siliques
  misc_feature: MA Experiment 20001906 PARAMETER Experiment Name: At_Drought_Reproduction_P Parameter: Treatment Value: Drought vs. No Drought
  misc_feature: MA Experiment ID: 20001911 Result: Up-regulated in Transcription
  misc_feature: MA Experiment 20001911 PARAMETER Experiment Name: At_Drought_Reproduction_P Parameter: Age (day) Value: 40
  misc_feature: MA Experiment 20001911 PARAMETER Experiment Name: At_Drought_Reproduction_P Parameter: Organism Value: A. thaliana
  misc_feature: MA Experiment 20001911 PARAMETER Experiment Name: At_Drought_Reproduction_P Parameter: Plant Line Value: WS
  misc_feature: MA Experiment 20001911 PARAMETER Experiment Name: At_Drought_Reproduction_P Parameter: Timepoint (day) Value: 10
  misc_feature: MA Experiment 20001911 PARAMETER Experiment Name: At_Drought_Reproduction_P Parameter: Tissue Value: Flowers
  misc_feature: MA Experiment 20001911 PARAMETER Experiment Name: At_Drought_Reproduction_P Parameter: Treatment Value: Drought vs. No Drought
atcgaattttctgccacaaagaattttttgaaaactcagattttttttgttttcagaacatgattggtgaggcaattgctaaaattaaatagtacttatgtgttttatgttgattttttgattagaaaatggacattttgtccgattcttatttgtttgtgttttttttttttgtagacgcaataagctatcttcagcctaaactttctggaaattttcgtcattagtaacctgaaattatcttaacttgtatataagcaagactataaatattagcaaagatggaggagatgtcacctgataatatacatggagtcattttagctgtgtcttcgagtatattcatcggttctagcttcatcatcaagaaaaaaggtcttaagaaggccggtgttagcggcgccagagcaggtgaaggaggatatggatacttatatgaaccttggtggtgggctggaatgataacaatgattgttggggagatagccaattttgcagcatatgcatttgcaccggctattctagtaacacctttgggagctttaagtattattttcagcgcagtgctagcacattttattttggaagagaagttgcatatgtttggtatacttggttgtgtcctctgtgttgttggatctacaacgattgttttacatgctcctcacgagcaaggcattgaatccgtcaagcaagtatggcaccttgctaccgaaccaggtttccttgcatattctgctgtggtcttggttgtggtgcttgcattgatcttttactatgagccgcgttatgggaagacgcatatgatagtatatgttgggatttgctctctaatgggctctcttacagttatgagtgttaaagctgtggcgatcgccataaagctgactttttccgggatgaaccaattcaagtacttccacgcatggatcttcatcatagtagtgaccatatgttgcattttgcaaatcaactacttgaacaaggctctggataatttcaacacagcagtcatatctccagtgtactatgttatgtttacaacattcaccatcttagctagtatgatcatgttcaaggattgggcttctcaaagtggattgcaaattgctaccgagctatgtggctttgtgaccattttgtcaggaacttttcttctccacaagacaaaagacatgggaaacagtaccagcttacgcggctccacatcacactcgcctagagacactcctgtcttcataaactcaggttccagtcgcagctccaattccactagacctgcaatactataatcccacggctccgatagtagatcatctaacggtcaagatcgaggcaacacgagctcaaaagcctcaaagagaactttttttgggtgacaaatgagaaaaaaaacagagcaaatggggtttaattaaggctataattggttttttggataacggaaggtttagtgaatgatttgttagggatactatttgattgattgcttcatgtttatttgtttctaatattttttgtttgtttctcatatgagatataaagaaagtttt

SEQ ID NO: 105389 - protein, 336 aa, Arabidopsis thaliana
  peptide (1)..(336): Ceres Seq. ID no. 13617123
  misc_feature (4)..(303): Pfam Name: Protein of unknown function (DUF803) Pfam Description: Protein of unknown function (DUF803)
  misc_feature (1)..(336): Homolog of NCBI NO: 18414079 NR Description: expressed protein [Arabidopsis thaliana]
  misc_feature (4)..(336): Homolog of NCBI NO: 21593618 NR Description: unknown [Arabidopsis thaliana]
  misc_feature (1)..(334): Homolog of NCBI NO: 15229534 NR Description: purine permease - related [Arabidopsis thaliana] gb|AAF34307.1~gene_id:F14O13.5~similar to unknown protein
  misc_feature (4)..(307): Homolog of NCBI NO: 21742149 NR Description: OSJNBa0069D17.4 [Oryza sativa (japonica
  misc_feature (1)..(146): Homolog of NCBI NO: 7485690 NR Description: hypothetical protein F18A5.190 - Arabidopsis >gi|4455309|emb|CAB36844.1| hypothetical protein [Arabidopsis >gi|7268084|emb|CAB78422.1| hypothetical protein [Arabidopsis
  misc_feature (4)..(308): Homolog of NCBI NO: 18399280 NR Description: purine permease - related [Arabidopsis thaliana]
  misc_feature (1)..(299): Homolog of NCBI NO: 20161440 NR Description: B1065E10.15 [Oryza sativa (japonica
  misc_feature (4)..(305): Homolog of NCBI NO: 18409942 NR Description: expressed protein [Arabidopsis thaliana] unknown protein [Arabidopsis thaliana]
  misc_feature (4)..(299): Homolog of NCBI NO: 25406128 NR Description: unknown protein F17M19.5 [imported] - Arabidopsis
  misc_feature (4)..(298): Homolog of NCBI NO: 30681265 NR Description: expressed protein [Arabidopsis thaliana]
MEEMSPDNIHGVILAVSSSIFIGSSFIIKKKGLKKAGVSGARAGEGGYGYLYEPWWWAGMITMIVGEIANFAAYAFAPAILVTPLGALSIIFSAVLAHFILEEKLHMFGILGCVLCVVGSTTIVLHAPHEQGIESVKQVWHLATEPGFLAYSAVVLVVVLALIFYYEPRYGKTHMIVYVGICSLMGSLTVMSVKAVAIAIKLTFSGMNQFKYFHAWIFIIVVTICCILQINYLNKALDNFNTAVISPVYYVMFTTFTILASMIMFKDWASQSGLQIATELCGFVTILSGTFLLHKTKDMGNSTSLRGSTSHSPRDTPVFINSGSSRSSNSTRPAIL

SEQ ID NO: 105390 - protein, 333 aa, Arabidopsis thaliana
  peptide (1)..(333): Ceres Seq. ID no. 13617124
  misc_feature (1)..(300): Pfam Name: Protein of unknown function (DUF803) Pfam Description: Protein of unknown function (DUF803)
  misc_feature (1)..(333): Homolog of NCBI NO: 18414079 NR Description: expressed protein [Arabidopsis thaliana]
  misc_feature (1)..(333): Homolog of NCBI NO: 21593618 NR Description: unknown [Arabidopsis thaliana]
  misc_feature (1)..(331): Homolog of NCBI NO: 15229534 NR Description: purine permease - related [Arabidopsis thaliana] gb|AAF34307.1~gene_id:F14O13.5~similar to unknown protein
  misc_feature (1)..(304): Homolog of NCBI NO: 21742149 NR Description: OSJNBa0069D17.4 [Oryza sativa (japonica
  misc_feature (1)..(143): Homolog of NCBI NO: 7485690 NR Description: hypothetical protein F18A5.190 - Arabidopsis >gi|4455309|emb|CAB36844.1| hypothetical protein [Arabidopsis >gi|7268084|emb|CAB78422.1| hypothetical protein [Arabidopsis
  misc_feature (1)..(305): Homolog of NCBI NO: 18399280 NR Description: purine permease - related [Arabidopsis thaliana]
  misc_feature (1)..(296): Homolog of NCBI NO: 20161440 NR Description: B1065E10.15 [Oryza sativa (japonica
  misc_feature (1)..(302): Homolog of NCBI NO: 18409942 NR Description: expressed protein [Arabidopsis thaliana] unknown protein [Arabidopsis thaliana]
  misc_feature (1)..(296): Homolog of NCBI NO: 25406128 NR Description: unknown protein F17M19.5 [imported] - Arabidopsis
  misc_feature (1)..(295): Homolog of NCBI NO: 30681265 NR Description: expressed protein [Arabidopsis thaliana]
MSPDNIHGVILAVSSSIFIGSSFIIKKKGLKKAGVSGARAGEGGYGYLYEPWWWAGMITMIVGEIANFAAYAFAPAILVTPLGALSIIFSAVLAHFILEEKLHMFGILGCVLCVVGSTTIVLHAPHEQGIESVKQVWHLATEPGFLAYSAVVLVVVLALIFYYEPRYGKTHMIVYVGICSLMGSLTVMSVKAVAIAIKLTFSGMNQFKYFHAWIFIIVVTICCILQINYLNKALDNFNTAVISPVYYVMFTTFTILASMIMFKDWASQSGLQIATELCGFVTILSGTFLLHKTKDMGNSTSLRGSTSHSPRDTPVFINSGSSRSSNSTRPAIL

SEQ ID NO: 105391 - protein, 277 aa, Arabidopsis thaliana
  peptide (1)..(277): Ceres Seq. ID no. 13617125
  misc_feature (1)..(244): Pfam Name: Protein of unknown function (DUF803) Pfam Description: Protein of unknown function (DUF803)
  misc_feature (1)..(277): Homolog of NCBI NO: 18414079 NR Description: expressed protein [Arabidopsis thaliana]
  misc_feature (1)..(277): Homolog of NCBI NO: 21593618 NR Description: unknown [Arabidopsis thaliana]
  misc_feature (1)..(275): Homolog of NCBI NO: 15229534 NR Description: purine permease - related [Arabidopsis thaliana] gb|AAF34307.1~gene_id:F14O13.5~similar to unknown protein
  misc_feature (1)..(248): Homolog of NCBI NO: 21742149 NR Description: OSJNBa0069D17.4 [Oryza sativa (japonica
  misc_feature (1)..(87): Homolog of NCBI NO: 7485690 NR Description: hypothetical protein F18A5.190 - Arabidopsis >gi|4455309|emb|CAB36844.1| hypothetical protein [Arabidopsis >gi|7268084|emb|CAB78422.1| hypothetical protein [Arabidopsis
  misc_feature (1)..(249): Homolog of NCBI NO: 18399280 NR Description: purine permease - related [Arabidopsis thaliana]
  misc_feature (1)..(240): Homolog of NCBI NO: 20161440 NR Description: B1065E10.15 [Oryza sativa (japonica
  misc_feature (1)..(246): Homolog of NCBI NO: 18409942 NR Description: expressed protein [Arabidopsis thaliana] unknown protein [Arabidopsis thaliana]
  misc_feature (1)..(240): Homolog of NCBI NO: 25406128 NR Description: unknown protein F17M19.5 [imported] - Arabidopsis
  misc_feature (1)..(239): Homolog of NCBI NO: 30681265 NR Description: expressed protein [Arabidopsis thaliana]
MITMIVGEIANFAAYAFAPAILVTPLGALSIIFSAVLAHFILEEKLHMFGILGCVLCVVGSTTIVLHAPHEQGIESVKQVWHLATEPGFLAYSAVVLVVVLALIFYYEPRYGKTHMIVYVGICSLMGSLTVMSVKAVAIAIKLTFSGMNQFKYFHAWIFIIVVTICCILQINYLNKALDNFNTAVISPVYYVMFTTFTILASMIMFKDWASQSGLQIATELCGFVTILSGTFLLHKTKDMGNSTSLRGSTSHSPRDTPVFINSGSSRSSNSTRPAIL

SEQ ID NO: 105392 - DNA, 618 bp, Arabidopsis thaliana
  misc_feature (1)..(618): Ceres Seq. ID no. 13617134
  misc_feature: MA Experiment ID: 108434 Result: Down-regulated in Transcription
  misc_feature: MA Experiment 108434 PARAMETER Experiment Name: At_Root_Tips_cDNA_P Parameter: Tissue Value: Root Tips
  misc_feature: MA Experiment ID: 108462 Result: Up-regulated in Transcription
  misc_feature: MA Experiment 108462 PARAMETER Experiment Name: At_Germinating_Seeds_cDNA_P Parameter: Age (day) Value: 2 vs. 0
  misc_feature: MA Experiment 108462 PARAMETER Experiment Name: At_Germinating_Seeds_cDNA_P Parameter: Tissue Value: Germinating Seeds
  misc_feature: MA Experiment ID: 108464 Result: Up-regulated in Transcription
  misc_feature: MA Experiment 108464 PARAMETER Experiment Name: At_Germinating_Seeds_cDNA_P Parameter: Age (day) Value: 4 vs. 0
  misc_feature: MA Experiment 108464 PARAMETER Experiment Name: At_Germinating_Seeds_cDNA_P Parameter: Tissue Value: Germinating Seeds
  misc_feature: MA Experiment ID: 108573 Result: Down-regulated in Transcription
  misc_feature: MA Experiment 108573 PARAMETER Experiment Name: At_Drought_cDNA_P Parameter: Timepoint (hr) Value: 6
  misc_feature: MA Experiment 108573 PARAMETER Experiment Name: At_Drought_cDNA_P Parameter: Tissue Value: Aerial
  misc_feature: MA Experiment 108573 PARAMETER Experiment Name: At_Drought_cDNA_P Parameter: Treatment Value: Drought vs. No Drought
  misc_feature: MA Experiment ID: 20000111 Result: Down-regulated in Transcription
  misc_feature: MA Experiment 20000111 PARAMETER Experiment Name: At_42deg_Heat_cDNA_P Parameter: Temperature (deg C) Value: 42 vs. 22
  misc_feature: MA Experiment 20000111 PARAMETER Experiment Name: At_42deg_Heat_cDNA_P Parameter: Timepoint (hr) Value: 6
  misc_feature: MA Experiment 20000111 PARAMETER Experiment Name: At_42deg_Heat_cDNA_P Parameter: Tissue Value: Aerial
  misc_feature: MA Experiment ID: 20000112 Result: Down-regulated in Transcription
  misc_feature: MA Experiment 20000112 PARAMETER Experiment Name: At_42deg_Heat_cDNA_P Parameter: Temperature (deg C) Value: 42 vs. 22
  misc_feature: MA Experiment 20000112 PARAMETER Experiment Name: At_42deg_Heat_cDNA_P Parameter: Timepoint (hr) Value: 2
  misc_feature: MA Experiment 20000112 PARAMETER Experiment Name: At_42deg_Heat_cDNA_P Parameter: Tissue Value: Aerial
  misc_feature: MA Experiment ID: 20000144 Result: Down-regulated in Transcription
  misc_feature: MA Experiment 20000144 PARAMETER Experiment Name: At_42deg_Heat_cDNA_P Parameter: Temperature (deg C) Value: 42 vs. 22
  misc_feature: MA Experiment 20000144 PARAMETER Experiment Name: At_42deg_Heat_cDNA_P Parameter: Timepoint (hr) Value: 1
  misc_feature: MA Experiment 20000144 PARAMETER Experiment Name: At_42deg_Heat_cDNA_P Parameter: Tissue Value: Aerial
  misc_feature: MA Experiment ID: 20000171 Result: Down-regulated in Transcription
  misc_feature: MA Experiment 20000171 PARAMETER Experiment Name: At_42deg_Heat_P Parameter: Age (day) Value: 14
  misc_feature: MA Experiment 20000171 PARAMETER Experiment Name: At_42deg_Heat_P Parameter: Organism Value: A. thaliana
  misc_feature: MA Experiment 20000171 PARAMETER Experiment Name: At_42deg_Heat_P Parameter: Plant Line Value: WS
  misc_feature: MA Experiment 20000171 PARAMETER Experiment Name: At_42deg_Heat_P Parameter: Temperature (deg C) Value: 42 vs. 22
  misc_feature: MA Experiment 20000171 PARAMETER Experiment Name: At_42deg_Heat_P Parameter: Timepoint (hr) Value: 1
  misc_feature: MA Experiment 20000171 PARAMETER Experiment Name: At_42deg_Heat_P Parameter: Tissue Value: Aerial
  misc_feature: MA Experiment ID: 20000173 Result: Down-regulated in Transcription
  misc_feature: MA Experiment 20000173 PARAMETER Experiment Name: At_42deg_Heat_P Parameter: Age (day) Value: 14
  misc_feature: MA Experiment 20000173 PARAMETER Experiment Name: At_42deg_Heat_P Parameter: Organism Value: A. thaliana
  misc_feature: MA Experiment 20000173 PARAMETER Experiment Name: At_42deg_Heat_P Parameter: Plant Line Value: WS
  misc_feature: MA Experiment 20000173 PARAMETER Experiment Name: At_42deg_Heat_P Parameter: Temperature (deg C) Value: 42 vs. 22
  misc_feature: MA Experiment 20000173 PARAMETER Experiment Name: At_42deg_Heat_P Parameter: Timepoint (hr) Value: 6
  misc_feature: MA Experiment 20000173 PARAMETER Experiment Name: At_42deg_Heat_P Parameter: Tissue Value: Aerial
  misc_feature: MA Experiment ID: 20000234 Result: Up-regulated in Transcription
  misc_feature: MA Experiment 20000234 PARAMETER Experiment Name: At_Siliques_P Parameter: Age (day) Value: 21
  misc_feature: MA Experiment 20000234 PARAMETER Experiment Name: At_Siliques_P Parameter: Organism Value: A. thaliana
  misc_feature: MA Experiment 20000234 PARAMETER Experiment Name: At_Siliques_P Parameter: Plant Line Value: WS
  misc_feature: MA Experiment 20000234 PARAMETER Experiment Name: At_Siliques_P Parameter: Tissue Value: Less Than 5mm Siliques vs. Whole Plant
  misc_feature: MA Experiment ID: 20000794 Result: Down-regulated in Transcription
  misc_feature: MA Experiment 20000794 PARAMETER Experiment Name: At_Petals_P Parameter: Age (day) Value: 23-25 days
  misc_feature: MA Experiment 20000794 PARAMETER Experiment Name: At_Petals_P Parameter: Plant Line Value: WS
  misc_feature: MA Experiment 20000794 PARAMETER Experiment Name: At_Petals_P Parameter: Tissue Value: Petals vs. Whole plant
  misc_feature: MA Experiment ID: 20001911 Result: Down-regulated in Transcription
  misc_feature: MA Experiment 20001911 PARAMETER Experiment Name: At_Drought_Reproduction_P Parameter: Age (day) Value: 40
  misc_feature: MA Experiment 20001911 PARAMETER Experiment Name: At_Drought_Reproduction_P Parameter: Organism Value: A. thaliana
  misc_feature: MA Experiment 20001911 PARAMETER Experiment Name: At_Drought_Reproduction_P Parameter: Plant Line Value: WS
  misc_feature: MA Experiment 20001911 PARAMETER Experiment Name: At_Drought_Reproduction_P Parameter: Timepoint (day) Value: 10
  misc_feature: MA Experiment 20001911 PARAMETER Experiment Name: At_Drought_Reproduction_P Parameter: Tissue Value: Flowers
  misc_feature: MA Experiment 20001911 PARAMETER Experiment Name: At_Drought_Reproduction_P Parameter: Treatment Value: Drought vs. No Drought
catttctgcttcttcttctgcttagagacagagaaatagagagagatcgcgtcggcacaatctgcaatttccaacatcgacatgtttaactctacagcgttggtgattttcgccattcttttcctcttaatctccgccgatgcgttcccgattccgtctcccaacggagagatcgacgcaatgttgatccgaaacagtatcatcggagaagatgaagatctaatgccaactgagatcagccggagagtactgatggcgcagaaacggtacatcggctacgaaacgctaaggagagacatggttccttgtcagaaaccaggagcttcttactacgattgtcgctctggacaagctaattcttacagcagaggctgtgacaccattaccagatgcgctagagacacaaacgacatcaacacatgaaggtaagatccaagaaattgccaaaattggaagctttttggccgaggcaagtaaattatatgattaagcttttgcattgctgttgttatatatgtgtttttgacataagaattgttataatatatgtaactctgccactagttggttatcaatgttcaattattgagatctataaattatattaagtttttttgg

SEQ ID NO: 105393 - protein, 113 aa, Arabidopsis thaliana
  peptide (1)..(113): Ceres Seq. ID no. 13617135
  misc_feature (42)..(106): Pfam Name: Rapid ALkalinization Factor (RALF) Pfam Description: Rapid ALkalinization Factor (RALF)
  misc_feature (1)..(113): Homolog of NCBI NO: 18414108 NR Description: expressed protein [Arabidopsis thaliana]
  misc_feature (1)..(113): Homolog of NCBI NO: 21553907 NR Description: unknown [Arabidopsis thaliana]
  misc_feature (1)..(62): Homolog of NCBI NO: 7459901 NR Description: hypothetical protein DL3015C - Arabidopsis >gi|2244751|emb|CAB10174.1| hypothetical protein [Arabidopsis >gi|7268099|emb|CAB78437.1| hypothetical protein [Arabidopsis
  misc_feature (1)..(113): Homolog of NCBI NO: 18403901 NR Description: expressed protein [Arabidopsis thaliana] dbj|BAA85220.1~gene_id:MYM9.15~similar to unknown protein
  misc_feature (5)..(106): Homolog of NCBI NO: 18414528 NR Description: expressed protein [Arabidopsis thaliana]
  misc_feature (41)..(106): Homolog of NCBI NO: 18397246 NR Description: expressed protein [Arabidopsis thaliana] unknown protein [Arabidopsis thaliana] RALF precursor [Arabidopsis thaliana] >gi|27754284|gb|AAO22595.1|
  misc_feature (41)..(106): Homolog of NCBI NO: 18401177 NR Description: expressed protein [Arabidopsis thaliana] gb|AAF02876.1~gene_id:MGL6.3~similar to unknown protein thaliana] >gi|15081817|gb|AAK82563.1| AT3g16570/MGL6_2
  misc_feature (41)..(104): Homolog of NCBI NO: 15218637 NR Description: expressed protein [Arabidopsis thaliana]
  misc_feature (7)..(106): Homolog of NCBI NO: 15217877 NR Description: expressed protein [Arabidopsis thaliana]
  misc_feature (42)..(104): Homolog of NCBI NO: 34902918 NR Description: unnamed protein product [Oryza sativa (japonica group)] >gi|6016877|dbj|BAA85220.1| unnamed protein product
MFNSTALVIFAILFLLISADAFPIPSPNGEIDAMLIRNSIIGEDEDLMPTEISRRVLMAQKRYIGYETLRRDMVPCQKPGASYYDCRSGQANSYSRGCDTITRCARDTNDINT

SEQ ID NO: 105394 - protein, 80 aa, Arabidopsis thaliana; identical to SEQ ID NO: 30497
  peptide (1)..(80): Ceres Seq. ID no. 13617136
  misc_feature (9)..(73): Pfam Name: Rapid ALkalinization Factor (RALF) Pfam Description: Rapid ALkalinization Factor (RALF)
  misc_feature (1)..(80): Homolog of NCBI NO: 18414108 NR Description: expressed protein [Arabidopsis thaliana]
  misc_feature (1)..(80): Homolog of NCBI NO: 21553907 NR Description: unknown [Arabidopsis thaliana]
  misc_feature (1)..(29): Homolog of NCBI NO: 7459901 NR Description: hypothetical protein DL3015C - Arabidopsis >gi|2244751|emb|CAB10174.1| hypothetical protein [Arabidopsis >gi|7268099|emb|CAB78437.1| hypothetical protein [Arabidopsis
  misc_feature (1)..(80): Homolog of NCBI NO: 18403901 NR Description: expressed protein [Arabidopsis thaliana] dbj|BAA85220.1~gene_id:MYM9.15~similar to unknown protein
  misc_feature (1)..(73): Homolog of NCBI NO: 18414528 NR Description: expressed protein [Arabidopsis thaliana]
  misc_feature (8)..(73): Homolog of NCBI NO: 18397246 NR Description: expressed protein [Arabidopsis thaliana] unknown protein [Arabidopsis thaliana] RALF precursor [Arabidopsis thaliana] >gi|27754284|gb|AAO22595.1|
  misc_feature (8)..(73): Homolog of NCBI NO: 18401177 NR Description: expressed protein [Arabidopsis thaliana] gb|AAF02876.1~gene_id:MGL6.3~similar to unknown protein thaliana] >gi|15081817|gb|AAK82563.1| AT3g16570/MGL6_2
  misc_feature (8)..(71): Homolog of NCBI NO: 15218637 NR Description: expressed protein [Arabidopsis thaliana]
  misc_feature (1)..(73): Homolog of NCBI NO: 15217877 NR Description: expressed protein [Arabidopsis thaliana]
  misc_feature (9)..(71): Homolog of NCBI NO: 34902918 NR Description: unnamed protein product [Oryza sativa (japonica group)] >gi|6016877|dbj|BAA85220.1| unnamed protein product

SEQ ID NO: 105395 - protein, 66 aa, Arabidopsis thaliana; identical to SEQ ID NO: 30498
  peptide (1)..(66): Ceres Seq. ID no. 13617137
  misc_feature (1)..(59): Pfam Name: Rapid ALkalinization Factor (RALF) Pfam Description: Rapid ALkalinization Factor (RALF)
  misc_feature (1)..(66): Homolog of NCBI NO: 18414108 NR Description: expressed protein [Arabidopsis thaliana]
  misc_feature (1)..(66): Homolog of NCBI NO: 21553907 NR Description: unknown [Arabidopsis thaliana]
  misc_feature (1)..(15): Homolog of NCBI NO: 7459901 NR Description: hypothetical protein DL3015C - Arabidopsis >gi|2244751|emb|CAB10174.1| hypothetical protein [Arabidopsis >gi|7268099|emb|CAB78437.1| hypothetical protein [Arabidopsis
  misc_feature (1)..(66): Homolog of NCBI NO: 18403901 NR Description: expressed protein [Arabidopsis thaliana] dbj|BAA85220.1~gene_id:MYM9.15~similar to unknown protein
  misc_feature (1)..(59): Homolog of NCBI NO: 18414528 NR Description: expressed protein [Arabidopsis thaliana]
  misc_feature (1)..(59): Homolog of NCBI NO: 18397246 NR Description: expressed protein [Arabidopsis thaliana] unknown protein [Arabidopsis thaliana] RALF precursor [Arabidopsis thaliana] >gi|27754284|gb|AAO22595.1|
  misc_feature (1)..(59): Homolog of NCBI NO: 18401177 NR Description: expressed protein [Arabidopsis thaliana] gb|AAF02876.1~gene_id:MGL6.3~similar to unknown protein thaliana] >gi|15081817|gb|AAK82563.1| AT3g16570/MGL6_2
  misc_feature (1)..(57): Homolog of NCBI NO: 15218637 NR Description: expressed protein [Arabidopsis thaliana]
  misc_feature (1)..(59): Homolog of NCBI NO: 15217877 NR Description: expressed protein [Arabidopsis thaliana]
  misc_feature (1)..(57): Homolog of NCBI NO: 34902918 NR Description: unnamed protein product [Oryza sativa (japonica group)] >gi|6016877|dbj|BAA85220.1| unnamed protein product

SEQ ID NO: 105396 - DNA, 1226 bp, Arabidopsis thaliana
  misc_feature (1)..(1226): Ceres Seq. ID no. 13617138
  misc_feature: MA Experiment ID: 108434 Result: Up-regulated in Transcription
  misc_feature: MA Experiment 108434 PARAMETER Experiment Name: At_Root_Tips_cDNA_P Parameter: Tissue Value: Root Tips
  misc_feature: MA Experiment ID: 108463 Result: Down-regulated in Transcription
  misc_feature: MA Experiment 108463 PARAMETER Experiment Name: At_Germinating_Seeds_cDNA_P Parameter: Age (day) Value: 3 vs. 0
  misc_feature: MA Experiment 108463 PARAMETER Experiment Name: At_Germinating_Seeds_cDNA_P Parameter: Tissue Value: Germinating Seeds
acactttggatagctgccgccgaagttttgtgcaatggcgacgaaaccgacgtttcagctgttttcttcttctcaaggttctggtctaggtttagggttccttgattcatcagagccagctcttcctccacctcctcctcctgttgaagtattatccttcgaggtgtcttcctccactgatttcgaagtggataaattgactatcggcgagatcactcttttgaagggtcgtgtgagcactaaagaggtttttggattgcctaattcagatttggttcctggagtctatgaaggcgggcttaagctttgggaaggatcgattgatcttgttaaagctcttgagaaagaatcacaaaccggaaacttatcattttccggaaagcgggttctcgagcttggatgtggtcatgcacttccaggaatctatgcgtgtctcaagggttcagatgctgttcatttccaggacttcaatgctgaggttcttcgatgtctcaccattccgaatctgaatgctaatctgtctgagaagtcttcctctgtctcagtaagtgaaacagaagtacgcttctttgctggtgagtggagtgaagttcatcaggttcttccactagttaatagtgatggtgagactaataagaagggtggttatgacatcattctaatggctgagacgatatattccatctccgctcagaaaagtcaatatgaattgattaaaaggtgtctggcgtatcctgatggagcagtgtatatggctgcaaagaagtactatttcggggtcggtggagggacaaggcaattcttgtctatgatagagaaagacggtgctcttgcttcaacgttggtgtctcaagtcacagatggttcctcaaatgtcagagaggtatggaagctttcgtacaagtaagtcgaagctatactggaattcagtgtccaacgatctgattttagtggatttgggttgctcataaaaatgagtggaaattcaaaatctctcatccatgtgtttagcttatagactctcctgactgtgttataataattgcttagtttttcattttggtacattttctggcttaacgaaaggcttatgtgatctgccgttgattctcaccggaccaaagttccaaactaagctttagttggagtcgcagtttatatattgtaaatctctcacatgattagttatgcttttgagaataaatccaccagctcgacctgtcttg

SEQ ID NO: 105397 - protein, 290 aa, Arabidopsis thaliana; identical to SEQ ID NO: 36065
  peptide (1)..(290): Ceres Seq. ID no. 13617139
  misc_feature (1)..(290): Homolog of NCBI NO: 18414120 NR Description: expressed protein [Arabidopsis thaliana] unknown protein [Arabidopsis thaliana]
  misc_feature (1)..(290): Homolog of NCBI NO: 21554662 NR Description: unknown [Arabidopsis thaliana]
  misc_feature (1)..(148): Homolog of NCBI NO: 7485012 NR Description: hypothetical protein - Arabidopsis thaliana hypothetical protein [Arabidopsis thaliana]
  misc_feature (161)..(271): Homolog of NCBI NO: 7485012 NR Description: hypothetical protein - Arabidopsis thaliana hypothetical protein [Arabidopsis thaliana]
  misc_feature (26)..(196): Homolog of NCBI NO: 18406207 NR Description: expressed protein [Arabidopsis thaliana] At2g43320/T1O24.6 [Arabidopsis thaliana] expressed protein [Arabidopsis thaliana]
  misc_feature (198)..(290): Homolog of NCBI NO: 18406207 NR Description: expressed protein [Arabidopsis thaliana] At2g43320/T1O24.6 [Arabidopsis thaliana] expressed protein [Arabidopsis thaliana]
  misc_feature (26)..(196): Homolog of NCBI NO: 16226903 NR Description: At2g43320/T1O24.6 [Arabidopsis thaliana]
  misc_feature (198)..(290): Homolog of NCBI NO: 16226903 NR Description: At2g43320/T1O24.6 [Arabidopsis thaliana]
  misc_feature (26)..(194): Homolog of NCBI NO: 38346224 NR Description: OJ990528_30.4 [Oryza sativa (japonica
  misc_feature (198)..(290): Homolog of NCBI NO: 38346224 NR Description: OJ990528_30.4 [Oryza sativa (japonica

SEQ ID NO: 105398 - DNA, 613 bp, Arabidopsis thaliana
  misc_feature (1)..(613): Ceres Seq. ID no. 13617168
  misc_feature: MA Experiment ID: 108433 Result: Up-regulated in Transcription
  misc_feature: MA Experiment 108433 PARAMETER Experiment Name: At_rhl_Mutant2_cDNA_P Parameter: Age (day) Value: 7
  misc_feature: MA Experiment 108433 PARAMETER Experiment Name: At_rhl_Mutant2_cDNA_P Parameter: Organism Value: A. thaliana
  misc_feature: MA Experiment 108433 PARAMETER Experiment Name: At_rhl_Mutant2_cDNA_P Parameter: Plant Line Value: rhl Mutant vs. wt landsburg
  misc_feature: MA Experiment 108433 PARAMETER Experiment Name: At_rhl_Mutant2_cDNA_P Parameter: Tissue Value: Roots
  misc_feature: MA Experiment ID: 108488 Result: Down-regulated in Transcription
  misc_feature: MA Experiment ID: 108595 Result: Up-regulated in Transcription
  misc_feature: MA Experiment 108595 PARAMETER Experiment Name: At_Ler-pi_Ovule_cDNA_P Parameter: Plant Line Value: null
  misc_feature: MA Experiment ID: 20000069 Result: Up-regulated in Transcription
  misc_feature: MA Experiment 20000069 PARAMETER Experiment Name: At_100uM_ABA_Mutants_cDNA_P Parameter: Plant Line Value: CS23
  misc_feature: MA Experiment 20000069 PARAMETER Experiment Name: At_100uM_ABA_Mutants_cDNA_P Parameter: Timepoint (hr) Value: 6
  misc_feature: MA Experiment 20000069 PARAMETER Experiment Name: At_100uM_ABA_Mutants_cDNA_P Parameter: Tissue Value: Aerial
  misc_feature: MA Experiment 20000069 PARAMETER Experiment Name: At_100uM_ABA_Mutants_cDNA_P Parameter: Treatment Value: 100uM ABA vs. No Treatment
  misc_feature: MA Experiment ID: 20000070 Result: Up-regulated in Transcription
  misc_feature: MA Experiment 20000070 PARAMETER Experiment Name: At_100uM_ABA_Mutants_cDNA_P Parameter: Plant Line Value: CS24
  misc_feature: MA Experiment 20000070 PARAMETER Experiment Name: At_100uM_ABA_Mutants_cDNA_P Parameter: Timepoint (hr) Value: 6
  misc_feature: MA Experiment 20000070 PARAMETER Experiment Name: At_100uM_ABA_Mutants_cDNA_P Parameter: Tissue Value: Aerial
  misc_feature: MA Experiment 20000070 PARAMETER Experiment Name: At_100uM_ABA_Mutants_cDNA_P Parameter: Treatment Value: 100uM ABA vs. No Treatment
  misc_feature: MA Experiment ID: 20000071 Result: Up-regulated in Transcription
  misc_feature: MA Experiment 20000071 PARAMETER Experiment Name: At_100uM_ABA_Mutants_cDNA_P Parameter: Plant Line Value: CS8104
  misc_feature: MA Experiment 20000071 PARAMETER Experiment Name: At_100uM_ABA_Mutants_cDNA_P Parameter: Timepoint (hr) Value: 6
  misc_feature: MA Experiment 20000071 PARAMETER Experiment Name: At_100uM_ABA_Mutants_cDNA_P Parameter: Tissue Value: Aerial
  misc_feature: MA Experiment 20000071 PARAMETER Experiment Name: At_100uM_ABA_Mutants_cDNA_P Parameter: Treatment Value: 100uM ABA vs. No Treatment
  misc_feature: MA Experiment ID: 20000072 Result: Up-regulated in Transcription
  misc_feature: MA Experiment 20000072 PARAMETER Experiment Name: At_100uM_ABA_Mutants_cDNA_P Parameter: Plant Line Value: CS8105
  misc_feature: MA Experiment 20000072 PARAMETER Experiment Name: At_100uM_ABA_Mutants_cDNA_P Parameter: Timepoint (hr) Value: 6
  misc_feature: MA Experiment 20000072 PARAMETER Experiment Name: At_100uM_ABA_Mutants_cDNA_P Parameter: Tissue Value: Aerial
  misc_feature: MA Experiment 20000072 PARAMETER Experiment Name: At_100uM_ABA_Mutants_cDNA_P Parameter: Treatment Value: 100uM ABA vs. No Treatment
  misc_feature: MA Experiment ID: 20000086 Result: Up-regulated in Transcription
  misc_feature: MA Experiment 20000086 PARAMETER Experiment Name: At_100uM_ABA_Mutants_cDNA_P Parameter: Plant Line Value: CS22
  misc_feature: MA Experiment 20000086 PARAMETER Experiment Name: At_100uM_ABA_Mutants_cDNA_P Parameter: Timepoint (hr) Value: 6
  misc_feature: MA Experiment 20000086 PARAMETER Experiment Name: At_100uM_ABA_Mutants_cDNA_P Parameter: Tissue Value: Aerial
  misc_feature: MA Experiment 20000086 PARAMETER Experiment Name: At_100uM_ABA_Mutants_cDNA_P Parameter: Treatment Value: 100uM ABA vs. No Treatment
  misc_feature: MA Experiment ID: 20000087 Result: Up-regulated in Transcription
  misc_feature: MA Experiment 20000087 PARAMETER Experiment Name: At_100uM_ABA_Mutants_cDNA_P Parameter: Plant Line Value: WS
  misc_feature: MA Experiment 20000087 PARAMETER Experiment Name: At_100uM_ABA_Mutants_cDNA_P Parameter: Timepoint (hr) Value: 6
  misc_feature: MA Experiment 20000087 PARAMETER Experiment Name: At_100uM_ABA_Mutants_cDNA_P Parameter: Tissue Value: Aerial
  misc_feature: MA Experiment 20000087 PARAMETER Experiment Name: At_100uM_ABA_Mutants_cDNA_P Parameter: Treatment Value: 100uM ABA vs. No Treatment
  misc_feature: MA Experiment ID: 20000088 Result: Up-regulated in Transcription
  misc_feature: MA Experiment 20000088 PARAMETER Experiment Name: At_100uM_ABA_Mutants_cDNA_P Parameter: Plant Line Value: Landsberg
  misc_feature: MA Experiment 20000088 PARAMETER Experiment Name: At_100uM_ABA_Mutants_cDNA_P Parameter: Timepoint (hr) Value: 6
  misc_feature: MA Experiment 20000088 PARAMETER Experiment Name: At_100uM_ABA_Mutants_cDNA_P Parameter: Tissue Value: Aerial
  misc_feature: MA Experiment 20000088 PARAMETER Experiment Name: At_100uM_ABA_Mutants_cDNA_P Parameter: Treatment Value: 100uM ABA vs. No Treatment
  misc_feature: MA Experiment ID: 20000089 Result: Up-regulated in Transcription
  misc_feature: MA Experiment ID: 20000090 Result: Up-regulated in Transcription
  misc_feature: MA Experiment ID: 20000117 Result: Up-regulated in Transcription
  misc_feature: MA Experiment 20000117 PARAMETER Experiment Name: At_100uM_ABA_Mutants_cDNA_P Parameter: Plant Line Value: Columbia
  misc_feature: MA Experiment 20000117 PARAMETER Experiment Name: At_100uM_ABA_Mutants_cDNA_P Parameter: Timepoint (hr) Value: 6
  misc_feature: MA Experiment 20000117 PARAMETER Experiment Name: At_100uM_ABA_Mutants_cDNA_P Parameter: Tissue Value: Aerial
  misc_feature: MA Experiment 20000117 PARAMETER Experiment Name: At_100uM_ABA_Mutants_cDNA_P Parameter: Treatment Value: 100uM ABA vs. No Treatment
  misc_feature: MA Experiment ID: 20000184 Result: Down-regulated in Transcription
  misc_feature: MA Experiment 20000184 PARAMETER Experiment Name: At_Shoots__P Parameter: Age (day) Value: 7
  misc_feature: MA Experiment 20000184 PARAMETER Experiment Name: At_Shoots__P Parameter: Tissue Value: Shoots vs. Whole Plant
  misc_feature: MA Experiment ID: 20000185 Result: Down-regulated in Transcription
  misc_feature: MA Experiment 20000185 PARAMETER Experiment Name: At_Roots__P Parameter: Age (day) Value: 7 vs. 21
  misc_feature: MA Experiment 20000185 PARAMETER Experiment Name: At_Roots__P Parameter: Organism Value: A. thaliana
  misc_feature: MA Experiment 20000185 PARAMETER Experiment Name: At_Roots__P Parameter: Tissue Value: Roots vs. Whole Plant
  misc_feature: MA Experiment ID: 20000235 Result: Down-regulated in Transcription
  misc_feature: MA Experiment 20000235 PARAMETER Experiment Name: At_Siliques_P Parameter: Age (day) Value: 21
  misc_feature: MA Experiment 20000235 PARAMETER Experiment Name: At_Siliques_P Parameter: Organism Value: A. thaliana
  misc_feature: MA Experiment 20000235 PARAMETER Experiment Name: At_Siliques_P Parameter: Plant Line Value: WS
  misc_feature: MA Experiment 20000235 PARAMETER Experiment Name: At_Siliques_P Parameter: Tissue Value: 5-10mm Siliques vs. Whole Plant
  misc_feature: MA Experiment ID: 20000437 Result: Up-regulated in Transcription
  misc_feature: MA Experiment 20000437 PARAMETER Experiment Name: At_Drought_P Parameter: Age (day) Value: 8
  misc_feature: MA Experiment 20000437 PARAMETER Experiment Name: At_Drought_P Parameter: Organism Value: A. thaliana
  misc_feature: MA Experiment 20000437 PARAMETER Experiment Name: At_Drought_P Parameter: Plant Line Value: WS
  misc_feature: MA Experiment 20000437 PARAMETER Experiment Name: At_Drought_P Parameter: Timepoint (hr) Value: 24
  misc_feature: MA Experiment 20000437 PARAMETER Experiment Name: At_Drought_P Parameter: Tissue Value: Whole Plant
  misc_feature: MA Experiment 20000437 PARAMETER Experiment Name: At_Drought_P Parameter: Treatment Value: Drought vs. No Drought
  misc_feature: MA Experiment ID: 20000438 Result: Down-regulated in Transcription
  misc_feature: MA Experiment 20000438 PARAMETER Experiment Name: At_Shoots__P Parameter: Age (day) Value: 14
  misc_feature: MA Experiment 20000438 PARAMETER Experiment Name: At_Shoots__P Parameter: Tissue Value: Shoots vs. Whole Plant
  misc_feature: MA Experiment ID: 20001247 Result: Down-regulated in Transcription
  misc_feature: MA Experiment 20001247 PARAMETER Experiment Name: At_Far-red-induction_P Parameter: Age (day) Value: 7
  misc_feature: MA Experiment 20001247 PARAMETER Experiment Name: At_Far-red-induction_P Parameter: Light Value: Far-red vs. White
  misc_feature: MA Experiment 20001247 PARAMETER Experiment Name: At_Far-red-induction_P Parameter: Organism Value: A. thaliana
  misc_feature: MA Experiment 20001247 PARAMETER Experiment Name: At_Far-red-induction_P Parameter: Plant Line Value: Columbia
  misc_feature: MA Experiment 20001247 PARAMETER Experiment Name: At_Far-red-induction_P Parameter: Timepoint (hr) Value: 1
  misc_feature: MA Experiment 20001247 PARAMETER Experiment Name: At_Far-red-induction_P Parameter: Tissue Value: Whole Plant
attctttggagttacccaatttcgacgttgaacacaaacccttgcttctctcttctctgtttctctctcgcagcgaaaaatcatggcgattagctccttcaagcatgaacatcctcttgaaaagagacaagctgaagcagcacgtatcagggagaagtatccagacagaataccagtcattgtcgaaagagccgagaagagtgatgtcccggatattgataggaaaaagtacttggtcccagctgatttgactgttggccagtttgtttatgttgtacggaagcggatcaagctcagtcccgagaaagccatcttcatttttgtcaagaacattctaccaccaactgcggcaataatgtctgcaatttatgaagagcacaaagacgaagacgggtttctatacatgagttacagtggtgagaacacgttcgggatcttcttctaatgcgcttggaatatgtggatgcatcagattatcaatgtacagtctgtctatttctctgcttgtctctagttttcatgacattggacgaagcttttgaaacttgcatgctatgttattaacatgataaggtcttccgttcatggtgttaatttggctttatgctacact

SEQ ID NO: 105399 - protein, 120 aa, Arabidopsis thaliana; identical to SEQ ID NO: 26669
  peptide (1)..(120): Ceres Seq. ID no. 13617169
  misc_feature (14)..(117): Pfam Name: Microtubule associated protein 1A/1B, light chain 3 Pfam Description: Microtubule associated protein 1A/1B, light
  misc_feature (1)..(120): Homolog of NCBI NO: 15224577 NR Description: microtubule-associated protein -related
  misc_feature (1)..(120): Homolog of NCBI NO: 21592920 NR Description: putative microtubule-associated protein
  misc_feature (1)..(119): Homolog of NCBI NO: 40253647 NR Description: putative microtubial binding protein [Oryza
  misc_feature (1)..(118): Homolog of NCBI NO: 15220686 NR Description: symbiosis-related protein -related [Arabidopsis
  misc_feature (1)..(118): Homolog of NCBI NO: 38344173 NR Description: OSJNBa0053K19.12 [Oryza sativa (japonica
  misc_feature (1)..(117): Homolog of NCBI NO: 33146967 NR Description: putative microtubule associated protein [Oryza
  misc_feature (1)..(117): Homolog of NCBI NO: 34595981 NR Description: microtubule-associated protein 1 light chain 3
  misc_feature (1)..(117): Homolog of NCBI NO: 32401365 NR Description: autophagy [Triticum aestivum]
  misc_feature (1)..(120): Homolog of NCBI NO: 7446944 NR Description: hypothetical protein F8K4.23 - Arabidopsis
  misc_feature (1)..(117): Homolog of NCBI NO: 21615419 NR Description: microtubule associated protein [Cicer arietinum]

SEQ ID NO: 105400 - protein, 82 aa, Arabidopsis thaliana; identical to SEQ ID NO: 26670
  peptide (1)..(82): Ceres Seq. ID no. 13617170

SEQ ID NO: 105401 - DNA, 1386 bp, Arabidopsis thaliana
  misc_feature (1)..(1386): Ceres Seq. ID no. 13617179
  misc_feature: MA Experiment ID: 108462 Result: Down-regulated in Transcription
  misc_feature: MA Experiment 108462 PARAMETER Experiment Name: At_Germinating_Seeds_cDNA_P Parameter: Age (day) Value: 2 vs. 0
  misc_feature: MA Experiment 108462 PARAMETER Experiment Name: At_Germinating_Seeds_cDNA_P Parameter: Tissue Value: Germinating Seeds
  misc_feature: MA Experiment ID: 108464 Result: Down-regulated in Transcription
  misc_feature: MA Experiment 108464 PARAMETER Experiment Name: At_Germinating_Seeds_cDNA_P Parameter: Age (day) Value: 4 vs. 0
  misc_feature: MA Experiment 108464 PARAMETER Experiment Name: At_Germinating_Seeds_cDNA_P Parameter: Tissue Value: Germinating Seeds
  misc_feature: MA Experiment ID: 108561 Result: Down-regulated in Transcription
  misc_feature: MA Experiment 108561 PARAMETER Experiment Name: At_100uM_ABA_cDNA_P Parameter: Timepoint (hr) Value: 6
  misc_feature: MA Experiment 108561 PARAMETER Experiment Name: At_100uM_ABA_cDNA_P Parameter: Tissue Value: Aerial
  misc_feature: MA Experiment 108561 PARAMETER Experiment Name: At_100uM_ABA_cDNA_P Parameter: Treatment Value: 100uM ABA vs. No Treatment
  misc_feature: MA Experiment ID: 108595 Result: Down-regulated in Transcription
  misc_feature: MA Experiment 108595 PARAMETER Experiment Name: At_Ler-pi_Ovule_cDNA_P Parameter: Plant Line Value: null
  misc_feature: MA Experiment ID: 108668 Result: Down-regulated in Transcription
  misc_feature: MA Experiment 108668 PARAMETER Experiment Name: At_2mM_SA_cDNA_P Parameter: Plant Line Value: WS
  misc_feature: MA Experiment 108668 PARAMETER Experiment Name: At_2mM_SA_cDNA_P Parameter: Timepoint (hr) Value: 6
  misc_feature: MA Experiment 108668 PARAMETER Experiment Name: At_2mM_SA_cDNA_P Parameter: Treatment Value: 2mM SA vs. No Treatment
  misc_feature: MA Experiment ID: 20000087 Result: Down-regulated in Transcription
  misc_feature: MA Experiment 20000087 PARAMETER Experiment Name: At_100uM_ABA_Mutants_cDNA_P Parameter: Plant Line Value: WS
  misc_feature: MA Experiment 20000087 PARAMETER Experiment Name: At_100uM_ABA_Mutants_cDNA_P Parameter: Timepoint (hr) Value: 6
  misc_feature: MA Experiment 20000087 PARAMETER Experiment Name: At_100uM_ABA_Mutants_cDNA_P Parameter: Tissue Value: Aerial
  misc_feature: MA Experiment 20000087 PARAMETER Experiment Name: At_100uM_ABA_Mutants_cDNA_P Parameter: Treatment Value: 100uM ABA vs. No Treatment
  misc_feature: MA Experiment ID: 20000451 Result: Up-regulated in Transcription
  misc_feature: MA Experiment 20000451 PARAMETER Experiment Name: At_CS6879_Shoots-Roots_P Parameter: Age (day) Value: 14
  misc_feature: MA Experiment 20000451 PARAMETER Experiment Name: At_CS6879_Shoots-Roots_P Parameter: Organism Value: A. thaliana
  misc_feature: MA Experiment 20000451 PARAMETER Experiment Name: At_CS6879_Shoots-Roots_P Parameter: Plant Line Value: CS6879 vs. WS
  misc_feature: MA Experiment 20000451 PARAMETER Experiment Name: At_CS6879_Shoots-Roots_P Parameter: Tissue Value: Roots
  misc_feature: MA Experiment ID: 20000573 Result: Down-regulated in Transcription
  misc_feature: MA Experiment 20000573 PARAMETER Experiment Name: At_100uM_ABA_Mutants__P Parameter: Organism Value: A. thaliana
  misc_feature: MA Experiment 20000573 PARAMETER Experiment Name: At_100uM_ABA_Mutants__P Parameter: Plant Line Value: CS22 vs. Ler wt
  misc_feature: MA Experiment 20000573 PARAMETER Experiment Name: At_100uM_ABA_Mutants__P Parameter: Timepoint (hr) Value: N/A
  misc_feature: MA Experiment 20000573 PARAMETER Experiment Name: At_100uM_ABA_Mutants__P Parameter: Tissue Value: Whole Plant
  misc_feature: MA Experiment 20000573 PARAMETER Experiment Name: At_100uM_ABA_Mutants__P Parameter: Treatment Value: None
  misc_feature: MA Experiment ID: 20000574 Result: Down-regulated in Transcription
  misc_feature: MA Experiment 20000574 PARAMETER Experiment Name: At_100uM_ABA_Mutants__P Parameter: Organism Value: A. thaliana
  misc_feature: MA Experiment 20000574 PARAMETER Experiment Name: At_100uM_ABA_Mutants__P Parameter: Plant Line Value: CS23 vs. Ler wt
  misc_feature: MA Experiment 20000574 PARAMETER Experiment Name: At_100uM_ABA_Mutants__P Parameter: Timepoint (hr) Value: N/A
  misc_feature: MA Experiment 20000574 PARAMETER Experiment Name: At_100uM_ABA_Mutants__P Parameter: Tissue Value: Whole Plant
  misc_feature: MA Experiment 20000574 PARAMETER Experiment Name: At_100uM_ABA_Mutants__P Parameter: Treatment Value: None
  misc_feature: MA Experiment ID: 20001905 Result: Down-regulated in Transcription
  misc_feature: MA Experiment 20001905 PARAMETER Experiment Name: At_Drought_Reproduction_P Parameter: Age (day) Value: 40
  misc_feature: MA Experiment 20001905 PARAMETER Experiment Name: At_Drought_Reproduction_P Parameter: Organism Value: A. thaliana
  misc_feature: MA Experiment 20001905 PARAMETER Experiment Name: At_Drought_Reproduction_P Parameter: Plant Line Value: WS
  misc_feature: MA Experiment 20001905 PARAMETER Experiment Name: At_Drought_Reproduction_P Parameter: Timepoint (day) Value: 10
  misc_feature: MA Experiment 20001905 PARAMETER Experiment Name: At_Drought_Reproduction_P Parameter: Tissue Value: Rosettes
  misc_feature: MA Experiment 20001905 PARAMETER Experiment Name: At_Drought_Reproduction_P Parameter: Treatment Value: Drought vs. No Drought
atctatctgattctcactatcactactgacacaaatccttttccttttgttcctctttctctaaaccaatctttaaaacaacttattcgtcttcaagatttctccaacaagtcctaccatgtccggcgaaggagacacgaccctcaaagctatctgttacaagcctggctctctccagttactcgatcagaggaagcttcctttagagactatttacttagagattcgtgatgcttcagatggatggagtgctattcaggaaatggttgtacgtggtgctcctgctatagctattgctgctgctctttctttggctgttgaagttttcaactttcatggttttgatggatcagcttcagatgctgttgcttttcttgagaacaagttggattatttagtgtcaagccgtccaacagcagttaatcttgcagatgctgctttgaaacttaaacatgttatagcaaaggccttggctactgccaccgaagccaaatccattttcaaggcatatattgaagctagtgaggatatgcttgaagatgatgttgtttcaaacaaagctataggaaactttggtttaagcttgttgaggcaacaagccaagaatcctgataagctttctgttttgacccattgcaacactggcagccttgctaccgccggatatggtactgccctcggtgtcatccgtgcactccatactcaaggaatcttagaaagagcatactgcacagaaactcgtccatttaatcaaggatcgaggcttacagcgtttgagttggtgcatgagaaaatccctgcaactctcattgcagactcagctgcagctgcactgatgaaagatggtcgtgttgatggtgtcatcgttggagctgatcgtgtggcttcaaatggcgatactgctaacaagattgggacttacagtctcgccttgtgcgcaaaacatcacgggatcccattttatgttgctgcacctcttacctcagttgatctgtcactttcatccgggaaagaaatcgtgatagaggaaagatctccaaaggagttgatgcacacacacggaggacttggtgaacgcattgcagcaccagggatctcagtttggaacccagcttttgatatgactccagcagagctgattgcaggaatcataaccgagaaaggggtcataacaaagaatggcaatgatacatttgacataagcagctttgccaagaagataacaggaaactcatctcgttgaagttagagtcagcattgcgacttgcggatgttcccctctctctatatacttgcaacaaagcaaattactttgtaatgtttgagctactaagtacactgtggtaaaaattgtcaaaaataagaaataatcgatacgttttagcc

SEQ ID NO: 105402 - protein, 374 aa, Arabidopsis thaliana; identical to SEQ ID NO: 23709
  peptide (1)..(374): Ceres Seq. ID no. 13617180
  misc_feature (36)..(355): Pfam Name: Initiation factor 2 subunit family Pfam Description: Initiation factor 2 subunit family
  misc_feature (1)..(374): Homolog of NCBI NO: 18396170 NR Description: translation initiation factor eIF-2B alpha -related [Arabidopsis thaliana] >gi|20197503|gb|AAC95160.2|
  misc_feature (1)..(374): Homolog of NCBI NO: 21593194 NR Description: putative translation initiation factor eIF-2B
  misc_feature (1)..(348): Homolog of NCBI NO: 25315908 NR Description: hypothetical protein At2g05830 [imported] -
  misc_feature (49)..(374): Homolog of NCBI NO: 20466258 NR Description: putative translation initiation factor eIF-2B subunit [Arabidopsis thaliana] >gi|22136322|gb|AAM91239.1|
  misc_feature (4)..(371): Homolog of NCBI NO: 15216226 NR Description: CIG2 [Nicotiana tabacum]
  misc_feature (3)..(364): Homolog of NCBI NO: 12407304 NR Description: IDI2 [Hordeum vulgare subsp. vulgare]
  misc_feature (8)..(351): Homolog of NCBI NO: 31242175 NR Description: ENSANGP00000023010 [Anopheles gambiae]
  misc_feature (8)..(351): Homolog of NCBI NO: 19577378 NR Description: putative translation initiation factor [Anopheles
  misc_feature (9)..(361): Homolog of NCBI NO: 40740852 NR Description: hypothetical protein AN4290.2 [Aspergillus
  misc_feature (51)..(351): Homolog of NCBI NO: 31242173 NR Description: ENSANGP00000017411 [Anopheles gambiae]

SEQ ID NO: 105403 - protein, 326 aa, Arabidopsis thaliana; identical to SEQ ID NO: 23710
  peptide (1)..(326): Ceres Seq. ID no. 13617181
  misc_feature (1)..(307): Pfam Name: Initiation factor 2 subunit family Pfam Description: Initiation factor 2 subunit family
  misc_feature (1)..(326): Homolog of NCBI NO: 18396170 NR Description: translation initiation factor eIF-2B alpha -related [Arabidopsis thaliana] >gi|20197503|gb|AAC95160.2|
  misc_feature (1)..(326): Homolog of NCBI NO: 21593194 NR Description: putative translation initiation factor eIF-2B
  misc_feature (1)..(300): Homolog of NCBI NO: 25315908 NR Description: hypothetical protein At2g05830 [imported] -
  misc_feature (1)..(326): Homolog of NCBI NO: 20466258 NR Description: putative translation initiation factor eIF-2B subunit [Arabidopsis thaliana] >gi|22136322|gb|AAM91239.1|
  misc_feature (1)..(323): Homolog of NCBI NO: 15216226 NR Description: CIG2 [Nicotiana tabacum]
  misc_feature (1)..(316): Homolog of NCBI NO: 12407304 NR Description: IDI2 [Hordeum vulgare subsp. vulgare]
  misc_feature (1)..(303): Homolog of NCBI NO: 31242175 NR Description: ENSANGP00000023010 [Anopheles gambiae]
  misc_feature (1)..(303): Homolog of NCBI NO: 19577378 NR Description: putative translation initiation factor [Anopheles
  misc_feature (1)..(313): Homolog of NCBI NO: 40740852 NR Description: hypothetical protein AN4290.2 [Aspergillus
  misc_feature (3)..(303): Homolog of NCBI NO: 31242173 NR Description: ENSANGP00000017411 [Anopheles gambiae]

SEQ ID NO: 105404 - protein, 237 aa, Arabidopsis thaliana; identical to SEQ ID NO: 23711
  peptide (1)..(237): Ceres Seq. ID no. 13617182
  misc_feature (1)..(218): Pfam Name: Initiation factor 2 subunit family Pfam Description: Initiation factor 2 subunit family
  misc_feature (1)..(237): Homolog of NCBI NO: 18396170 NR Description: translation initiation factor eIF-2B alpha -related [Arabidopsis thaliana] >gi|20197503|gb|AAC95160.2|
  misc_feature (1)..(237): Homolog of NCBI NO: 21593194 NR Description: putative translation initiation factor eIF-2B
  misc_feature (1)..(211): Homolog of NCBI NO: 25315908 NR Description: hypothetical protein At2g05830 [imported] -
  misc_feature (1)..(237): Homolog of NCBI NO: 20466258 NR Description: putative translation initiation factor eIF-2B subunit [Arabidopsis thaliana] >gi|22136322|gb|AAM91239.1|
  misc_feature (1)..(234): Homolog of NCBI NO: 15216226 NR Description: CIG2 [Nicotiana tabacum]
  misc_feature (1)..(227): Homolog of NCBI NO: 12407304 NR Description: IDI2 [Hordeum vulgare subsp. vulgare]
  misc_feature (1)..(214): Homolog of NCBI NO: 31242175 NR Description: ENSANGP00000023010 [Anopheles gambiae]
  misc_feature (1)..(214): Homolog of NCBI NO: 19577378 NR Description: putative translation initiation factor [Anopheles
  misc_feature (1)..(224): Homolog of NCBI NO: 40740852 NR Description: hypothetical protein AN4290.2 [Aspergillus
  misc_feature (1)..(214): Homolog of NCBI NO: 31242173 NR Description: ENSANGP00000017411 [Anopheles gambiae]

SEQ ID NO: 105405 - DNA, 1507 bp, Arabidopsis thaliana
  misc_feature (1)..(1507): Ceres Seq. ID no. 13617187
  misc_feature: MA Experiment ID: 20000179 Result: Up-regulated in Transcription
  misc_feature: MA Experiment 20000179 PARAMETER Experiment Name: At_Germinating_Seeds_P Parameter: Age (hr) Value: 6 vs. 0
  misc_feature: MA Experiment 20000179 PARAMETER Experiment Name: At_Germinating_Seeds_P Parameter: Tissue Value: Germinating Seeds
  misc_feature: MA Experiment ID: 20000180 Result: Up-regulated in Transcription
  misc_feature: MA Experiment 20000180 PARAMETER Experiment Name: At_Germinating_Seeds_P Parameter: Age (hr) Value: 24 vs. 0
  misc_feature: MA Experiment 20000180 PARAMETER Experiment Name: At_Germinating_Seeds_P Parameter: Tissue Value: Germinating Seeds
  misc_feature: MA Experiment ID: 20000184 Result: Up-regulated in Transcription
  misc_feature: MA Experiment 20000184 PARAMETER Experiment Name: At_Shoots__P Parameter: Age (day) Value: 7
  misc_feature: MA Experiment 20000184 PARAMETER Experiment Name: At_Shoots__P Parameter: Tissue Value: Shoots vs. Whole Plant
  misc_feature: MA Experiment ID: 20000265 Result: Up-regulated in Transcription
  misc_feature: MA Experiment 20000265 PARAMETER Experiment Name: At_Open_Flower_P Parameter: Age (day) Value: 21
  misc_feature: MA Experiment 20000265 PARAMETER Experiment Name: At_Open_Flower_P Parameter: Plant Line Value: WS
  misc_feature: MA Experiment 20000265 PARAMETER Experiment Name: At_Open_Flower_P Parameter: Tissue Value: Closed Flower vs. Whole Plant
  misc_feature: MA Experiment ID: 20000437 Result: Down-regulated in Transcription
  misc_feature: MA Experiment 20000437 PARAMETER Experiment Name: At_Drought_P Parameter: Age (day) Value: 8
  misc_feature: MA Experiment 20000437 PARAMETER Experiment Name: At_Drought_P Parameter: Organism Value: A. thaliana
  misc_feature: MA Experiment 20000437 PARAMETER Experiment Name: At_Drought_P Parameter: Plant Line Value: WS
  misc_feature: MA Experiment 20000437 PARAMETER Experiment Name: At_Drought_P Parameter: Timepoint (hr) Value: 24
  misc_feature: MA Experiment 20000437 PARAMETER Experiment Name: At_Drought_P Parameter: Tissue Value: Whole Plant
  misc_feature: MA Experiment 20000437 PARAMETER Experiment Name: At_Drought_P Parameter: Treatment Value: Drought vs. No Drought
  misc_feature: MA Experiment ID: 20000438 Result: Up-regulated in Transcription
  misc_feature: MA Experiment 20000438 PARAMETER Experiment Name: At_Shoots__P Parameter: Age (day) Value: 14
  misc_feature: MA Experiment 20000438 PARAMETER Experiment Name: At_Shoots__P Parameter: Tissue Value: Shoots vs. Whole Plant
  misc_feature: MA Experiment ID: 20000794 Result: Down-regulated in Transcription
  misc_feature: MA Experiment 20000794 PARAMETER Experiment Name: At_Petals_P Parameter: Age (day) Value: 23-25 days
  misc_feature: MA Experiment 20000794 PARAMETER Experiment Name: At_Petals_P Parameter: Plant Line Value: WS
  misc_feature: MA Experiment 20000794 PARAMETER Experiment Name: At_Petals_P Parameter: Tissue Value: Petals vs. Whole plant
  misc_feature: MA Experiment ID: 20001558 Result: Up-regulated in Transcription
  misc_feature: MA Experiment 20001558 PARAMETER Experiment Name: At_Drought_Soil_Dry_P Parameter: Age (day) Value: 27
  misc_feature: MA Experiment 20001558 PARAMETER Experiment Name: At_Drought_Soil_Dry_P Parameter: Organism Value: A. thaliana
  misc_feature: MA Experiment 20001558 PARAMETER Experiment Name: At_Drought_Soil_Dry_P Parameter: Plant Line Value: WS
  misc_feature: MA Experiment 20001558 PARAMETER Experiment Name: At_Drought_Soil_Dry_P Parameter: Post Timepoint (hr) Value: 6
  misc_feature: MA Experiment 20001558 PARAMETER Experiment Name: At_Drought_Soil_Dry_P Parameter: Post-Treatment Value: Re-Water vs. No Drought
  misc_feature: MA Experiment 20001558 PARAMETER Experiment Name: At_Drought_Soil_Dry_P Parameter: Timepoint (day) Value: 13
  misc_feature: MA Experiment 20001558 PARAMETER Experiment Name: At_Drought_Soil_Dry_P Parameter: Treatment Value: Drought vs. No Drought
  misc_feature: MA Experiment ID: 20001560 Result: Up-regulated in Transcription
  misc_feature: MA Experiment 20001560 PARAMETER Experiment Name: At_Drought_Soil_Dry_P Parameter: Age (day) Value: 28
  misc_feature: MA Experiment 20001560 PARAMETER Experiment Name: At_Drought_Soil_Dry_P Parameter: Organism Value: A. thaliana
  misc_feature: MA Experiment 20001560 PARAMETER Experiment Name: At_Drought_Soil_Dry_P Parameter: Plant Line Value: WS
  misc_feature: MA Experiment 20001560 PARAMETER Experiment Name: At_Drought_Soil_Dry_P Parameter: Post Timepoint (hr) Value: None
  misc_feature: MA Experiment 20001560 PARAMETER Experiment Name: At_Drought_Soil_Dry_P Parameter: Post-Treatment Value: None
  misc_feature: MA Experiment 20001560 PARAMETER Experiment Name: At_Drought_Soil_Dry_P Parameter: Timepoint (day) Value: 14
  misc_feature: MA Experiment 20001560 PARAMETER Experiment Name: At_Drought_Soil_Dry_P Parameter: Treatment Value: Drought vs. No Drought
  misc_feature: MA Experiment ID: 20001757 Result: Up-regulated in Transcription
  misc_feature: MA Experiment 20001757 PARAMETER Experiment Name: At_50mM_NH4NO3_L-to-H_P Parameter: Timepoint (hr) Value: 6
  misc_feature: MA Experiment 20001757 PARAMETER Experiment Name: At_50mM_NH4NO3_L-to-H_P Parameter: Tissue Value: Leaf
  misc_feature: MA Experiment 20001757 PARAMETER Experiment Name: At_50mM_NH4NO3_L-to-H_P Parameter: Treatment Value: 50mM NH4NO3 vs 100mM Mannitol
  misc_feature: MA Experiment ID: 20001911 Result: Down-regulated in Transcription
  misc_feature: MA Experiment 20001911 PARAMETER Experiment Name: At_Drought_Reproduction_P Parameter: Age (day) Value: 40
  misc_feature: MA Experiment 20001911 PARAMETER Experiment Name: At_Drought_Reproduction_P Parameter: Organism Value: A. thaliana
  misc_feature: MA Experiment 20001911 PARAMETER Experiment Name: At_Drought_Reproduction_P Parameter: Plant Line Value: WS
  misc_feature: MA Experiment 20001911 PARAMETER Experiment Name: At_Drought_Reproduction_P Parameter: Timepoint (day) Value: 10
  misc_feature: MA Experiment 20001911 PARAMETER Experiment Name: At_Drought_Reproduction_P Parameter: Tissue Value: Flowers
  misc_feature: MA Experiment 20001911 PARAMETER Experiment Name: At_Drought_Reproduction_P Parameter: Treatment Value: Drought vs. No Drought
gatctcatcgaagctcctctctcttacatatcatcacttcacatcaaccaaacctacttctgtctctctctctcgctctctatctctcacgctctcacagtagaagaaaaaattagaaaggttgtgagaatggcggctacagcagcttcaagcttacaaattgctacacgaaggccgagcatgtcttcgcctagcaaaattcttaaagcaggaacctacattgttggtgccaatcctggaaacgcttcatgggataaactttcatgcactcgccaattatcaaaccttggatgtttgagaaaccacagtgctgttccaacttgtaagagacccttttctttttccacaagggcaatgtctgaatccagtgaaaacaaggctccttcagggcttccaattgatttgagagggaaaagagctttcattgctggtatagctgatgataatggctatggttgggccatagcaaaatctcttgctgctgctggagctgaaatattggttgggacttgggttcctgcacttaatatatttgagacaagcttgagacgtggaaaattcgaccagtcacgagtgttgcctgacgggtcattgatggagattaagaaggtttatgctttggatgctgtgtttgacaatcctgaagatgtgcctgaagatgtgaaaacgaataagcgatatgcaggatcgtcaaactggaccgtacaggaagctgctgaatgtgtgaaaaaagattttggaagcattgacattcttgtccattcccttgcaaatggcccagaggttagcaaacctcttctggagacatcaaggaaaggctatctcgctgctatctctgcttcgagttactcctttgtttccttgctgaggcattttctgccaattatgaacccaggaggtgcttcaatatctcttacttacattgcctctgaaagaatcattcctgggtatggtggaggtatgagttctgccaaagctgcactagagagtgacacacgggtgcttgcatatgaagctggaaggaaatcaaacattagggtcaacaccatctctgcgggtcctttgggaagccgagcagcaaaagccattgggttcatagacaccatgattgagtattcctacaataatgggcctattcagaaaacactgaccgcagatgaagttgggaatgcagcagccttcttggcatctccattggcctctgccataaccggtgcaaccatatatgtggacaatggtttgaatgcaatgggcgttgcactggacagcccggtgttcaaagaccttaacagcaagaattagagtcttgatcgacgactggactcgagaaattccgtgttttcgtgagcttgcttgtttctttatgagttagtatgtacggcatatgttccccatcggctgtctttttttttctttctttaagagaataaattatggttctaggttgggtcatttagcaactatatatgtagtgatggattattattcctcttatgattgaaaattt

SEQ ID NO: 105406 - protein, 433 aa, Arabidopsis thaliana
  peptide (1)..(433): Ceres Seq. ID no. 13617188
  misc_feature (322)..(414): Pfam Name: short chain dehydrogenase Pfam Description: short chain dehydrogenase
  misc_feature (44)..(433): Homolog of NCBI NO: 18396215 NR Description: enoyl-[acyl-carrier protein] reductase [NADH]
  misc_feature (44)..(433): Homolog of NCBI NO: 7141083 NR Description: enoyl-ACP reductase [Arabidopsis thaliana]
  misc_feature (44)..(433): Homolog of NCBI NO: 2204087 NR Description: enoyl-ACP reductase [Arabidopsis thaliana]
  misc_feature (44)..(429): Homolog of NCBI NO: 14422255 NR Description: enoyl-[acyl-carrier protein] reductase [Brassica
  misc_feature (44)..(429): Homolog of NCBI NO: 14422257 NR Description: enoyl-[acyl-carrier protein] reductase [Brassica
  misc_feature (44)..(429): Homolog of NCBI NO: 7488486 NR Description: probable enoyl-[acyl-carrier-protein] reductase
  misc_feature (44)..(430): Homolog of NCBI NO: 14422261 NR Description: enoyl-[acyl carrier-protein] reductase [Brassica
  misc_feature (44)..(430): Homolog of NCBI NO: 14422259 NR Description: enoyl-[acyl-carrier protein] reductase [Brassica
  misc_feature (44)..(430): Homolog of NCBI NO: 461461 NR Description: Enoyl-[acyl-carrier protein] reductase [NADH],
  misc_feature (44)..(430): Homolog of NCBI NO: 99805 NR Description: enoyl-[acyl-carrier-protein] reductase (NADH2)
DLIEAPLSYISSLHINQTYFCLSLSLSISHALTVEEKIRKVVRMAATAASSLQIATRRPSMSSPSKILKAGTYIVGANPGNASWDKLSCTRQLSNLGCLRNHSAVPTCKRPFSFSTRAMSESSENKAPSGLPIDLRGKRAFIAGIADDNGYGWAIAKSLAAAGAEILVGTWVPALNIFETSLRRGKFDQSRVLPDGSLMEIKKVYALDAVFDNPEDVPEDVKTNKRYAGSSNWTVQEAAECVKKDFGSIDILVHSLANGPEVSKPLLETSRKGYLAAISASSYSFVSLLRHFLPIMNPGGASISLTYIASERIIPGYGGGMSSAKAALESDTRVLAYEAGRKSNIRVNTISAGPLGSRAAKAIGFIDTMIEYSYNNGPIQKTLTADEVGNAAAFLASPLASAITGATIYVDNGLNAMGVALDSPVFKDLNSKN

SEQ ID NO: 105407 - protein, 390 aa, Arabidopsis thaliana; identical to SEQ ID NO: 101249
  peptide (1)..(390): Ceres Seq. ID no. 13617189
  misc_feature (279)..(371): Pfam Name: short chain dehydrogenase Pfam Description: short chain dehydrogenase
  misc_feature (1)..(390): Homolog of NCBI NO: 18396215 NR Description: enoyl-[acyl-carrier protein] reductase [NADH]
  misc_feature (1)..(390): Homolog of NCBI NO: 7141083 NR Description: enoyl-ACP reductase [Arabidopsis thaliana]
  misc_feature (1)..(390): Homolog of NCBI NO: 2204087 NR Description: enoyl-ACP reductase [Arabidopsis thaliana]
  misc_feature (1)..(386): Homolog of NCBI NO: 14422255 NR Description: enoyl-[acyl-carrier protein] reductase [Brassica
  misc_feature (1)..(386): Homolog of NCBI NO: 14422257 NR Description: enoyl-[acyl-carrier protein] reductase [Brassica
  misc_feature (1)..(386): Homolog of NCBI NO: 7488486 NR Description: probable enoyl-[acyl-carrier-protein] reductase
  misc_feature (1)..(387): Homolog of NCBI NO: 14422261 NR Description: enoyl-[acyl carrier-protein] reductase [Brassica
  misc_feature (1)..(387): Homolog of NCBI NO: 14422259 NR Description: enoyl-[acyl-carrier protein] reductase [Brassica
  misc_feature (1)..(387): Homolog of NCBI NO: 461461 NR Description: Enoyl-[acyl-carrier protein] reductase [NADH],
  misc_feature (1)..(387): Homolog of NCBI NO: 99805 NR Description: enoyl-[acyl-carrier-protein] reductase (NADH2)

SEQ ID NO: 105408 - protein, 373 aa, Arabidopsis thaliana; identical to SEQ ID NO: 23380
  peptide (1)..(373): Ceres Seq. ID no. 13617190
  misc_feature (262)..(354): Pfam Name: short chain dehydrogenase Pfam Description: short chain dehydrogenase
  misc_feature (1)..(373): Homolog of NCBI NO: 18396215 NR Description: enoyl-[acyl-carrier protein] reductase [NADH]
  misc_feature (1)..(373): Homolog of NCBI NO: 7141083 NR Description: enoyl-ACP reductase [Arabidopsis thaliana]
  misc_feature (1)..(373): Homolog of NCBI NO: 2204087 NR Description: enoyl-ACP reductase [Arabidopsis thaliana]
  misc_feature (1)..(369): Homolog of NCBI NO: 14422255 NR Description: enoyl-[acyl-carrier protein] reductase [Brassica
  misc_feature (1)..(369): Homolog of NCBI NO: 14422257 NR Description: enoyl-[acyl-carrier protein] reductase [Brassica
  misc_feature (1)..(369): Homolog of NCBI NO: 7488486 NR Description: probable enoyl-[acyl-carrier-protein] reductase
  misc_feature (1)..(370): Homolog of NCBI NO: 14422261 NR Description: enoyl-[acyl carrier-protein] reductase [Brassica
  misc_feature (1)..(370): Homolog of NCBI NO: 14422259 NR Description: enoyl-[acyl-carrier protein] reductase [Brassica
  misc_feature (1)..(370): Homolog of NCBI NO: 461461 NR Description: Enoyl-[acyl-carrier protein] reductase [NADH],
  misc_feature (1)..(370): Homolog of NCBI NO: 99805 NR Description: enoyl-[acyl-carrier-protein] reductase (NADH2)

SEQ ID NO: 105409 - DNA, 1264 bp, Arabidopsis thaliana
  misc_feature (1)..(1264): Ceres Seq. ID no. 13617198
  misc_feature: MA Experiment ID: 108435 Result: Up-regulated in Transcription
  misc_feature: MA Experiment 108435 PARAMETER Experiment Name: At_stm_Mutants_cDNA_P Parameter: Plant Line Value: wt Landsburg vs stm
  misc_feature: MA Experiment 108435 PARAMETER Experiment Name: At_stm_Mutants_cDNA_P Parameter: Tissue Value: Shoot Apical Meristem Region
  misc_feature: MA Experiment ID: 108577 Result: Down-regulated in Transcription
  misc_feature: MA Experiment 108577 PARAMETER Experiment Name: At_42deg_Heat_cDNA_P Parameter: Temperature (deg C) Value: 42 vs. 22
  misc_feature: MA Experiment 108577 PARAMETER Experiment Name: At_42deg_Heat_cDNA_P Parameter: Timepoint (hr) Value: 6
  misc_feature: MA Experiment 108577 PARAMETER Experiment Name: At_42deg_Heat_cDNA_P Parameter: Tissue Value: Aerial
  misc_feature: MA Experiment ID: 108585 Result: Up-regulated in Transcription
  misc_feature: MA Experiment 108585 PARAMETER Experiment Name: At_5mM_NaNP_cDNA_P Parameter: Timepoint (hr) Value: 6
  misc_feature: MA Experiment 108585 PARAMETER Experiment Name: At_5mM_NaNP_cDNA_P Parameter: Tissue Value: Aerial
  misc_feature: MA Experiment 108585 PARAMETER Experiment Name: At_5mM_NaNP_cDNA_P Parameter: Treatment Value: null
  misc_feature: MA Experiment ID: 108595 Result: Up-regulated in Transcription
  misc_feature: MA Experiment 108595 PARAMETER Experiment Name: At_Ler-pi_Ovule_cDNA_P Parameter: Plant Line Value: null
  misc_feature: MA Experiment ID: 108667 Result: Up-regulated in Transcription
  misc_feature: MA Experiment 108667 PARAMETER Experiment Name: At_2mM_SA_cDNA_P Parameter: Plant Line Value: WS
  misc_feature: MA Experiment 108667 PARAMETER Experiment Name: At_2mM_SA_cDNA_P Parameter: Timepoint (hr) Value: 1
  misc_feature: MA Experiment 108667 PARAMETER Experiment Name: At_2mM_SA_cDNA_P Parameter: Treatment Value: 2mM SA vs. No Treatment
  misc_feature: MA Experiment ID: 20000069 Result: Up-regulated in Transcription
  misc_feature: MA Experiment 20000069 PARAMETER Experiment Name: At_100uM_ABA_Mutants_cDNA_P Parameter: Plant Line Value: CS23
  misc_feature: MA Experiment 20000069 PARAMETER Experiment Name: At_100uM_ABA_Mutants_cDNA_P Parameter: Timepoint (hr) Value: 6
  misc_feature: MA Experiment 20000069 PARAMETER Experiment Name: At_100uM_ABA_Mutants_cDNA_P Parameter: Tissue Value: Aerial
  misc_feature: MA Experiment 20000069 PARAMETER Experiment Name: At_100uM_ABA_Mutants_cDNA_P Parameter: Treatment Value: 100uM ABA vs. No Treatment
  misc_feature: MA Experiment ID: 20000070 Result: Up-regulated in Transcription
  misc_feature: MA Experiment 20000070 PARAMETER Experiment Name: At_100uM_ABA_Mutants_cDNA_P Parameter: Plant Line Value: CS24
  misc_feature: MA Experiment 20000070 PARAMETER Experiment Name: At_100uM_ABA_Mutants_cDNA_P Parameter: Timepoint (hr) Value: 6
  misc_feature: MA Experiment 20000070 PARAMETER Experiment Name: At_100uM_ABA_Mutants_cDNA_P Parameter: Tissue Value: Aerial
  misc_feature: MA Experiment 20000070 PARAMETER Experiment Name: At_100uM_ABA_Mutants_cDNA_P Parameter: Treatment Value: 100uM ABA vs. No Treatment
  misc_feature: MA Experiment ID: 20000072 Result: Up-regulated in Transcription
  misc_feature: MA Experiment 20000072 PARAMETER Experiment Name: At_100uM_ABA_Mutants_cDNA_P Parameter: Plant Line Value: CS8105
  misc_feature: MA Experiment 20000072 PARAMETER Experiment Name: At_100uM_ABA_Mutants_cDNA_P Parameter: Timepoint (hr) Value: 6
  misc_feature: MA Experiment 20000072 PARAMETER Experiment Name: At_100uM_ABA_Mutants_cDNA_P Parameter: Tissue Value: Aerial
  misc_feature: MA Experiment 20000072 PARAMETER Experiment Name: At_100uM_ABA_Mutants_cDNA_P Parameter: Treatment Value: 100uM ABA vs. No Treatment
  misc_feature: MA Experiment ID: 20000088 Result: Up-regulated in Transcription
  misc_feature: MA Experiment 20000088 PARAMETER Experiment Name: At_100uM_ABA_Mutants_cDNA_P Parameter: Plant Line Value: Landsberg
  misc_feature: MA Experiment 20000088 PARAMETER Experiment Name: At_100uM_ABA_Mutants_cDNA_P Parameter: Timepoint (hr) Value: 6
  misc_feature: MA Experiment 20000088 PARAMETER Experiment Name: At_100uM_ABA_Mutants_cDNA_P Parameter: Tissue Value: Aerial
  misc_feature: MA Experiment 20000088 PARAMETER Experiment Name: At_100uM_ABA_Mutants_cDNA_P Parameter: Treatment Value: 100uM ABA vs. No Treatment
  misc_feature: MA Experiment ID: 20000111 Result: Down-regulated in Transcription
  misc_feature: MA Experiment 20000111 PARAMETER Experiment Name: At_42deg_Heat_cDNA_P Parameter: Temperature (deg C) Value: 42 vs. 22
  misc_feature: MA Experiment 20000111 PARAMETER Experiment Name: At_42deg_Heat_cDNA_P Parameter: Timepoint (hr) Value: 6
  misc_feature: MA Experiment 20000111 PARAMETER Experiment Name: At_42deg_Heat_cDNA_P Parameter: Tissue Value: Aerial
  misc_feature: MA Experiment ID: 20000117 Result: Up-regulated in Transcription
  misc_feature: MA Experiment 20000117 PARAMETER Experiment Name: At_100uM_ABA_Mutants_cDNA_P Parameter: Plant Line Value: Columbia
  misc_feature: MA Experiment 20000117 PARAMETER Experiment Name: At_100uM_ABA_Mutants_cDNA_P Parameter: Timepoint (hr) Value: 6
  misc_feature: MA Experiment 20000117 PARAMETER Experiment Name: At_100uM_ABA_Mutants_cDNA_P Parameter: Tissue Value: Aerial
  misc_feature: MA Experiment 20000117 PARAMETER Experiment Name: At_100uM_ABA_Mutants_cDNA_P Parameter: Treatment Value: 100uM ABA vs. No Treatment
  misc_feature: MA Experiment ID: 20000144 Result: Down-regulated in Transcription
  misc_feature: MA Experiment 20000144 PARAMETER Experiment Name: At_42deg_Heat_cDNA_P Parameter: Temperature (deg C) Value: 42 vs. 22
  misc_feature: MA Experiment 20000144 PARAMETER Experiment Name: At_42deg_Heat_cDNA_P Parameter: Timepoint (hr) Value: 1
  misc_feature: MA Experiment 20000144 PARAMETER Experiment Name: At_42deg_Heat_cDNA_P Parameter: Tissue Value: Aerial
  misc_feature: MA Experiment ID: 20000171 Result: Down-regulated in Transcription
  misc_feature: MA Experiment 20000171 PARAMETER Experiment Name: At_42deg_Heat_P Parameter: Age (day) Value: 14
  misc_feature: MA Experiment 20000171 PARAMETER Experiment Name: At_42deg_Heat_P Parameter: Organism Value: A. thaliana
  misc_feature: MA Experiment 20000171 PARAMETER Experiment Name: At_42deg_Heat_P Parameter: Plant Line Value: WS
  misc_feature: MA Experiment 20000171 PARAMETER Experiment Name: At_42deg_Heat_P Parameter: Temperature (deg C) Value: 42 vs. 22
  misc_feature: MA Experiment 20000171 PARAMETER Experiment Name: At_42deg_Heat_P Parameter: Timepoint (hr) Value: 1
  misc_feature: MA Experiment 20000171 PARAMETER Experiment Name: At_42deg_Heat_P Parameter: Tissue Value: Aerial
  misc_feature: MA Experiment ID: 20000173 Result: Down-regulated in Transcription
  misc_feature: MA Experiment 20000173 PARAMETER Experiment Name: At_42deg_Heat_P Parameter: Age (day) Value: 14
  misc_feature: MA Experiment 20000173 PARAMETER Experiment Name: At_42deg_Heat_P Parameter: Organism Value: A. thaliana
  misc_feature: MA Experiment 20000173 PARAMETER Experiment Name: At_42deg_Heat_P Parameter: Plant Line Value: WS
  misc_feature: MA Experiment 20000173 PARAMETER Experiment Name: At_42deg_Heat_P Parameter: Temperature (deg C) Value: 42 vs. 22
  misc_feature: MA Experiment 20000173 PARAMETER Experiment Name: At_42deg_Heat_P Parameter: Timepoint (hr) Value: 6
  misc_feature: MA Experiment 20000173 PARAMETER Experiment Name: At_42deg_Heat_P Parameter: Tissue Value: Aerial
  misc_feature: MA Experiment ID: 20000180 Result: Down-regulated in Transcription
  misc_feature: MA Experiment 20000180 PARAMETER Experiment Name: At_Germinating_Seeds_P Parameter: Age (hr) Value: 24 vs. 0
  misc_feature: MA Experiment 20000180 PARAMETER Experiment Name: At_Germinating_Seeds_P Parameter: Tissue Value: Germinating Seeds
  misc_feature: MA Experiment ID: 20000184 Result: Down-regulated in Transcription
  misc_feature: MA Experiment 20000184 PARAMETER Experiment Name: At_Shoots__P Parameter: Age (day) Value: 7
  misc_feature: MA Experiment 20000184 PARAMETER Experiment Name: At_Shoots__P Parameter: Tissue Value: Shoots vs. Whole Plant
  misc_feature: MA Experiment ID: 20000227 Result: Down-regulated in Transcription
  misc_feature: MA Experiment 20000227 PARAMETER Experiment Name: At_Root-Tips-vs-Tops_P Parameter: Tissue Value: Root Tips vs. Root Tops
  misc_feature: MA Experiment ID: 20000234 Result: Down-regulated in Transcription
  misc_feature: MA Experiment 20000234 PARAMETER Experiment Name: At_Siliques_P Parameter: Age (day) Value: 21
  misc_feature: MA Experiment 20000234 PARAMETER Experiment Name: At_Siliques_P Parameter: Organism Value: A. thaliana
  misc_feature: MA Experiment 20000234 PARAMETER Experiment Name: At_Siliques_P Parameter: Plant Line Value: WS
  misc_feature: MA Experiment 20000234 PARAMETER Experiment Name: At_Siliques_P Parameter: Tissue Value: Less Than 5mm Siliques vs. Whole Plant
  misc_feature: MA Experiment ID: 20000235 Result: Down-regulated in Transcription
  misc_feature: MA Experiment 20000235 PARAMETER Experiment Name: At_Siliques_P Parameter: Age (day) Value: 21
  misc_feature: MA Experiment 20000235 PARAMETER Experiment Name: At_Siliques_P Parameter: Organism Value: A. thaliana
  misc_feature: MA Experiment 20000235 PARAMETER Experiment Name: At_Siliques_P Parameter: Plant Line Value: WS
  misc_feature: MA Experiment 20000235 PARAMETER Experiment Name: At_Siliques_P Parameter: Tissue Value: 5-10mm Siliques vs. Whole Plant
  misc_feature: MA Experiment ID: 20000264 Result: Down-regulated in Transcription
  misc_feature: MA Experiment 20000264 PARAMETER Experiment Name: At_Open_Flower_P Parameter: Age (day) Value: 21
  misc_feature: MA Experiment 20000264 PARAMETER Experiment Name: At_Open_Flower_P Parameter: Plant Line Value: WS
  misc_feature: MA Experiment 20000264 PARAMETER Experiment Name: At_Open_Flower_P Parameter: Tissue Value: Open Flower vs. Whole Plant
  misc_feature: MA Experiment ID: 20000265 Result: Down-regulated in Transcription
  misc_feature: MA Experiment 20000265 PARAMETER Experiment Name: At_Open_Flower_P Parameter: Age (day) Value: 21
  misc_feature: MA Experiment 20000265 PARAMETER Experiment Name: At_Open_Flower_P Parameter: Plant Line Value: WS
  misc_feature: MA Experiment 20000265 PARAMETER Experiment Name: At_Open_Flower_P Parameter: Tissue Value: Closed Flower vs. Whole Plant
  misc_feature: MA Experiment ID: 20000286 Result: Down-regulated in Transcription
  misc_feature: MA Experiment 20000286 PARAMETER Experiment Name: At_Open_Flower_P Parameter: Age (day) Value: 21
  misc_feature: MA Experiment 20000286 PARAMETER Experiment Name: At_Open_Flower_P Parameter: Plant Line Value: WS
  misc_feature: MA Experiment 20000286 PARAMETER Experiment Name: At_Open_Flower_P Parameter: Tissue Value: Half Open vs. Whole Plant
  misc_feature: MA Experiment ID: 20000437 Result: Up-regulated in Transcription
  misc_feature: MA Experiment 20000437 PARAMETER Experiment Name: At_Drought_P Parameter: Age (day) Value: 8
  misc_feature: MA Experiment 20000437 PARAMETER Experiment Name: At_Drought_P Parameter: Organism Value: A. thaliana
  misc_feature: MA Experiment 20000437 PARAMETER Experiment Name: At_Drought_P Parameter: Plant Line Value: WS
  misc_feature: MA Experiment 20000437 PARAMETER Experiment Name: At_Drought_P Parameter: Timepoint (hr) Value: 24
  misc_feature: MA Experiment 20000437 PARAMETER Experiment Name: At_Drought_P Parameter: Tissue Value: Whole Plant
  misc_feature: MA Experiment 20000437 PARAMETER Experiment Name: At_Drought_P Parameter: Treatment Value: Drought vs. No Drought
  misc_feature: MA Experiment ID: 20000438 Result: Down-regulated in Transcription
  misc_feature: MA Experiment 20000438 PARAMETER Experiment Name: At_Shoots__P Parameter: Age (day) Value: 14
  misc_feature: MA Experiment 20000438 PARAMETER Experiment Name: At_Shoots__P Parameter: Tissue Value: Shoots vs. Whole Plant
  misc_feature: MA Experiment ID: 20000439 Result: Down-regulated in Transcription
  misc_feature: MA Experiment 20000439 PARAMETER Experiment Name: At_Roots__P Parameter: Age (day) Value: 14 vs. 21
  misc_feature: MA Experiment 20000439 PARAMETER Experiment Name: At_Roots__P Parameter: Organism Value: A. thaliana
  misc_feature: MA Experiment 20000439 PARAMETER Experiment Name: At_Roots__P Parameter: Tissue Value: Roots vs. Whole Plant
  misc_feature: MA Experiment ID: 20000441 Result: Up-regulated in Transcription
  misc_feature: MA Experiment 20000441 PARAMETER Experiment Name: At_1uM_BR-BRZ__P Parameter: Tissue Value: Shoot Apices
  misc_feature: MA Experiment 20000441 PARAMETER Experiment Name: At_1uM_BR-BRZ__P Parameter: Treatment Value: 1uM BR vs. No Treatment
  misc_feature: MA Experiment ID: 20000443 Result: Up-regulated in Transcription
  misc_feature: MA Experiment 20000443 PARAMETER Experiment Name: At_1uM_BR-BRZ__P Parameter: Tissue Value: Shoot Apices
  misc_feature: MA Experiment 20000443 PARAMETER Experiment Name: At_1uM_BR-BRZ__P Parameter: Treatment Value: 1uM BRZ vs. No Treatment
  misc_feature: MA Experiment ID: 20000452 Result: Up-regulated in Transcription
  misc_feature: MA Experiment 20000452 PARAMETER Experiment Name: At_CS6879_Shoots-Roots_P Parameter: Age (day) Value: 14
  misc_feature: MA Experiment 20000452 PARAMETER Experiment Name: At_CS6879_Shoots-Roots_P Parameter: Organism Value: A. thaliana
  misc_feature: MA Experiment 20000452 PARAMETER Experiment Name: At_CS6879_Shoots-Roots_P Parameter: Plant Line Value: CS6879 vs. WS
  misc_feature: MA Experiment 20000452 PARAMETER Experiment Name: At_CS6879_Shoots-Roots_P Parameter: Tissue Value: Shoots
  misc_feature: MA Experiment ID: 20000495 Result: Down-regulated in Transcription
  misc_feature: MA Experiment 20000495 PARAMETER Experiment Name: At_Guard_Cells_P Parameter: Harvest Date Value: 8/2/2002
  misc_feature: MA Experiment 20000495 PARAMETER Experiment Name: At_Guard_Cells_P Parameter: Organism Value: A. thaliana
  misc_feature: MA Experiment 20000495 PARAMETER Experiment Name: At_Guard_Cells_P Parameter: Tissue Value: Guard Cells vs. Leaves
  misc_feature: MA Experiment ID: 20000574 Result: Down-regulated in Transcription
  misc_feature: MA Experiment 20000574 PARAMETER Experiment Name: At_100uM_ABA_Mutants__P Parameter: Organism Value: A. thaliana
  misc_feature: MA Experiment 20000574 PARAMETER Experiment Name: At_100uM_ABA_Mutants__P Parameter: Plant Line Value: CS23 vs. Ler wt
  misc_feature: MA Experiment 20000574 PARAMETER Experiment Name: At_100uM_ABA_Mutants__P Parameter: Timepoint (hr) Value: N/A
  misc_feature: MA Experiment 20000574 PARAMETER Experiment Name: At_100uM_ABA_Mutants__P Parameter: Tissue Value: Whole Plant
  misc_feature: MA Experiment 20000574 PARAMETER Experiment Name: At_100uM_ABA_Mutants__P Parameter: Treatment Value: None
  misc_feature: MA Experiment ID: 20001248 Result: Up-regulated in Transcription
  misc_feature: MA Experiment 20001248 PARAMETER Experiment Name: At_Far-red-induction_P Parameter: Age (day) Value: 7
  misc_feature: MA Experiment 20001248 PARAMETER Experiment Name: At_Far-red-induction_P Parameter: Light Value: Far-red vs. White
  misc_feature: MA Experiment 20001248 PARAMETER Experiment Name: At_Far-red-induction_P Parameter: Organism Value: A. thaliana
  misc_feature: MA Experiment 20001248 PARAMETER Experiment Name: At_Far-red-induction_P Parameter: Plant Line Value: Columbia
  misc_feature: MA Experiment 20001248 PARAMETER Experiment Name: At_Far-red-induction_P Parameter: Timepoint (hr) Value: 4
  misc_feature: MA Experiment 20001248 PARAMETER Experiment Name: At_Far-red-induction_P Parameter: Tissue Value: Whole Plant
  misc_feature: MA Experiment ID: 20001911 Result: Up-regulated in Transcription
  misc_feature: MA Experiment 20001911 PARAMETER Experiment Name: At_Drought_Reproduction_P Parameter: Age (day) Value: 40
  misc_feature: MA Experiment 20001911 PARAMETER Experiment Name: At_Drought_Reproduction_P Parameter: Organism Value: A. thaliana
  misc_feature: MA Experiment 20001911 PARAMETER Experiment Name: At_Drought_Reproduction_P Parameter: Plant Line Value: WS
  misc_feature: MA Experiment 20001911 PARAMETER Experiment Name: At_Drought_Reproduction_P Parameter: Timepoint (day) Value: 10
  misc_feature: MA Experiment 20001911 PARAMETER Experiment Name: At_Drought_Reproduction_P Parameter: Tissue Value: Flowers
  misc_feature: MA Experiment 20001911 PARAMETER Experiment Name: At_Drought_Reproduction_P Parameter: Treatment Value: Drought vs. No Drought
attttaagataagaataaaactaaataaggaaaaagaaggataattaggtcatcttcaccttcctcgttgtctcctcacactgtaaaagacttgaaactcatataaaatctcaagcttctatctatttcttctttcatcatcatcatcatcactctctcttcttcttctctctattccatggctttagtacgtgaacgtcgtcagctaaatctccgtcttcctcttcctccaatctccgaccgccgcttctccacctcttcctcctcagccaccaccaccaccgtcgctggctgtaacggaatctccgcttgtgatctcgagaaactcaacgttctcggatgcggaaacggcgggattgtttacaaagtccgtcataaaaccacatcggagatctacgctttgaaaacagttaacggcgacatggatccgattttcacaagacagttgatgcgagagatggagattctccgccgtacagattcaccgtacgtcgttaagtgtcacggaatcttcgagaaacctgtcgtcggtgaagtatcgattctaatggagtatatggacggcggaaccctagaatcactacgcggcggtgtaacggagcaaaaactcgccggattcgctaaacagatcttaaaaggattaagctatttacacgctcttaagatcgttcatcgtgatatcaaaccggcgaatcttcttctcaattcgaaaaacgaagttaaaatcgctgatttcggagttagtaagatcttagtccgatcattagattcgtgtaattcgtatgttggtacttgtgcttatatgagtccggagaggtttgattcggaatcttccggtggaagctctgatatctacgccggagatatctggagtttcggattgatgatgcttgagcttctcgttggtcattttcctttgcttccgccgggacagagacctgattgggcgacgttgatgtgcgcggtgtgttttggagaaccgccgcgagcgccggagggatgttctgaagagtttaggagcttcgttgagtgttgtctccgtaaagattcgagtaagcgatggacggcgccgcagcttcttgctcatccttttctccgggaagatctttgattcgattccttttgtaacagaatctggaatcttaaaagttggaatattagatttgaaattattttaatttttgtagagttttctggagatatttatgatcgtgatttttgtacatataatatactccagaatgttaggggaaaatcgttcttg

SEQ ID NO: 105410 - protein, 310 aa, Arabidopsis thaliana; identical to SEQ ID NO: 27837
  peptide (1)..(310): Ceres Seq. ID no. 13617199
  misc_feature (47)..(306): Pfam Name: Protein kinase domain Pfam Description: Protein kinase domain
  misc_feature (1)..(310): Homolog of NCBI NO: 15219482 NR Description: mitogen-activated protein kinase kinase (MAPKK), (MKK9) [Arabidopsis thaliana] >gi|25287619|pir||G96761 probable
  misc_feature (1)..(310): Homolog of NCBI NO: 15221060 NR Description: mitogen-activated protein kinase kinase (MAPKK), (MKK7) [Arabidopsis thaliana]
  misc_feature (1)..(294): Homolog of NCBI NO: 15230671 NR Description: mitogen-activated protein kinase kinase (MAPKK), (MKK8) [Arabidopsis thaliana]
  misc_feature (10)..(309): Homolog of NCBI NO: 33563103 NR Description: mitogen-activated protein kinase kinase [Solanum
  misc_feature (1)..(306): Homolog of NCBI NO: 15232491 NR Description: mitogen-activated protein kinase kinase (MAPKK),
  misc_feature (1)..(306): Homolog of NCBI NO: 19698851 NR Description: MAP kinase kinase 5 [Arabidopsis thaliana]
  misc_feature (1)..(306): Homolog of NCBI NO: 25287595 NR Description: mitogen-activated protein kinase kinase (EC
  misc_feature (10)..(309): Homolog of NCBI NO: 12484128 NR Description: mitogen-activated protein kinase 2 [Nicotiana
  misc_feature (1)..(306): Homolog of NCBI NO: 15528439 NR Description: MEK map kinase kinsae [Medicago sativa subsp. x
  misc_feature (10)..(306): Homolog of NCBI NO: 15217998 NR Description: mitogen-activated protein kinase kinase (MAPKK),

SEQ ID NO: 105411 - protein, 229 aa, Arabidopsis thaliana; identical to SEQ ID NO: 27838
  peptide (1)..(229): Ceres Seq. ID no. 13617200
  misc_feature (1)..(225): Pfam Name: Protein kinase domain Pfam Description: Protein kinase domain
  misc_feature (1)..(229): Homolog of NCBI NO: 15219482 NR Description: mitogen-activated protein kinase kinase (MAPKK), (MKK9) [Arabidopsis thaliana] >gi|25287619|pir||G96761 probable
  misc_feature (1)..(229): Homolog of NCBI NO: 15221060 NR Description: mitogen-activated protein kinase kinase (MAPKK), (MKK7) [Arabidopsis thaliana]
  misc_feature (1)..(213): Homolog of NCBI NO: 15230671 NR Description: mitogen-activated protein kinase kinase (MAPKK), (MKK8) [Arabidopsis thaliana]
  misc_feature (1)..(228): Homolog of NCBI NO: 33563103 NR Description: mitogen-activated protein kinase kinase [Solanum
  misc_feature (1)..(225): Homolog of NCBI NO: 15232491 NR Description: mitogen-activated protein kinase kinase (MAPKK),
  misc_feature (1)..(225): Homolog of NCBI NO: 19698851 NR Description: MAP kinase kinase 5 [Arabidopsis thaliana]
  misc_feature (1)..(225): Homolog of NCBI NO: 25287595 NR Description: mitogen-activated protein kinase kinase (EC
  misc_feature (1)..(228): Homolog of NCBI NO: 12484128 NR Description: mitogen-activated protein kinase 2 [Nicotiana
  misc_feature (1)..(225): Homolog of NCBI NO: 15528439 NR Description: MEK map kinase kinsae [Medicago sativa subsp. x
  misc_feature (1)..(225): Homolog of NCBI NO: 15217998 NR Description: mitogen-activated protein kinase kinase (MAPKK),

SEQ ID NO: 105412 - protein, 220 aa, Arabidopsis thaliana; identical to SEQ ID NO: 40038
  peptide (1)..(220): Ceres Seq. ID no. 13617201
  misc_feature (1)..(216): Pfam Name: Protein kinase domain Pfam Description: Protein kinase domain
  misc_feature (1)..(220): Homolog of NCBI NO: 15219482 NR Description: mitogen-activated protein kinase kinase (MAPKK), (MKK9) [Arabidopsis thaliana] >gi|25287619|pir||G96761 probable
  misc_feature (1)..(220): Homolog of NCBI NO: 15221060 NR Description: mitogen-activated protein kinase kinase (MAPKK), (MKK7) [Arabidopsis thaliana]
  misc_feature (1)..(204): Homolog of NCBI NO: 15230671 NR Description: mitogen-activated protein kinase kinase (MAPKK), (MKK8) [Arabidopsis thaliana]
  misc_feature (1)..(219): Homolog of NCBI NO: 33563103 NR Description: mitogen-activated protein kinase kinase [Solanum
  misc_feature (1)..(216): Homolog of NCBI NO: 15232491 NR Description: mitogen-activated protein kinase kinase (MAPKK),
  misc_feature (1)..(216): Homolog of NCBI NO: 19698851 NR Description: MAP kinase kinase 5 [Arabidopsis thaliana]
  misc_feature (1)..(216): Homolog of NCBI NO: 25287595 NR Description: mitogen-activated protein kinase kinase (EC
  misc_feature (1)..(219): Homolog of NCBI NO: 12484128 NR Description: mitogen-activated protein kinase 2 [Nicotiana
  misc_feature (1)..(216): Homolog of NCBI NO: 15528439 NR Description: MEK map kinase kinsae [Medicago sativa subsp. x
  misc_feature (1)..(216): Homolog of NCBI NO: 15217998 NR Description: mitogen-activated protein kinase kinase (MAPKK),

SEQ ID NO: 105413 - DNA, 521 bp, Arabidopsis thaliana
  misc_feature (1)..(521): Ceres Seq. ID no. 13617202
  misc_feature: MA Experiment ID: 108595 Result: Up-regulated in Transcription
  misc_feature: MA Experiment 108595 PARAMETER Experiment Name: At_Ler-pi_Ovule_cDNA_P Parameter: Plant Line Value: null
  misc_feature: MA Experiment ID: 20000111 Result: Up-regulated in Transcription
  misc_feature: MA Experiment 20000111 PARAMETER Experiment Name: At_42deg_Heat_cDNA_P Parameter: Temperature (deg C) Value: 42 vs. 22
  misc_feature: MA Experiment 20000111 PARAMETER Experiment Name: At_42deg_Heat_cDNA_P Parameter: Timepoint (hr) Value: 6
  misc_feature: MA Experiment 20000111 PARAMETER Experiment Name: At_42deg_Heat_cDNA_P Parameter: Tissue Value: Aerial
  misc_feature: MA Experiment ID: 20000184 Result: Up-regulated in Transcription
  misc_feature: MA Experiment 20000184 PARAMETER Experiment Name: At_Shoots__P Parameter: Age (day) Value: 7
  misc_feature: MA Experiment 20000184 PARAMETER Experiment Name: At_Shoots__P Parameter: Tissue Value: Shoots vs. Whole Plant
aaaaatggagattaacaaatttctggccgtagtcgtagccgtcgtggtcctctactccgtcgaagcgacggcacaaggaggaaaccctcagttgacggcttgtctgcagaaactgctgccgtgtcagccgtacatacattcgctgaatccgcctcctccgccatcgtgttgcgggccgatgaaagagatcgtagagaaagacgcaccgtgtttatgcatcgcttttaacaatccggaggtgctcaaagccctaaacctcaccaaagagaacgctctcctacttcccaaggcatgtggagttaatcctgacgtttcactctgctccaaaatagccactccttcgcctattgcgtcgccgggatcaaccaatggaacctcttccgcttcaactatcagcttcaatcgatttagctttctgtctgcttttgtggcaatgatcttcttctgattatgtcattttttaatttataattatatgtgtgatgactgtgtaattcggtcatcagaatgtgtttaagtat

SEQ ID NO: 105414 - protein, 148 aa, Arabidopsis thaliana
  peptide (1)..(148): Ceres Seq. ID no. 13617203
  misc_feature (34)..(107): Pfam Name: Protease inhibitor/seed storage/LTP family Pfam Description: Protease inhibitor/seed storage/LTP family
  misc_feature (2)..(148): Homolog of NCBI NO: 18410388 NR Description: lipid transfer protein family [Arabidopsis
  misc_feature (2)..(148): Homolog of NCBI NO: 21593596 NR Description: lipid transfer protein, putative [Arabidopsis
  misc_feature (2)..(112): Homolog of NCBI NO: 25406276 NR Description: probable lipid transfer protein F6D5.5 [imported] Arabidopsis thaliana >gi|11120788|gb|AAG30968.1|AC012396_4 protein [Arabidopsis thaliana]
  misc_feature (2)..(124): Homolog of NCBI NO: 15219496 NR Description: protease inhibitor/seed storage/lipid transfer (LTP) family [Arabidopsis thaliana]
  misc_feature (2)..(119): Homolog of NCBI NO: 25406275 NR Description: hypothetical protein F6D5.6 [imported] - thaliana >gi|12323697|gb|AAG51811.1|AC079676_6 lipid transfer
  misc_feature (2)..(132): Homolog of NCBI NO: 15221052 NR Description: lipid transfer protein family [Arabidopsis >gi|6714296|gb|AAF25992.1|AC013354_11 F15H18.20 [Arabidopsis >gi|8671770|gb|AAF78376.1|AC069551_9 T10O22.25 [Arabidopsis
  misc_feature (32)..(148): Homolog of NCBI NO: 30696757 NR Description: protease inhibitor/seed storage/lipid transfer
  misc_feature (10)..(108): Homolog of NCBI NO: 15223104 NR Description: protease inhibitor/seed storage/lipid transfer (LTP) family [Arabidopsis thaliana] >gi|25406043|pir||D96725
  misc_feature (32)..(137): Homolog of NCBI NO: 15221585 NR Description: protease inhibitor/seed storage/lipid transfer
  misc_feature (9)..(130): Homolog of NCBI NO: 25553602 NR Description: OJ1656_E11.34 [Oryza sativa (japonica
KMEINKFLAVVVAVVVLYSVEATAQGGNPQLTACLQKLLPCQPYIHSLNPPPPPSCCGPMKEIVEKDAPCLCIAFNNPEVLKALNLTKENALLLPKACGVNPDVSLCSKIATPSPIASPGSTNGTSSASTISFNRFSFLSAFVAMIFF

SEQ ID NO: 105415 - protein, 147 aa, Arabidopsis thaliana
  peptide (1)..(147): Ceres Seq. ID no. 13617204
  misc_feature (33)..(106): Pfam Name: Protease inhibitor/seed storage/LTP family Pfam Description: Protease inhibitor/seed storage/LTP family
  misc_feature (1)..(147): Homolog of NCBI NO: 18410388 NR Description: lipid transfer protein family [Arabidopsis
  misc_feature (1)..(147): Homolog of NCBI NO: 21593596 NR Description: lipid transfer protein, putative [Arabidopsis
  misc_feature (1)..(111): Homolog of NCBI NO: 25406276 NR Description: probable lipid transfer protein F6D5.5 [imported] Arabidopsis thaliana >gi|11120788|gb|AAG30968.1|AC012396_4 protein [Arabidopsis thaliana]
  misc_feature (1)..(123): Homolog of NCBI NO: 15219496 NR Description: protease inhibitor/seed storage/lipid transfer (LTP) family [Arabidopsis thaliana]
  misc_feature (1)..(118): Homolog of NCBI NO: 25406275 NR Description: hypothetical protein F6D5.6 [imported] - thaliana >gi|12323697|gb|AAG51811.1|AC079676_6 lipid transfer
  misc_feature (1)..(131): Homolog of NCBI NO: 15221052 NR Description: lipid transfer protein family [Arabidopsis >gi|6714296|gb|AAF25992.1|AC013354_11 F15H18.20 [Arabidopsis >gi|8671770|gb|AAF78376.1|AC069551_9 T10O22.25 [Arabidopsis
  misc_feature (31)..(147): Homolog of NCBI NO: 30696757 NR Description: protease inhibitor/seed storage/lipid transfer
  misc_feature (9)..(107): Homolog of NCBI NO: 15223104 NR Description: protease inhibitor/seed storage/lipid transfer (LTP) family [Arabidopsis thaliana] >gi|25406043|pir||D96725
  misc_feature (31)..(136): Homolog of NCBI NO: 15221585 NR Description: protease inhibitor/seed storage/lipid transfer
  misc_feature (8)..(129): Homolog of NCBI NO: 25553602 NR Description: OJ1656_E11.34 [Oryza sativa (japonica
MEINKFLAVVVAVVVLYSVEATAQGGNPQLTACLQKLLPCQPYIHSLNPPPPPSCCGPMKEIVEKDAPCLCIAFNNPEVLKALNLTKENALLLPKACGVNPDVSLCSKIATPSPIASPGSTNGTSSASTISFNRFSFLSAFVAMIFF

SEQ ID NO: 105416 - protein, 89 aa, Arabidopsis thaliana
  peptide (1)..(89): Ceres Seq. ID no. 13617205
  misc_feature (1)..(89): Homolog of NCBI NO: 18410388 NR Description: lipid transfer protein family [Arabidopsis
  misc_feature (1)..(89): Homolog of NCBI NO: 21593596 NR Description: lipid transfer protein, putative [Arabidopsis
  misc_feature (1)..(53): Homolog of NCBI NO: 25406276 NR Description: probable lipid transfer protein F6D5.5 [imported] Arabidopsis thaliana >gi|11120788|gb|AAG30968.1|AC012396_4 protein [Arabidopsis thaliana]
  misc_feature (1)..(65): Homolog of NCBI NO: 15219496 NR Description: protease inhibitor/seed storage/lipid transfer (LTP) family [Arabidopsis thaliana]
  misc_feature (1)..(60): Homolog of NCBI NO: 25406275 NR Description: hypothetical protein F6D5.6 [imported] - thaliana >gi|12323697|gb|AAG51811.1|AC079676_6 lipid transfer
  misc_feature (1)..(73): Homolog of NCBI NO: 15221052 NR Description: lipid transfer protein family [Arabidopsis >gi|6714296|gb|AAF25992.1|AC013354_11 F15H18.20 [Arabidopsis >gi|8671770|gb|AAF78376.1|AC069551_9 T10O22.25 [Arabidopsis
  misc_feature (1)..(89): Homolog of NCBI NO: 30696757 NR Description: protease inhibitor/seed storage/lipid transfer
  misc_feature (1)..(49): Homolog of NCBI NO: 15223104 NR Description: protease inhibitor/seed storage/lipid transfer (LTP) family [Arabidopsis thaliana] >gi|25406043|pir||D96725
  misc_feature (1)..(78): Homolog of NCBI NO: 15221585 NR Description: protease inhibitor/seed storage/lipid transfer
  misc_feature (1)..(71): Homolog of NCBI NO: 25553602 NR Description: OJ1656_E11.34 [Oryza sativa (japonica
MKEIVEKDAPCLCIAFNNPEVLKALNLTKENALLLPKACGVNPDVSLCSKIATPSPIASPGSTNGTSSASTISFNRFSFLSAFVAMIFF

SEQ ID NO: 105417 - DNA, 964 bp, Arabidopsis thaliana
  misc_feature (1)..(964): Ceres Seq. ID no. 13617206
  misc_feature: MA Experiment ID: 108434 Result: Up-regulated in Transcription
  misc_feature: MA Experiment 108434 PARAMETER Experiment Name: At_Root_Tips_cDNA_P Parameter: Tissue Value: Root Tips
  misc_feature: MA Experiment ID: 108435 Result: Up-regulated in Transcription
  misc_feature: MA Experiment 108435 PARAMETER Experiment Name: At_stm_Mutants_cDNA_P Parameter: Plant Line Value: wt Landsburg vs stm
  misc_feature: MA Experiment 108435 PARAMETER Experiment Name: At_stm_Mutants_cDNA_P Parameter: Tissue Value: Shoot Apical Meristem Region
  misc_feature: MA Experiment ID: 108461 Result: Up-regulated in Transcription
  misc_feature: MA Experiment 108461 PARAMETER Experiment Name: At_Germinating_Seeds_cDNA_P Parameter: Age (day) Value: 1 vs. 0
  misc_feature: MA Experiment 108461 PARAMETER Experiment Name: At_Germinating_Seeds_cDNA_P Parameter: Tissue Value: Germinating Seeds
  misc_feature: MA Experiment ID: 108462 Result: Down-regulated in Transcription
  misc_feature: MA Experiment 108462 PARAMETER Experiment Name: At_Germinating_Seeds_cDNA_P Parameter: Age (day) Value: 2 vs. 0
  misc_feature: MA Experiment 108462 PARAMETER Experiment Name: At_Germinating_Seeds_cDNA_P Parameter: Tissue Value: Germinating Seeds
  misc_feature: MA Experiment ID: 108463 Result: Down-regulated in Transcription
  misc_feature: MA Experiment 108463 PARAMETER Experiment Name: At_Germinating_Seeds_cDNA_P Parameter: Age (day) Value: 3 vs. 0
  misc_feature: MA Experiment 108463 PARAMETER Experiment Name: At_Germinating_Seeds_cDNA_P Parameter: Tissue Value: Germinating Seeds
  misc_feature: MA Experiment ID: 108464 Result: Down-regulated in Transcription
  misc_feature: MA Experiment 108464 PARAMETER Experiment Name: At_Germinating_Seeds_cDNA_P Parameter: Age (day) Value: 4 vs. 0
  misc_feature: MA Experiment 108464 PARAMETER Experiment Name: At_Germinating_Seeds_cDNA_P Parameter: Tissue Value: Germinating Seeds
  misc_feature: MA Experiment ID: 108501 Result: Up-regulated in Transcription
  misc_feature: MA Experiment 108501 PARAMETER Experiment Name: At_ap2_floral_buds_cDNA_P Parameter: Plant Line Value: ap2 (Ler.)
  misc_feature: MA Experiment 108501 PARAMETER Experiment Name: At_ap2_floral_buds_cDNA_P Parameter: Tissue Value: Closed Flower
  misc_feature: MA Experiment ID: 108595 Result: Up-regulated in Transcription
  misc_feature: MA Experiment 108595 PARAMETER Experiment Name: At_Ler-pi_Ovule_cDNA_P Parameter: Plant Line Value: null
  misc_feature: MA Experiment ID: 20000171 Result: Down-regulated in Transcription
  misc_feature: MA Experiment 20000171 PARAMETER Experiment Name: At_42deg_Heat_P Parameter: Age (day) Value: 14
  misc_feature: MA Experiment 20000171 PARAMETER Experiment Name: At_42deg_Heat_P Parameter: Organism Value: A. thaliana
  misc_feature: MA Experiment 20000171 PARAMETER Experiment Name: At_42deg_Heat_P Parameter: Plant Line Value: WS
  misc_feature: MA Experiment 20000171 PARAMETER Experiment Name: At_42deg_Heat_P Parameter: Temperature (deg C) Value: 42 vs. 22
  misc_feature: MA Experiment 20000171 PARAMETER Experiment Name: At_42deg_Heat_P Parameter: Timepoint (hr) Value: 1
  misc_feature: MA Experiment 20000171 PARAMETER Experiment Name: At_42deg_Heat_P Parameter: Tissue Value: Aerial
  misc_feature: MA Experiment ID: 20000173 Result: Down-regulated in Transcription
  misc_feature: MA Experiment 20000173 PARAMETER Experiment Name: At_42deg_Heat_P Parameter: Age (day) Value: 14
  misc_feature: MA Experiment 20000173 PARAMETER Experiment Name: At_42deg_Heat_P Parameter: Organism Value: A. thaliana
  misc_feature: MA Experiment 20000173 PARAMETER Experiment Name: At_42deg_Heat_P Parameter: Plant Line Value: WS
  misc_feature: MA Experiment 20000173 PARAMETER Experiment Name: At_42deg_Heat_P Parameter: Temperature (deg C) Value: 42 vs. 22
  misc_feature: MA Experiment 20000173 PARAMETER Experiment Name: At_42deg_Heat_P Parameter: Timepoint (hr) Value: 6
  misc_feature: MA Experiment 20000173 PARAMETER Experiment Name: At_42deg_Heat_P Parameter: Tissue Value: Aerial
  misc_feature: MA Experiment ID: 20000179 Result: Up-regulated in Transcription
  misc_feature: MA Experiment 20000179 PARAMETER Experiment Name: At_Germinating_Seeds_P Parameter: Age (hr) Value: 6 vs. 0
  misc_feature: MA Experiment 20000179 PARAMETER Experiment Name: At_Germinating_Seeds_P Parameter: Tissue Value: Germinating Seeds
  misc_feature: MA Experiment ID: 20000180 Result: Up-regulated in Transcription
  misc_feature: MA Experiment 20000180 PARAMETER Experiment Name: At_Germinating_Seeds_P Parameter: Age (hr) Value: 24 vs. 0
  misc_feature: MA Experiment 20000180 PARAMETER Experiment Name: At_Germinating_Seeds_P Parameter: Tissue Value: Germinating Seeds
  misc_feature: MA Experiment ID: 20000184 Result: Up-regulated in Transcription
  misc_feature: MA Experiment 20000184 PARAMETER Experiment Name: At_Shoots__P Parameter: Age (day) Value: 7
  misc_feature: MA Experiment 20000184 PARAMETER Experiment Name: At_Shoots__P Parameter: Tissue Value: Shoots vs. Whole Plant
  misc_feature: MA Experiment ID: 20000185 Result: Up-regulated in Transcription
  misc_feature: MA Experiment 20000185 PARAMETER Experiment Name: At_Roots__P Parameter: Age (day) Value: 7 vs. 21
  misc_feature: MA Experiment 20000185 PARAMETER Experiment Name: At_Roots__P Parameter: Organism Value: A. thaliana
  misc_feature: MA Experiment 20000185 PARAMETER Experiment Name: At_Roots__P Parameter: Tissue Value: Roots vs. Whole Plant
  misc_feature: MA Experiment ID: 20000227 Result: Up-regulated in Transcription
  misc_feature: MA Experiment 20000227 PARAMETER Experiment Name: At_Root-Tips-vs-Tops_P Parameter: Tissue Value: Root Tips vs. Root Tops
  misc_feature: MA Experiment ID: 20000234 Result: Up-regulated in Transcription
  misc_feature: MA Experiment 20000234 PARAMETER Experiment Name: At_Siliques_P Parameter: Age (day) Value: 21
  misc_feature: MA Experiment 20000234 PARAMETER Experiment Name: At_Siliques_P Parameter: Organism Value: A. thaliana
  misc_feature: MA Experiment 20000234 PARAMETER Experiment Name: At_Siliques_P Parameter: Plant Line Value: WS
  misc_feature: MA Experiment 20000234 PARAMETER Experiment Name: At_Siliques_P Parameter: Tissue Value: Less Than 5mm Siliques vs. Whole Plant
  misc_feature: MA Experiment ID: 20000235 Result: Up-regulated in Transcription
  misc_feature: MA Experiment 20000235 PARAMETER Experiment Name: At_Siliques_P Parameter: Age (day) Value: 21
  misc_feature: MA Experiment 20000235 PARAMETER Experiment Name: At_Siliques_P Parameter: Organism Value: A. thaliana
  misc_feature: MA Experiment 20000235 PARAMETER Experiment Name: At_Siliques_P Parameter: Plant Line Value: WS
  misc_feature: MA Experiment 20000235 PARAMETER Experiment Name: At_Siliques_P Parameter: Tissue Value: 5-10mm Siliques vs. Whole Plant
  misc_feature: MA Experiment ID: 20000264 Result: Up-regulated in Transcription
  misc_feature: MA Experiment 20000264 PARAMETER Experiment Name: At_Open_Flower_P Parameter: Age (day) Value: 21
  misc_feature: MA Experiment 20000264 PARAMETER Experiment Name: At_Open_Flower_P Parameter: Plant Line Value: WS
  misc_feature: MA Experiment 20000264 PARAMETER Experiment Name: At_Open_Flower_P Parameter: Tissue Value: Open Flower vs. Whole Plant
  misc_feature: MA Experiment ID: 20000265 Result: Up-regulated in Transcription
  misc_feature: MA Experiment 20000265 PARAMETER Experiment Name: At_Open_Flower_P Parameter: Age (day) Value: 21
  misc_feature: MA Experiment 20000265 PARAMETER Experiment Name: At_Open_Flower_P Parameter: Plant Line Value: WS
  misc_feature: MA Experiment 20000265 PARAMETER Experiment Name: At_Open_Flower_P Parameter: Tissue Value: Closed Flower vs. Whole Plant
  misc_feature: MA Experiment ID: 20000286 Result: Up-regulated in Transcription
  misc_feature: MA Experiment 20000286 PARAMETER Experiment Name: At_Open_Flower_P Parameter: Age (day) Value: 21
  misc_feature: MA Experiment 20000286 PARAMETER Experiment Name: At_Open_Flower_P Parameter: Plant Line Value: WS
  misc_feature: MA Experiment 20000286 PARAMETER Experiment Name: At_Open_Flower_P Parameter: Tissue Value: Half Open vs. Whole Plant
  misc_feature: MA Experiment ID: 20000436 Result: Down-regulated in Transcription
  misc_feature: MA Experiment 20000436 PARAMETER Experiment Name: At_Drought_P Parameter: Age (day) Value: 7
  misc_feature: MA Experiment 20000436 PARAMETER Experiment Name: At_Drought_P Parameter: Organism Value: A. thaliana
  misc_feature: MA Experiment 20000436 PARAMETER Experiment Name: At_Drought_P Parameter: Plant Line Value: WS
  misc_feature: MA Experiment 20000436 PARAMETER Experiment Name: At_Drought_P Parameter: Timepoint (hr) Value: 12
  misc_feature: MA Experiment 20000436 PARAMETER Experiment Name: At_Drought_P Parameter: Tissue Value: Whole Plant
  misc_feature: MA Experiment 20000436 PARAMETER Experiment Name: At_Drought_P Parameter: Treatment Value: Drought vs. No Drought
  misc_feature: MA Experiment ID: 20000437 Result: Down-regulated in Transcription
  misc_feature: MA Experiment 20000437 PARAMETER Experiment Name: At_Drought_P Parameter: Age (day) Value: 8
  misc_feature: MA Experiment 20000437 PARAMETER Experiment Name: At_Drought_P Parameter: Organism Value: A. thaliana
  misc_feature: MA Experiment 20000437 PARAMETER Experiment Name: At_Drought_P Parameter: Plant Line Value: WS
  misc_feature: MA Experiment 20000437 PARAMETER Experiment Name: At_Drought_P Parameter: Timepoint (hr) Value: 24
  misc_feature: MA Experiment 20000437 PARAMETER Experiment Name: At_Drought_P Parameter: Tissue Value: Whole Plant
  misc_feature: MA Experiment 20000437 PARAMETER Experiment Name: At_Drought_P Parameter: Treatment Value: Drought vs. No Drought
  misc_feature: MA Experiment ID: 20000439 Result: Up-regulated in Transcription
  misc_feature: MA Experiment 20000439 PARAMETER Experiment Name: At_Roots__P Parameter: Age (day) Value: 14 vs. 21
  misc_feature: MA Experiment 20000439 PARAMETER Experiment Name: At_Roots__P Parameter: Organism Value: A. thaliana
  misc_feature: MA Experiment 20000439 PARAMETER Experiment Name: At_Roots__P Parameter: Tissue Value: Roots vs. Whole Plant
  misc_feature: MA Experiment ID: 20000453 Result: Down-regulated in Transcription
  misc_feature: MA Experiment 20000453 PARAMETER Experiment Name: At_100uM_ABA_P Parameter: Age (day) Value: 15
  misc_feature: MA Experiment 20000453 PARAMETER Experiment Name: At_100uM_ABA_P Parameter: Organism Value: A. thaliana
  misc_feature: MA Experiment 20000453 PARAMETER Experiment Name: At_100uM_ABA_P Parameter: Plant Line Value: WS
  misc_feature: MA Experiment 20000453 PARAMETER Experiment Name: At_100uM_ABA_P Parameter: Timepoint (hr) Value: 24
  misc_feature: MA Experiment 20000453 PARAMETER Experiment Name: At_100uM_ABA_P Parameter: Tissue Value: Aerial
  misc_feature: MA Experiment 20000453 PARAMETER Experiment Name: At_100uM_ABA_P Parameter: Treatment Value: 100uM ABA vs. No Treatment
  misc_feature: MA Experiment ID: 20000495 Result: Up-regulated in Transcription
  misc_feature: MA Experiment 20000495 PARAMETER Experiment Name: At_Guard_Cells_P Parameter: Harvest Date Value: 8/2/2002
  misc_feature: MA Experiment 20000495 PARAMETER Experiment Name: At_Guard_Cells_P Parameter: Organism Value: A. thaliana
  misc_feature: MA Experiment 20000495 PARAMETER Experiment Name: At_Guard_Cells_P Parameter: Tissue Value: Guard Cells vs. Leaves
  misc_feature: MA Experiment ID: 20000496 Result: Up-regulated in Transcription
  misc_feature: MA Experiment 20000496 PARAMETER Experiment Name: At_Guard_Cells_P Parameter: Harvest Date Value: 7/19/2002
  misc_feature: MA Experiment 20000496 PARAMETER Experiment Name: At_Guard_Cells_P Parameter: Organism Value: Canola
  misc_feature: MA Experiment 20000496 PARAMETER Experiment Name: At_Guard_Cells_P Parameter: Tissue Value: Guard Cells vs. Leaves
  misc_feature: MA Experiment ID: 20001247 Result: Down-regulated in Transcription
  misc_feature: MA Experiment 20001247 PARAMETER Experiment Name: At_Far-red-induction_P Parameter: Age (day) Value: 7
  misc_feature: MA Experiment 20001247 PARAMETER Experiment Name: At_Far-red-induction_P Parameter: Light Value: Far-red vs. White
  misc_feature: MA Experiment 20001247 PARAMETER Experiment Name: At_Far-red-induction_P Parameter: Organism Value: A. thaliana
  misc_feature: MA Experiment 20001247 PARAMETER Experiment Name: At_Far-red-induction_P Parameter: Plant Line Value: Columbia
  misc_feature: MA Experiment 20001247 PARAMETER Experiment Name: At_Far-red-induction_P Parameter: Timepoint (hr) Value: 1
  misc_feature: MA Experiment 20001247 PARAMETER Experiment Name: At_Far-red-induction_P Parameter: Tissue Value: Whole Plant
  misc_feature: MA Experiment ID: 20001450 Result: Down-regulated in Transcription
  misc_feature: MA Experiment 20001450 PARAMETER Experiment Name: At_Far-red-induction_P Parameter: Age (day) Value: 7
  misc_feature: MA Experiment 20001450 PARAMETER Experiment Name: At_Far-red-induction_P Parameter: Light Value: Far-red vs. White
  misc_feature: MA Experiment 20001450 PARAMETER Experiment Name: At_Far-red-induction_P Parameter: Organism Value: A. thaliana
  misc_feature: MA Experiment 20001450 PARAMETER Experiment Name: At_Far-red-induction_P Parameter: Plant Line Value: Columbia
  misc_feature: MA Experiment 20001450 PARAMETER Experiment Name: At_Far-red-induction_P Parameter: Timepoint (hr) Value: 8
  misc_feature: MA Experiment 20001450 PARAMETER Experiment Name: At_Far-red-induction_P Parameter: Tissue Value: Whole Plant
  misc_feature: MA Experiment ID: 20001451 Result: Down-regulated in Transcription
  misc_feature: MA Experiment 20001451 PARAMETER Experiment Name: At_Far-red-induction_P Parameter: Age (day) Value: 7
  misc_feature: MA Experiment 20001451 PARAMETER Experiment Name: At_Far-red-induction_P Parameter: Light Value: Far-red vs. White
  misc_feature: MA Experiment 20001451 PARAMETER Experiment Name: At_Far-red-induction_P Parameter: Organism Value: A. thaliana
  misc_feature: MA Experiment 20001451 PARAMETER Experiment Name: At_Far-red-induction_P Parameter: Plant Line Value: Columbia
  misc_feature: MA Experiment 20001451 PARAMETER Experiment Name: At_Far-red-induction_P Parameter: Timepoint (hr) Value: 24
  misc_feature: MA Experiment 20001451 PARAMETER Experiment Name: At_Far-red-induction_P Parameter: Tissue Value: Whole Plant
  misc_feature: MA Experiment ID: 20001457 Result: Up-regulated in Transcription
  misc_feature: MA Experiment 20001457 PARAMETER Experiment Name: At_50mM_NH4NO3_L-to-H_P Parameter: Age (day) Value: Undefined
  misc_feature: MA Experiment 20001457 PARAMETER Experiment Name: At_50mM_NH4NO3_L-to-H_P Parameter: Organism Value: Undefined
  misc_feature: MA Experiment 20001457 PARAMETER Experiment Name: At_50mM_NH4NO3_L-to-H_P Parameter: Plant Line Value: Undefined
  misc_feature: MA Experiment 20001457 PARAMETER Experiment Name: At_50mM_NH4NO3_L-to-H_P Parameter: Timepoint (hr) Value: 0.5
  misc_feature: MA Experiment 20001457 PARAMETER Experiment Name: At_50mM_NH4NO3_L-to-H_P Parameter: Tissue Value: Siliques
  misc_feature: MA Experiment 20001457 PARAMETER Experiment Name: At_50mM_NH4NO3_L-to-H_P Parameter: Treatment Value: 50mM NH4NO3 vs. 100mM Manitol
  misc_feature: MA Experiment ID: 20001560 Result: Up-regulated in Transcription
  misc_feature: MA Experiment 20001560 PARAMETER Experiment Name: At_Drought_Soil_Dry_P Parameter: Age (day) Value: 28
  misc_feature: MA Experiment 20001560 PARAMETER Experiment Name: At_Drought_Soil_Dry_P Parameter: Organism Value: A. thaliana
  misc_feature: MA Experiment 20001560 PARAMETER Experiment Name: At_Drought_Soil_Dry_P Parameter: Plant Line Value: WS
  misc_feature: MA Experiment 20001560 PARAMETER Experiment Name: At_Drought_Soil_Dry_P Parameter: Post Timepoint (hr) Value: None
  misc_feature: MA Experiment 20001560 PARAMETER Experiment Name: At_Drought_Soil_Dry_P Parameter: Post-Treatment Value: None
  misc_feature: MA Experiment 20001560 PARAMETER Experiment Name: At_Drought_Soil_Dry_P Parameter: Timepoint (day) Value: 14
  misc_feature: MA Experiment 20001560 PARAMETER Experiment Name: At_Drought_Soil_Dry_P Parameter: Treatment Value: Drought vs. No Drought
ataaagagaaaatctccaaaagcaatgaccaatgagaaatgtgaagttgctcttccactaaagttgaaatcagaaaaaccatcaatggcttcttcatcatctctctttctcctccctctccttcttcttgtctcccaagcttcagcttcaacggttatattttacaacaagtgcacgtacactgtctggcctgggatccaacctagctccggtcagtcattactcgccggcggcggatttaaactgtcgccgaacagagcttacactctccaacttccaccgctctggtccggtcgcttctggggccgccacggttgctcctttgacagatctggccgtggtcgctgcgccaccggagactgtggtggttctttcctctgtaacggagctggcggtgtacctccggctactcttgccgagatcaccctcggtcatgacatggacttttatgacgtcagcctcgttgatggatataacttggcgatgtcgataatgccggtgaagggtacgggaaagtgtacctacgctggttgcgtaagcgacctgaaccggatgtgcccggttggtctacaagtccgttcacgtgacgggacacaggtagtagcctgtaaaagcgcatgctctgcgtttaactcaccacgctattgctgtaccggcttgttcggtaacccacagtcatgcaagccaacggcttactctaagatcttcaaggtagcttgccctaaggcttactcatacgcctacgatgacccaactagcattgcgacatgttctaaagctaattatgtcgtcactttttgccctcaccgcggccgttgattaaagggattgacatctatgaataattttgcttgactatttagtacgagatcttctttttgagttatcgacccgtttttttgttttggaatttagtgatttcatcgatttgttacaaagaacatgcattatttatgcgtctttt

SEQ ID NO: 105418 - protein, 272 aa, Arabidopsis thaliana; identical to SEQ ID NO: 30204
  peptide (1)..(272): Ceres Seq. ID no. 13617207
  misc_feature (56)..(268): Pfam Name: Thaumatin family Pfam Description: Thaumatin family
  misc_feature (9)..(272): Homolog of NCBI NO: 15219508 NR Description: thaumatin-like protein (pathogenesis-related
  misc_feature (29)..(272): Homolog of NCBI NO: 21553814 NR Description: thaumatin-like protein [Arabidopsis thaliana]
  misc_feature (31)..(269): Homolog of NCBI NO: 15221033 NR Description: thaumatin-like protein [Arabidopsis thaliana]
  misc_feature (31)..(269): Homolog of NCBI NO: 2129751 NR Description: thaumatin-like protein - Arabidopsis thaliana
  misc_feature (31)..(272): Homolog of NCBI NO: 7442175 NR Description: thaumatin-like protein - turnip
  misc_feature (169)..(269): Homolog of NCBI NO: 25296198 NR Description: protein T10O22.21 [imported] - Arabidopsis >gi|8671776|gb|AAF78382.1|AC069551_15 T10O22.21 [Arabidopsis
  misc_feature (40)..(132): Homolog of NCBI NO: 25296198 NR Description: protein T10O22.21 [imported] - Arabidopsis >gi|8671776|gb|AAF78382.1|AC069551_15 T10O22.21 [Arabidopsis
  misc_feature (29)..(268): Homolog of NCBI NO: 6273385 NR Description: SCUTL2 [Vitis vinifera]
  misc_feature (29)..(268): Homolog of NCBI NO: 15222088 NR Description: thaumatin-like protein [Arabidopsis thaliana]
  misc_feature (29)..(268): Homolog of NCBI NO: 2435406 NR Description: thaumatin-like protein [Arabidopsis thaliana]

SEQ ID NO: 105419 - protein, 264 aa, Arabidopsis thaliana; identical to SEQ ID NO: 30205
  peptide (1)..(264): Ceres Seq. ID no. 13617208
  misc_feature (48)..(260): Pfam Name: Thaumatin family Pfam Description: Thaumatin family
  misc_feature (1)..(264): Homolog of NCBI NO: 15219508 NR Description: thaumatin-like protein (pathogenesis-related
  misc_feature (21)..(264): Homolog of NCBI NO: 21553814 NR Description: thaumatin-like protein [Arabidopsis thaliana]
  misc_feature (23)..(261): Homolog of NCBI NO: 15221033 NR Description: thaumatin-like protein [Arabidopsis thaliana]
  misc_feature (23)..(261): Homolog of NCBI NO: 2129751 NR Description: thaumatin-like protein - Arabidopsis thaliana
  misc_feature (23)..(264): Homolog of NCBI NO: 7442175 NR Description: thaumatin-like protein - turnip
  misc_feature (161)..(261): Homolog of NCBI NO: 25296198 NR Description: protein T10O22.21 [imported] - Arabidopsis >gi|8671776|gb|AAF78382.1|AC069551_15 T10O22.21 [Arabidopsis
  misc_feature (32)..(124): Homolog of NCBI NO: 25296198 NR Description: protein T10O22.21 [imported] - Arabidopsis >gi|8671776|gb|AAF78382.1|AC069551_15 T10O22.21 [Arabidopsis
  misc_feature (21)..(260): Homolog of NCBI NO: 6273385 NR Description: SCUTL2 [Vitis vinifera]
  misc_feature (21)..(260): Homolog of NCBI NO: 15222088 NR Description: thaumatin-like protein [Arabidopsis thaliana]
  misc_feature (21)..(260): Homolog of NCBI NO: 2435406 NR Description: thaumatin-like protein [Arabidopsis thaliana]

SEQ ID NO: 105420 - protein, 244 aa, Arabidopsis thaliana; identical to SEQ ID NO: 30206
  peptide (1)..(244): Ceres Seq. ID no. 13617209
  misc_feature (28)..(240): Pfam Name: Thaumatin family Pfam Description: Thaumatin family
  misc_feature (1)..(244): Homolog of NCBI NO: 15219508 NR Description: thaumatin-like protein (pathogenesis-related
  misc_feature (1)..(244): Homolog of NCBI NO: 21553814 NR Description: thaumatin-like protein [Arabidopsis thaliana]
  misc_feature (3)..(241): Homolog of NCBI NO: 15221033 NR Description: thaumatin-like protein [Arabidopsis thaliana]
  misc_feature (3)..(241): Homolog of NCBI NO: 2129751 NR Description: thaumatin-like protein - Arabidopsis thaliana
  misc_feature (3)..(244): Homolog of NCBI NO: 7442175 NR Description: thaumatin-like protein - turnip
  misc_feature (141)..(241): Homolog of NCBI NO: 25296198 NR Description: protein T10O22.21 [imported] - Arabidopsis >gi|8671776|gb|AAF78382.1|AC069551_15 T10O22.21 [Arabidopsis
  misc_feature (12)..(104): Homolog of NCBI NO: 25296198 NR Description: protein T10O22.21 [imported] - Arabidopsis >gi|8671776|gb|AAF78382.1|AC069551_15 T10O22.21 [Arabidopsis
  misc_feature (1)..(240): Homolog of NCBI NO: 6273385 NR Description: SCUTL2 [Vitis vinifera]
  misc_feature (1)..(240): Homolog of NCBI NO: 15222088 NR Description: thaumatin-like protein [Arabidopsis thaliana]
  misc_feature (1)..(240): Homolog of NCBI NO: 2435406 NR Description: thaumatin-like protein [Arabidopsis thaliana]

SEQ ID NO: 105421 - DNA, 883 bp, Arabidopsis thaliana
  misc_feature (1)..(883): Ceres Seq. ID no. 13617214
  misc_feature: MA Experiment ID: 108434 Result: Down-regulated in Transcription
  misc_feature: MA Experiment 108434 PARAMETER Experiment Name: At_Root_Tips_cDNA_P Parameter: Tissue Value: Root Tips
  misc_feature: MA Experiment ID: 108464 Result: Up-regulated in Transcription
  misc_feature: MA Experiment 108464 PARAMETER Experiment Name: At_Germinating_Seeds_cDNA_P Parameter: Age (day) Value: 4 vs. 0
  misc_feature: MA Experiment 108464 PARAMETER Experiment Name: At_Germinating_Seeds_cDNA_P Parameter: Tissue Value: Germinating Seeds
  misc_feature: MA Experiment ID: 20000264 Result: Down-regulated in Transcription
  misc_feature: MA Experiment 20000264 PARAMETER Experiment Name: At_Open_Flower_P Parameter: Age (day) Value: 21
  misc_feature: MA Experiment 20000264 PARAMETER Experiment Name: At_Open_Flower_P Parameter: Plant Line Value: WS
  misc_feature: MA Experiment 20000264 PARAMETER Experiment Name: At_Open_Flower_P Parameter: Tissue Value: Open Flower vs. Whole Plant
  misc_feature: MA Experiment ID: 20000265 Result: Down-regulated in Transcription
  misc_feature: MA Experiment 20000265 PARAMETER Experiment Name: At_Open_Flower_P Parameter: Age (day) Value: 21
  misc_feature: MA Experiment 20000265 PARAMETER Experiment Name: At_Open_Flower_P Parameter: Plant Line Value: WS
  misc_feature: MA Experiment 20000265 PARAMETER Experiment Name: At_Open_Flower_P Parameter: Tissue Value: Closed Flower vs. Whole Plant
  misc_feature: MA Experiment ID: 20000286 Result: Down-regulated in Transcription
  misc_feature: MA Experiment 20000286 PARAMETER Experiment Name: At_Open_Flower_P Parameter: Age (day) Value: 21
  misc_feature: MA Experiment 20000286 PARAMETER Experiment Name: At_Open_Flower_P Parameter: Plant Line Value: WS
  misc_feature: MA Experiment 20000286 PARAMETER Experiment Name: At_Open_Flower_P Parameter: Tissue Value: Half Open vs. Whole Plant
  misc_feature: MA Experiment ID: 20000438 Result: Down-regulated in Transcription
  misc_feature: MA Experiment 20000438 PARAMETER Experiment Name: At_Shoots__P Parameter: Age (day) Value: 14
  misc_feature: MA Experiment 20000438 PARAMETER Experiment Name: At_Shoots__P Parameter: Tissue Value: Shoots vs. Whole Plant
  misc_feature: MA Experiment ID: 20000794 Result: Down-regulated in Transcription
  misc_feature: MA Experiment 20000794 PARAMETER Experiment Name: At_Petals_P Parameter: Age (day) Value: 23-25 days
  misc_feature: MA Experiment 20000794 PARAMETER Experiment Name: At_Petals_P Parameter: Plant Line Value: WS
  misc_feature: MA Experiment 20000794 PARAMETER Experiment Name: At_Petals_P Parameter: Tissue Value: Petals vs. Whole plant
  misc_feature: MA Experiment ID: 20001556 Result: Down-regulated in Transcription
  misc_feature: MA Experiment 20001556 PARAMETER Experiment Name: At_Drought_Soil_Dry_P Parameter: Age (day) Value: 26
  misc_feature: MA Experiment 20001556 PARAMETER Experiment Name: At_Drought_Soil_Dry_P Parameter: Organism Value: A. thaliana
  misc_feature: MA Experiment 20001556 PARAMETER Experiment Name: At_Drought_Soil_Dry_P Parameter: Plant Line Value: WS
  misc_feature: MA Experiment 20001556 PARAMETER Experiment Name: At_Drought_Soil_Dry_P Parameter: Post Timepoint (hr) Value: None
  misc_feature: MA Experiment 20001556 PARAMETER Experiment Name: At_Drought_Soil_Dry_P Parameter: Post-Treatment Value: None
  misc_feature: MA Experiment 20001556 PARAMETER Experiment Name: At_Drought_Soil_Dry_P Parameter: Timepoint (day) Value: 12
  misc_feature: MA Experiment 20001556 PARAMETER Experiment Name: At_Drought_Soil_Dry_P Parameter: Treatment Value: Drought vs. No Drought
  misc_feature: MA Experiment ID: 20001773 Result: Up-regulated in Transcription
  misc_feature: MA Experiment 20001773 PARAMETER Experiment Name: At_Far-red-enriched-adult_P Parameter: Age (day) Value: 30
  misc_feature: MA Experiment 20001773 PARAMETER Experiment Name: At_Far-red-enriched-adult_P Parameter: Light Value: Far-red enriched vs. White
  misc_feature: MA Experiment 20001773 PARAMETER Experiment Name: At_Far-red-enriched-adult_P Parameter: Organism Value: A. thaliana
  misc_feature: MA Experiment 20001773 PARAMETER Experiment Name: At_Far-red-enriched-adult_P Parameter: Plant Line Value: Columbia
  misc_feature: MA Experiment 20001773 PARAMETER Experiment Name: At_Far-red-enriched-adult_P Parameter: Timepoint (hr) Value: 48
  misc_feature: MA Experiment 20001773 PARAMETER Experiment Name: At_Far-red-enriched-adult_P Parameter: Tissue Value: Aerial
  misc_feature: MA Experiment ID: 20001906 Result: Down-regulated in Transcription
  misc_feature: MA Experiment 20001906 PARAMETER Experiment Name: At_Drought_Reproduction_P Parameter: Age (day) Value: 35
  misc_feature: MA Experiment 20001906 PARAMETER Experiment Name: At_Drought_Reproduction_P Parameter: Organism Value: A. thaliana
  misc_feature: MA Experiment 20001906 PARAMETER Experiment Name: At_Drought_Reproduction_P Parameter: Plant Line Value: WS
  misc_feature: MA Experiment 20001906 PARAMETER Experiment Name: At_Drought_Reproduction_P Parameter: Timepoint (day) Value: 5
  misc_feature: MA Experiment 20001906 PARAMETER Experiment Name: At_Drought_Reproduction_P Parameter: Tissue Value: Siliques
  misc_feature: MA Experiment 20001906 PARAMETER Experiment Name: At_Drought_Reproduction_P Parameter: Treatment Value: Drought vs. No Drought
  misc_feature: MA Experiment ID: 20001911 Result: Down-regulated in Transcription
  misc_feature: MA Experiment 20001911 PARAMETER Experiment Name: At_Drought_Reproduction_P Parameter: Age (day) Value: 40
  misc_feature: MA Experiment 20001911 PARAMETER Experiment Name: At_Drought_Reproduction_P Parameter: Organism Value: A. thaliana
  misc_feature: MA Experiment 20001911 PARAMETER Experiment Name: At_Drought_Reproduction_P Parameter: Plant Line Value: WS
  misc_feature: MA Experiment 20001911 PARAMETER Experiment Name: At_Drought_Reproduction_P Parameter: Timepoint (day) Value: 10
  misc_feature: MA Experiment 20001911 PARAMETER Experiment Name: At_Drought_Reproduction_P Parameter: Tissue Value: Flowers
  misc_feature: MA Experiment 20001911 PARAMETER Experiment Name: At_Drought_Reproduction_P Parameter: Treatment Value: Drought vs. No Drought
aaaacaaaagaggaacttgagaattttatgcttgagacaaaatggcagaagatacgtacgaggaagagtgcgactacttgtttaaggcggtgttgatcggagactcagccgtcggaaaatcaaacctcttgtctagattttctaaagacgagttccggtttgactctaaaccaaccatcggagtagagtttgcttaccggaatgttcacgtcggagataaaatcatcaaggctcagatttgggacaccgccggccaagaaagatttcgagcaatcacaagttcgtactaccgtggagcattaggggcattactgatttacgacatcactagacgaacaactttcgacaacatcaagaaatggcttttcgagcttagagacttcgccaatcccgaaaccgtcgttgtcctcgtcggaaacaaatctgatctccgacaatctagagaagttgaagaagacgagggtaagactctagcagaatcagaaggtctctacttcctcgagacttcggctttagagaatgttaacgtcgaagaagcgtttctagtgatgatcggacggatacatgaggttgttactcagaggatagcttcggaaaacaaatccaacggtgctgcgacgcctcacattaacggtaatgggaacggtacggtccttccggttggtaaagaaattgtgaatatacacgaagtcactgctactcaacccttattaagctcatcttccaactgttgtttcaagtaaataattaatgtatttttttcgtttattgttttggaatactttgatgatgtttttatttgcctgtgtattcgtgaaaattttgcctaggttgagtacatgaatttaaatcatacaattaaatccaaataaatatgaaaatc

SEQ ID NO: 105422 - protein, 233 aa, Arabidopsis thaliana; identical to SEQ ID NO: 41070
  peptide (1)..(233): Ceres Seq. ID no. 13617215
  misc_feature (15)..(176): Pfam Name: Ras family Pfam Description: Ras family
  misc_feature (1)..(233): Homolog of NCBI NO: 15219515 NR Description: Ras family GTP-binding protein [Arabidopsis
  misc_feature (1)..(211): Homolog of NCBI NO: 9719734 NR Description: Contains similarity to ras-related GTP binding from Oryza sativa gb|D13758 and is a member of the Ras PF|00071
  misc_feature (1)..(211): Homolog of NCBI NO: 15221005 NR Description: Ras family GTP-binding protein [Arabidopsis
  misc_feature (1)..(231): Homolog of NCBI NO: 1370152 NR Description: RAB11F [Lotus japonicus]
  misc_feature (1)..(211): Homolog of NCBI NO: 15242483 NR Description: GTP-binding protein, putative [Arabidopsis
  misc_feature (7)..(191): Homolog of NCBI NO: 730512 NR Description: RAS-RELATED PROTEIN RIC2 >gi|481506|pir||S38741
  misc_feature (7)..(191): Homolog of NCBI NO: 13195452 NR Description: GTP-binding protein [Oryza sativa]
  misc_feature (1)..(211): Homolog of NCBI NO: 21536533 NR Description: Rab-type small GTP-binding protein-like
  misc_feature (7)..(189): Homolog of NCBI NO: 34909538 NR Description: putative GTP-binding protein [Oryza sativa
  misc_feature (1)..(190): Homolog of NCBI NO: 15234020 NR Description: Ras family GTP-binding protein [Arabidopsis

SEQ ID NO: 105423 - DNA, 1191 bp, Arabidopsis thaliana
  misc_feature (1)..(1191): Ceres Seq. ID no. 13617216
  misc_feature: MA Experiment ID: 108461 Result: Up-regulated in Transcription
  misc_feature: MA Experiment 108461 PARAMETER Experiment Name: At_Germinating_Seeds_cDNA_P Parameter: Age (day) Value: 1 vs. 0
  misc_feature: MA Experiment 108461 PARAMETER Experiment Name: At_Germinating_Seeds_cDNA_P Parameter: Tissue Value: Germinating Seeds
  misc_feature: MA Experiment ID: 108462 Result: Up-regulated in Transcription
  misc_feature: MA Experiment 108462 PARAMETER Experiment Name: At_Germinating_Seeds_cDNA_P Parameter: Age (day) Value: 2 vs. 0
  misc_feature: MA Experiment 108462 PARAMETER Experiment Name: At_Germinating_Seeds_cDNA_P Parameter: Tissue Value: Germinating Seeds
  misc_feature: MA Experiment ID: 108463 Result: Up-regulated in Transcription
  misc_feature: MA Experiment 108463 PARAMETER Experiment Name: At_Germinating_Seeds_cDNA_P Parameter: Age (day) Value: 3 vs. 0
  misc_feature: MA Experiment 108463 PARAMETER Experiment Name: At_Germinating_Seeds_cDNA_P Parameter: Tissue Value: Germinating Seeds
  misc_feature: MA Experiment ID: 108464 Result: Up-regulated in Transcription
  misc_feature: MA Experiment 108464 PARAMETER Experiment Name: At_Germinating_Seeds_cDNA_P Parameter: Age (day) Value: 4 vs. 0
  misc_feature: MA Experiment 108464 PARAMETER Experiment Name: At_Germinating_Seeds_cDNA_P Parameter: Tissue Value: Germinating Seeds
  misc_feature: MA Experiment ID: 108569 Result: Up-regulated in Transcription
  misc_feature: MA Experiment 108569 PARAMETER Experiment Name: At_0.001%_MeJA__cDNA_P Parameter: Timepoint (hr) Value: 6
  misc_feature: MA Experiment 108569 PARAMETER Experiment Name: At_0.001%_MeJA__cDNA_P Parameter: Tissue Value: Aerial
  misc_feature: MA Experiment 108569 PARAMETER Experiment Name: At_0.001%_MeJA__cDNA_P Parameter: Treatment Value: 0.001% MeJA vs. No Treatment
  misc_feature: MA Experiment ID: 108594 Result: Down-regulated in Transcription
  misc_feature: MA Experiment 108594 PARAMETER Experiment Name: At_Ler-rhl_Root_cDNA_P Parameter: Plant Line Value: null
  misc_feature: MA Experiment ID: 108595 Result: Down-regulated in Transcription
  misc_feature: MA Experiment 108595 PARAMETER Experiment Name: At_Ler-pi_Ovule_cDNA_P Parameter: Plant Line Value: null
  misc_feature: MA Experiment ID: 108668 Result: Up-regulated in Transcription
  misc_feature: MA Experiment 108668 PARAMETER Experiment Name: At_2mM_SA_cDNA_P Parameter: Plant Line Value: WS
  misc_feature: MA Experiment 108668 PARAMETER Experiment Name: At_2mM_SA_cDNA_P Parameter: Timepoint (hr) Value: 6
  misc_feature: MA Experiment 108668 PARAMETER Experiment Name: At_2mM_SA_cDNA_P Parameter: Treatment Value: 2mM SA vs. No Treatment
  misc_feature: MA Experiment ID: 20000069 Result: Down-regulated in Transcription
  misc_feature: MA Experiment 20000069 PARAMETER Experiment Name: At_100uM_ABA_Mutants_cDNA_P Parameter: Plant Line Value: CS23
  misc_feature: MA Experiment 20000069 PARAMETER Experiment Name: At_100uM_ABA_Mutants_cDNA_P Parameter: Timepoint (hr) Value: 6
  misc_feature: MA Experiment 20000069 PARAMETER Experiment Name: At_100uM_ABA_Mutants_cDNA_P Parameter: Tissue Value: Aerial
  misc_feature: MA Experiment 20000069 PARAMETER Experiment Name: At_100uM_ABA_Mutants_cDNA_P Parameter: Treatment Value: 100uM ABA vs. No Treatment
  misc_feature: MA Experiment ID: 20000087 Result: Down-regulated in Transcription
  misc_feature: MA Experiment 20000087 PARAMETER Experiment Name: At_100uM_ABA_Mutants_cDNA_P Parameter: Plant Line Value: WS
  misc_feature: MA Experiment 20000087 PARAMETER Experiment Name: At_100uM_ABA_Mutants_cDNA_P Parameter: Timepoint (hr) Value: 6
  misc_feature: MA Experiment 20000087 PARAMETER Experiment Name: At_100uM_ABA_Mutants_cDNA_P Parameter: Tissue Value: Aerial
  misc_feature: MA Experiment 20000087 PARAMETER Experiment Name: At_100uM_ABA_Mutants_cDNA_P Parameter: Treatment Value: 100uM ABA vs. No Treatment
  misc_feature: MA Experiment ID: 20000180 Result: Up-regulated in Transcription
  misc_feature: MA Experiment 20000180 PARAMETER Experiment Name: At_Germinating_Seeds_P Parameter: Age (hr) Value: 24 vs. 0
  misc_feature: MA Experiment 20000180 PARAMETER Experiment Name: At_Germinating_Seeds_P Parameter: Tissue Value: Germinating Seeds
  misc_feature: MA Experiment ID: 20000182 Result: Up-regulated in Transcription
  misc_feature: MA Experiment 20000182 PARAMETER Experiment Name: At_2mM_SA_P Parameter: Age (day) Value: 14
  misc_feature: MA Experiment 20000182 PARAMETER Experiment Name: At_2mM_SA_P Parameter: Organism Value: A. thaliana
  misc_feature: MA Experiment 20000182 PARAMETER Experiment Name: At_2mM_SA_P Parameter: Plant Line Value: WS
  misc_feature: MA Experiment 20000182 PARAMETER Experiment Name: At_2mM_SA_P Parameter: Timepoint (hr) Value: 6
  misc_feature: MA Experiment 20000182 PARAMETER Experiment Name: At_2mM_SA_P Parameter: Tissue Value: Aerial
  misc_feature: MA Experiment 20000182 PARAMETER Experiment Name: At_2mM_SA_P Parameter: Treatment Value: 2mM SA vs. No Treatment
  misc_feature: MA Experiment ID: 20001248 Result: Down-regulated in Transcription
  misc_feature: MA Experiment 20001248 PARAMETER Experiment Name: At_Far-red-induction_P Parameter: Age (day) Value: 7
  misc_feature: MA Experiment 20001248 PARAMETER Experiment Name: At_Far-red-induction_P Parameter: Light Value: Far-red vs. White
  misc_feature: MA Experiment 20001248 PARAMETER Experiment Name: At_Far-red-induction_P Parameter: Organism Value: A. thaliana
  misc_feature: MA Experiment 20001248 PARAMETER Experiment Name: At_Far-red-induction_P Parameter: Plant Line Value: Columbia
  misc_feature: MA Experiment 20001248 PARAMETER Experiment Name: At_Far-red-induction_P Parameter: Timepoint (hr) Value: 4
  misc_feature: MA Experiment 20001248 PARAMETER Experiment Name: At_Far-red-induction_P Parameter: Tissue Value: Whole Plant
  misc_feature: MA Experiment ID: 20001905 Result: Up-regulated in Transcription
  misc_feature: MA Experiment 20001905 PARAMETER Experiment Name: At_Drought_Reproduction_P Parameter: Age (day) Value: 40
  misc_feature: MA Experiment 20001905 PARAMETER Experiment Name: At_Drought_Reproduction_P Parameter: Organism Value: A. thaliana
  misc_feature: MA Experiment 20001905 PARAMETER Experiment Name: At_Drought_Reproduction_P Parameter: Plant Line Value: WS
  misc_feature: MA Experiment 20001905 PARAMETER Experiment Name: At_Drought_Reproduction_P Parameter: Timepoint (day) Value: 10
  misc_feature: MA Experiment 20001905 PARAMETER Experiment Name: At_Drought_Reproduction_P Parameter: Tissue Value: Rosettes
  misc_feature: MA Experiment 20001905 PARAMETER Experiment Name: At_Drought_Reproduction_P Parameter: Treatment Value: Drought vs. No Drought
agaaaggataacgaatcgtttctcttcgatcgaaagaatatatatttggaagttttctctgcttttttgttttcgtttgatagaatgggaacagttctcgattcgcattttctggctctcactgctattgtcactgtgatttaccagttcatattcttcgtaatcacggctcttttcaaatttgatcaagtcactgactttgctggtagcacaaacttcgttatacttgctgtgttaacacttgttctcaaagcctcttggcattttcgacagatagtattgactttgctagttgtggtatggggtcttcgcttggggattttccttctaatgaggatcttgcaatggggggaagatcgtcgctttgatgaacagcgtggaaatatagtgagactaatcattttctggactcttcaggctgtgtgggtttggacggttagcttacctttaacacttgttaatgcaagtgatggtggtggatctcttaaacccgcagatgttatcggttggactatgtgggttttcggtttcttgattgaagctgcagctgatcaacagaagctatcattcaaaaactctcctgaaaacagaggaaaatggtgtgatgttggagtctggaagtattcaagacatccaaactacttcggtgagatgttactgtggtggggaatctttgtggctgcatcgcctgtgcttgaaggtgcagagtatcttgtcatattcggaccactctttctcactttgctacttctattcgtcagcggcataccattactcgaggcatcggctgacaaaaaacatggaaactcaggagcttacagatcctacaagaagacaacaagtcctctgattctgttcccaagaggagtgtatgggaacttaccaggatggttcaagacggtctttctcttcgagtttccattttacagccgaaatctccctcaagaggtggctgtttagtaactgcttattctgtttcagtttcatcttttatatcttactttagtgtttgatgagtttggcttctctttgttgtatgtgtgcaagaaagttagggtagactccaaaacagcaaagagaaagaagtaaaagatgactgatttgtgatactcatatttgagttattgttcttcacaacactctttgataaaatttgtgtaaaaaattgcccgtaagaaactgaatttgttt

SEQ ID NO: 105424 - protein, 319 aa, Arabidopsis thaliana
  peptide (1)..(319): Ceres Seq. ID no. 13617217
  misc_feature (29)..(319): Homolog of NCBI NO: 18410409 NR Description: expressed protein [Arabidopsis thaliana]
  misc_feature (29)..(319): Homolog of NCBI NO: 21537359 NR Description: unknown [Arabidopsis thaliana]
  misc_feature (29)..(317): Homolog of NCBI NO: 30698953 NR Description: expressed protein [Arabidopsis thaliana] At1g73650/F25P22_7 [Arabidopsis thaliana]
  misc_feature (29)..(316): Homolog of NCBI NO: 15221003 NR Description: hypothetical protein [Arabidopsis thaliana]
  misc_feature (29)..(280): Homolog of NCBI NO: 25402844 NR Description: protein T10O22.15 [imported] - Arabidopsis >gi|8671769|gb|AAF78375.1|AC069551_8 T10O22.15 [Arabidopsis
  misc_feature (281)..(316): Homolog of NCBI NO: 25402844 NR Description: protein T10O22.15 [imported] - Arabidopsis >gi|8671769|gb|AAF78375.1|AC069551_8 T10O22.15 [Arabidopsis
  misc_feature (29)..(315): Homolog of NCBI NO: 13937298 NR Description: unknown protein [Oryza sativa]
  misc_feature (110)..(280): Homolog of NCBI NO: 9719732 NR Description: T10F20.18 [Arabidopsis thaliana]
  misc_feature (29)..(92): Homolog of NCBI NO: 9719732 NR Description: T10F20.18 [Arabidopsis thaliana]
  misc_feature (281)..(316): Homolog of NCBI NO: 9719732 NR Description: T10F20.18 [Arabidopsis thaliana]
RKDNESFLFDRKNIYLEVFSAFLFSFDRMGTVLDSHFLALTAIVTVIYQFIFFVITALFKFDQVTDFAGSTNFVILAVLTLVLKASWHFRQIVLTLLVVVWGLRLGIFLLMRILQWGEDRRFDEQRGNIVRLIIFWTLQAVWVWTVSLPLTLVNASDGGGSLKPADVIGWTMWVFGFLIEAAADQQKLSFKNSPENRGKWCDVGVWKYSRHPNYFGEMLLWWGIFVAASPVLEGAEYLVIFGPLFLTLLLLFVSGIPLLEASADKKHGNSGAYRSYKKTTSPLILFPRGVYGNLPGWFKTVFLFEFPFYSRNLPQEVAV

SEQ ID NO: 105425 - protein, 291 aa, Arabidopsis thaliana
  peptide (1)..(291): Ceres Seq. ID no. 13617218
  misc_feature (1)..(291): Homolog of NCBI NO: 18410409 NR Description: expressed protein [Arabidopsis thaliana]
  misc_feature (1)..(291): Homolog of NCBI NO: 21537359 NR Description: unknown [Arabidopsis thaliana]
  misc_feature (1)..(289): Homolog of NCBI NO: 30698953 NR Description: expressed protein [Arabidopsis thaliana] At1g73650/F25P22_7 [Arabidopsis thaliana]
  misc_feature (1)..(288): Homolog of NCBI NO: 15221003 NR Description: hypothetical protein [Arabidopsis thaliana]
  misc_feature (1)..(252): Homolog of NCBI NO: 25402844 NR Description: protein T10O22.15 [imported] - Arabidopsis >gi|8671769|gb|AAF78375.1|AC069551_8 T10O22.15 [Arabidopsis
  misc_feature (253)..(288): Homolog of NCBI NO: 25402844 NR Description: protein T10O22.15 [imported] - Arabidopsis >gi|8671769|gb|AAF78375.1|AC069551_8 T10O22.15 [Arabidopsis
  misc_feature (1)..(287): Homolog of NCBI NO: 13937298 NR Description: unknown protein [Oryza sativa]
  misc_feature (82)..(252): Homolog of NCBI NO: 9719732 NR Description: T10F20.18 [Arabidopsis thaliana]
  misc_feature (1)..(64): Homolog of NCBI NO: 9719732 NR Description: T10F20.18 [Arabidopsis thaliana]
  misc_feature (253)..(288): Homolog of NCBI NO: 9719732 NR Description: T10F20.18 [Arabidopsis thaliana]
MGTVLDSHFLALTAIVTVIYQFIFFVITALFKFDQVTDFAGSTNFVILAVLTLVLKASWHFRQIVLTLLVVVWGLRLGIFLLMRILQWGEDRRFDEQRGNIVRLIIFWTLQAVWVWTVSLPLTLVNASDGGGSLKPADVIGWTMWVFGFLIEAAADQQKLSFKNSPENRGKWCDVGVWKYSRHPNYFGEMLLWWGIFVAASPVLEGAEYLVIFGPLFLTLLLLFVSGIPLLEASADKKHGNSGAYRSYKKTTSPLILFPRGVYGNLPGWFKTVFLFEFPFYSRNLPQEVAV

SEQ ID NO: 105426 - protein, 209 aa, Arabidopsis thaliana
  peptide (1)..(209): Ceres Seq. ID no. 13617219
  misc_feature (1)..(209): Homolog of NCBI NO: 18410409 NR Description: expressed protein [Arabidopsis thaliana]
  misc_feature (1)..(209): Homolog of NCBI NO: 21537359 NR Description: unknown [Arabidopsis thaliana]
  misc_feature (1)..(207): Homolog of NCBI NO: 30698953 NR Description: expressed protein [Arabidopsis thaliana] At1g73650/F25P22_7 [Arabidopsis thaliana]
  misc_feature (1)..(206): Homolog of NCBI NO: 15221003 NR Description: hypothetical protein [Arabidopsis thaliana]
  misc_feature (1)..(170): Homolog of NCBI NO: 25402844 NR Description: protein T10O22.15 [imported] - Arabidopsis >gi|8671769|gb|AAF78375.1|AC069551_8 T10O22.15 [Arabidopsis
  misc_feature (171)..(206): Homolog of NCBI NO: 25402844 NR Description: protein T10O22.15 [imported] - Arabidopsis >gi|8671769|gb|AAF78375.1|AC069551_8 T10O22.15 [Arabidopsis
  misc_feature (1)..(205): Homolog of NCBI NO: 13937298 NR Description: unknown protein [Oryza sativa]
  misc_feature (1)..(170): Homolog of NCBI NO: 9719732 NR Description: T10F20.18 [Arabidopsis thaliana]
  misc_feature (171)..(206): Homolog of NCBI NO: 9719732 NR Description: T10F20.18 [Arabidopsis thaliana]
  misc_feature (1)..(150): Homolog of NCBI NO: 25406281 NR Description: unknown protein F25P22.7 [imported] - Arabidopsis
MRILQWGEDRRFDEQRGNIVRLIIFWTLQAVWVWTVSLPLTLVNASDGGGSLKPADVIGWTMWVFGFLIEAAADQQKLSFKNSPENRGKWCDVGVWKYSRHPNYFGEMLLWWGIFVAASPVLEGAEYLVIFGPLFLTLLLLFVSGIPLLEASADKKHGNSGAYRSYKKTTSPLILFPRGVYGNLPGWFKTVFLFEFPFYSRNLPQEVAV

SEQ ID NO: 105427 - DNA, 1621 bp, Arabidopsis thaliana
  misc_feature (1)..(1621): Ceres Seq. ID no. 13617220
  misc_feature: MA Experiment ID: 108595 Result: Up-regulated in Transcription
  misc_feature: MA Experiment 108595 PARAMETER Experiment Name: At_Ler-pi_Ovule_cDNA_P Parameter: Plant Line Value: null
  misc_feature: MA Experiment ID: 20000070 Result: Up-regulated in Transcription
  misc_feature: MA Experiment 20000070 PARAMETER Experiment Name: At_100uM_ABA_Mutants_cDNA_P Parameter: Plant Line Value: CS24
  misc_feature: MA Experiment 20000070 PARAMETER Experiment Name: At_100uM_ABA_Mutants_cDNA_P Parameter: Timepoint (hr) Value: 6
  misc_feature: MA Experiment 20000070 PARAMETER Experiment Name: At_100uM_ABA_Mutants_cDNA_P Parameter: Tissue Value: Aerial
  misc_feature: MA Experiment 20000070 PARAMETER Experiment Name: At_100uM_ABA_Mutants_cDNA_P Parameter: Treatment Value: 100uM ABA vs. No Treatment
  misc_feature: MA Experiment ID: 20000072 Result: Up-regulated in Transcription
  misc_feature: MA Experiment 20000072 PARAMETER Experiment Name: At_100uM_ABA_Mutants_cDNA_P Parameter: Plant Line Value: CS8105
  misc_feature: MA Experiment 20000072 PARAMETER Experiment Name: At_100uM_ABA_Mutants_cDNA_P Parameter: Timepoint (hr) Value: 6
  misc_feature: MA Experiment 20000072 PARAMETER Experiment Name: At_100uM_ABA_Mutants_cDNA_P Parameter: Tissue Value: Aerial
  misc_feature: MA Experiment 20000072 PARAMETER Experiment Name: At_100uM_ABA_Mutants_cDNA_P Parameter: Treatment Value: 100uM ABA vs. No Treatment
gagaaacagagagaaaatggaagatggtgtgacgcctccgcttctgatcacagagaaagacacgacgatgattcgtgtgaaggaggaggtgaagaagcagctatggctttctgctccactcattggtgttagccttcttcaatactctctccaagtcatctccgtcatgttcgttggccatcttggctctcttcctctctctgccgcctctatcgccacctcctttgcctccgttaccggcttcaccttcctcttgggaacagcaagtgcattggagacactatgtggccaagcttacggagcaaaactatatggaaaattgggaattcaaatgcagagagcaatgtttgtacttcttatactctctgttcctctctcaatcatttgggctaacacagaacagattctcgtattggtccatcaagacaagtccattgcaagtgttgctggctcctacgctaaatacatgatcccgagcctcttcgcctacggactgcttcaatgtatcaacaggttcttgcaagcgcagaacaatgtgttccctgtctttgtctgctctggtatcactacatgtcttcatttgcttctctgttggttgtttgtgttgaagactggtttaggatacagaggagctgctcttgctatttcggtctcttactggttcaacgtcattctcctctcgtgttatgtcaagttttcgccttcttgctcgcatagttggaccgggttttcgaaagaggcttttcaagaactttatgatttctctaaaattgcttttccttcagcggtcatggtctgtttggagctttggtccttcgagcttctggttcttgcctcaggccttcttcctaacccggttttagaaacttcggtgctttcaatctgtctaaatacttccctaacaatctggcagatttcggttggtcttggtggcgctgcaagcataagggtctcaaacgagttaggagcagggaatccacaagtggcaaaactggctgtatatgtcattgtaggcatagcagtagccgagggaattgtggttgtaacagttttgttgtcgattcggaagatcttaggtcatgcttttagcagcgacccgaaaatcatcgcatatgccgcatcaatgataccgattgttgcatgtggaaacttccttgatggcttacaatgcgtactctcaggggttgctagaggatgtggatggcagaaaattggagcatgtgtgaatcttggatcatattatcttgttggagttccattaggattgttacttggtttccatttccacattggtggtcgggggctttggctgggaatcgtaacagcattgtctgttcaagtgttgtgtctttccttagtcactatattcacaaactgggataaagaggcaaagaaagctacgaacagagtcggatcttcagatgacaaagatggtgacgtccaatgatcaataaacgtctgaggaaaaagcagttgcaaatgagcttaatgagtgctttattcttgtatgcccatatgaacttattgggaatttctaattgatgtggccgtacattggtctttagaaaactttaccattgttacatagttattgaaattccttggatgtgtttccattctc

SEQ ID NO: 105428 - protein, 481 aa, Arabidopsis thaliana
  peptide (1)..(481): Ceres Seq. ID no. 13617221
  misc_feature (6)..(481): Homolog of NCBI NO: 15219524 NR Description: MATE efflux protein family [Arabidopsis thaliana]
  misc_feature (6)..(481): Homolog of NCBI NO: 21537267 NR Description: putative integral membrane protein [Arabidopsis
  misc_feature (2)..(477): Homolog of NCBI NO: 15237158 NR Description: MATE efflux protein - related [Arabidopsis >gi|10177411|dbj|BAB10542.1| gene_id:K24M7.20~pir||T02324~strong to unknown protein [Arabidopsis thaliana]
  misc_feature (3)..(464): Homolog of NCBI NO: 15226290 NR Description: MATE efflux protein family [Arabidopsis thaliana]
  misc_feature (21)..(473): Homolog of NCBI NO: 38346676 NR Description: OSJNBa0069D17.7 [Oryza sativa (japonica
  misc_feature (26)..(470): Homolog of NCBI NO: 22138480 NR Description: hypothetical protein [Oryza sativa (japonica
  misc_feature (28)..(480): Homolog of NCBI NO: 16797803 NR Description: hypothetical membrane protein-1 [Marchantia
  misc_feature (4)..(473): Homolog of NCBI NO: 37533146 NR Description: putative integral membrane protein [Oryza sativa
  misc_feature (29)..(473): Homolog of NCBI NO: 37533148 NR Description: putative transmembrane protein [Oryza sativa
  misc_feature (29)..(470): Homolog of NCBI NO: 15218070 NR Description: MATE efflux protein family [Arabidopsis thaliana] unknown protein [Arabidopsis thaliana]
RNREKMEDGVTPPLLITEKDTTMIRVKEEVKKQLWLSAPLIGVSLLQYSLQVISVMFVGHLGSLPLSAASIATSFASVTGFTFLLGTASALETLCGQAYGAKLYGKLGIQMQRAMFVLLILSVPLSIIWANTEQILVLVHQDKSIASVAGSYAKYMIPSLFAYGLLQCINRFLQAQNNVFPVFVCSGITTCLHLLLCWLFVLKTGLGYRGAALAISVSYWFNVILLSCYVKFSPSCSHSWTGFSKEAFQELYDFSKIAFPSAVMVCLELWSFELLVLASGLLPNPVLETSVLSICLNTSLTIWQISVGLGGAASIRVSNELGAGNPQVAKLAVYVIVGIAVAEGIVVVTVLLSIRKILGHAFSSDPKIIAYAASMIPIVACGNFLDGLQCVLSGVARGCGWQKIGACVNLGSYYLVGVPLGLLLGFHFHIGGRGLWLGIVTALSVQVLCLSLVTIFTNWDKEAKKATNRVGSSDDKDGDVQ

SEQ ID NO: 105429 - protein, 476 aa, Arabidopsis thaliana
  peptide (1)..(476): Ceres Seq. ID no. 13617222
  misc_feature (1)..(476): Homolog of NCBI NO: 15219524 NR Description: MATE efflux protein family [Arabidopsis thaliana]
  misc_feature (1)..(476): Homolog of NCBI NO: 21537267 NR Description: putative integral membrane protein [Arabidopsis
  misc_feature (1)..(472): Homolog of NCBI NO: 15237158 NR Description: MATE efflux protein - related [Arabidopsis >gi|10177411|dbj|BAB10542.1| gene_id:K24M7.20~pir||T02324~strong to unknown protein [Arabidopsis thaliana]
  misc_feature (1)..(459): Homolog of NCBI NO: 15226290 NR Description: MATE efflux protein family [Arabidopsis thaliana]
  misc_feature (16)..(468): Homolog of NCBI NO: 38346676 NR Description: OSJNBa0069D17.7 [Oryza sativa (japonica
  misc_feature (21)..(465): Homolog of NCBI NO: 22138480 NR Description: hypothetical protein [Oryza sativa (japonica
  misc_feature (23)..(475): Homolog of NCBI NO: 16797803 NR Description: hypothetical membrane protein-1 [Marchantia
  misc_feature (1)..(468): Homolog of NCBI NO: 37533146 NR Description: putative integral membrane protein [Oryza sativa
  misc_feature (24)..(468): Homolog of NCBI NO: 37533148 NR Description: putative transmembrane protein [Oryza sativa
  misc_feature (24)..(465): Homolog of NCBI NO: 15218070 NR Description: MATE efflux protein family [Arabidopsis thaliana] unknown protein [Arabidopsis thaliana]
MEDGVTPPLLITEKDTTMIRVKEEVKKQLWLSAPLIGVSLLQYSLQVISVMFVGHLGSLPLSAASIATSFASVTGFTFLLGTASALETLCGQAYGAKLYGKLGIQMQRAMFVLLILSVPLSIIWANTEQILVLVHQDKSIASVAGSYAKYMIPSLFAYGLLQCINRFLQAQNNVFPVFVCSGITTCLHLLLCWLFVLKTGLGYRGAALAISVSYWFNVILLSCYVKFSPSCSHSWTGFSKEAFQELYDFSKIAFPSAVMVCLELWSFELLVLASGLLPNPVLETSVLSICLNTSLTIWQISVGLGGAASIRVSNELGAGNPQVAKLAVYVIVGIAVAEGIVVVTVLLSIRKILGHAFSSDPKIIAYAASMIPIVACGNFLDGLQCVLSGVARGCGWQKIGACVNLGSYYLVGVPLGLLLGFHFHIGGRGLWLGIVTALSVQVLCLSLVTIFTNWDKEAKKATNRVGSSDDKDGDVQ

SEQ ID NO: 105430 - protein, 459 aa, Arabidopsis thaliana
  peptide (1)..(459): Ceres Seq. ID no. 13617223
  misc_feature (1)..(459): Homolog of NCBI NO: 15219524 NR Description: MATE efflux protein family [Arabidopsis thaliana]
  misc_feature (1)..(459): Homolog of NCBI NO: 21537267 NR Description: putative integral membrane protein [Arabidopsis
  misc_feature (1)..(455): Homolog of NCBI NO: 15237158 NR Description: MATE efflux protein - related [Arabidopsis >gi|10177411|dbj|BAB10542.1| gene_id:K24M7.20~pir||T02324~strong to unknown protein [Arabidopsis thaliana]
  misc_feature (1)..(442): Homolog of NCBI NO: 15226290 NR Description: MATE efflux protein family [Arabidopsis thaliana]
  misc_feature (1)..(451): Homolog of NCBI NO: 38346676 NR Description: OSJNBa0069D17.7 [Oryza sativa (japonica
  misc_feature (4)..(448): Homolog of NCBI NO: 22138480 NR Description: hypothetical protein [Oryza sativa (japonica
  misc_feature (6)..(458): Homolog of NCBI NO: 16797803 NR Description: hypothetical membrane protein-1 [Marchantia
  misc_feature (1)..(451): Homolog of NCBI NO: 37533146 NR Description: putative integral membrane protein [Oryza sativa
  misc_feature (7)..(451): Homolog of NCBI NO: 37533148 NR Description: putative transmembrane protein [Oryza sativa
  misc_feature (7)..(448): Homolog of NCBI NO: 15218070 NR Description: MATE efflux protein family [Arabidopsis thaliana] unknown protein [Arabidopsis thaliana]
MIRVKEEVKKQLWLSAPLIGVSLLQYSLQVISVMFVGHLGSLPLSAASIATSFASVTGFTFLLGTASALETLCGQAYGAKLYGKLGIQMQRAMFVLLILSVPLSIIWANTEQILVLVHQDKSIASVAGSYAKYMIPSLFAYGLLQCINRFLQAQNNVFPVFVCSGITTCLHLLLCWLFVLKTGLGYRGAALAISVSYWFNVILLSCYVKFSPSCSHSWTGFSKEAFQELYDFSKIAFPSAVMVCLELWSFELLVLASGLLPNPVLETSVLSICLNTSLTIWQISVGLGGAASIRVSNELGAGNPQVAKLAVYVIVGIAVAEGIVVVTVLLSIRKILGHAFSSDPKIIAYAASMIPIVACGNFLDGLQCVLSGVARGCGWQKIGACVNLGSYYLVGVPLGLLLGFHFHIGGRGLWLGIVTALSVQVLCLSLVTIFTNWDKEAKKATNRVGSSDDKDGDVQ

SEQ ID NO: 105431 - DNA, 1369 bp, Arabidopsis thaliana
  misc_feature (1)..(1369): Ceres Seq. ID no. 13617232
  misc_feature: MA Experiment ID: 108462 Result: Down-regulated in Transcription
  misc_feature: MA Experiment 108462 PARAMETER Experiment Name: At_Germinating_Seeds_cDNA_P Parameter: Age (day) Value: 2 vs. 0
  misc_feature: MA Experiment 108462 PARAMETER Experiment Name: At_Germinating_Seeds_cDNA_P Parameter: Tissue Value: Germinating Seeds
  misc_feature: MA Experiment ID: 108463 Result: Down-regulated in Transcription
  misc_feature: MA Experiment 108463 PARAMETER Experiment Name: At_Germinating_Seeds_cDNA_P Parameter: Age (day) Value: 3 vs. 0
  misc_feature: MA Experiment 108463 PARAMETER Experiment Name: At_Germinating_Seeds_cDNA_P Parameter: Tissue Value: Germinating Seeds
  misc_feature: MA Experiment ID: 108464 Result: Down-regulated in Transcription
  misc_feature: MA Experiment 108464 PARAMETER Experiment Name: At_Germinating_Seeds_cDNA_P Parameter: Age (day) Value: 4 vs. 0
  misc_feature: MA Experiment 108464 PARAMETER Experiment Name: At_Germinating_Seeds_cDNA_P Parameter: Tissue Value: Germinating Seeds
  misc_feature: MA Experiment ID: 108488 Result: Up-regulated in Transcription
  misc_feature: MA Experiment ID: 108489 Result: Up-regulated in Transcription
  misc_feature: MA Experiment ID: 108561 Result: Down-regulated in Transcription
  misc_feature: MA Experiment 108561 PARAMETER Experiment Name: At_100uM_ABA_cDNA_P Parameter: Timepoint (hr) Value: 6
  misc_feature: MA Experiment 108561 PARAMETER Experiment Name: At_100uM_ABA_cDNA_P Parameter: Tissue Value: Aerial
  misc_feature: MA Experiment 108561 PARAMETER Experiment Name: At_100uM_ABA_cDNA_P Parameter: Treatment Value: 100uM ABA vs. No Treatment
  misc_feature: MA Experiment ID: 108569 Result: Up-regulated in Transcription
  misc_feature: MA Experiment 108569 PARAMETER Experiment Name: At_0.001%_MeJA__cDNA_P Parameter: Timepoint (hr) Value: 6
  misc_feature: MA Experiment 108569 PARAMETER Experiment Name: At_0.001%_MeJA__cDNA_P Parameter: Tissue Value: Aerial
  misc_feature: MA Experiment 108569 PARAMETER Experiment Name: At_0.001%_MeJA__cDNA_P Parameter: Treatment Value: 0.001% MeJA vs. No Treatment
  misc_feature: MA Experiment ID: 108573 Result: Up-regulated in Transcription
  misc_feature: MA Experiment 108573 PARAMETER Experiment Name: At_Drought_cDNA_P Parameter: Timepoint (hr) Value: 6
  misc_feature: MA Experiment 108573 PARAMETER Experiment Name: At_Drought_cDNA_P Parameter: Tissue Value: Aerial
  misc_feature: MA Experiment 108573 PARAMETER Experiment Name: At_Drought_cDNA_P Parameter: Treatment Value: Drought vs. No Drought
  misc_feature: MA Experiment ID: 108576 Result: Down-regulated in Transcription
  misc_feature: MA Experiment 108576 PARAMETER Experiment Name: At_42deg_Heat_cDNA_P Parameter: Temperature (deg C) Value: 42 vs. 22
  misc_feature: MA Experiment 108576 PARAMETER Experiment Name: At_42deg_Heat_cDNA_P Parameter: Timepoint (hr) Value: 1
  misc_feature: MA Experiment 108576 PARAMETER Experiment Name: At_42deg_Heat_cDNA_P Parameter: Tissue Value: Aerial
  misc_feature: MA Experiment ID: 108577 Result: Down-regulated in Transcription
  misc_feature: MA Experiment 108577 PARAMETER Experiment Name: At_42deg_Heat_cDNA_P Parameter: Temperature (deg C) Value: 42 vs. 22
  misc_feature: MA Experiment 108577 PARAMETER Experiment Name: At_42deg_Heat_cDNA_P Parameter: Timepoint (hr) Value: 6
  misc_feature: MA Experiment 108577 PARAMETER Experiment Name: At_42deg_Heat_cDNA_P Parameter: Tissue Value: Aerial
  misc_feature: MA Experiment ID: 108579 Result: Down-regulated in Transcription
  misc_feature: MA Experiment 108579 PARAMETER Experiment Name: At_4deg_Cold_cDNA_P Parameter: Temperature (deg C) Value: 4 vs. 22
  misc_feature: MA Experiment 108579 PARAMETER Experiment Name: At_4deg_Cold_cDNA_P Parameter: Timepoint (hr) Value: 6
  misc_feature: MA Experiment 108579 PARAMETER Experiment Name: At_4deg_Cold_cDNA_P Parameter: Tissue Value: Aerial
  misc_feature: MA Experiment ID: 108585 Result: Down-regulated in Transcription
  misc_feature: MA Experiment 108585 PARAMETER Experiment Name: At_5mM_NaNP_cDNA_P Parameter: Timepoint (hr) Value: 6
  misc_feature: MA Experiment 108585 PARAMETER Experiment Name: At_5mM_NaNP_cDNA_P Parameter: Tissue Value: Aerial
  misc_feature: MA Experiment 108585 PARAMETER Experiment Name: At_5mM_NaNP_cDNA_P Parameter: Treatment Value: null
  misc_feature: MA Experiment ID: 108594 Result: Down-regulated in Transcription
  misc_feature: MA Experiment 108594 PARAMETER Experiment Name: At_Ler-rhl_Root_cDNA_P Parameter: Plant Line Value: null
  misc_feature: MA Experiment ID: 108595 Result: Down-regulated in Transcription
  misc_feature: MA Experiment 108595 PARAMETER Experiment Name: At_Ler-pi_Ovule_cDNA_P Parameter: Plant Line Value: null
  misc_feature: MA Experiment ID: 108607 Result: Down-regulated in Transcription
  misc_feature: MA Experiment 108607 PARAMETER Experiment Name: At_100uM_ABA_cDNA_P Parameter: Timepoint (hr) Value: 4
  misc_feature: MA Experiment 108607 PARAMETER Experiment Name: At_100uM_ABA_cDNA_P Parameter: Tissue Value: Aerial
  misc_feature: MA Experiment 108607 PARAMETER Experiment Name: At_100uM_ABA_cDNA_P Parameter: Treatment Value: 100uM ABA vs. No Treatment
  misc_feature: MA Experiment ID: 108608 Result: Down-regulated in Transcription
  misc_feature: MA Experiment 108608 PARAMETER Experiment Name: At_100uM_ABA_cDNA_P Parameter: Timepoint (hr) Value: 1
  misc_feature: MA Experiment 108608 PARAMETER Experiment Name: At_100uM_ABA_cDNA_P Parameter: Tissue Value: Aerial
  misc_feature: MA Experiment 108608 PARAMETER Experiment Name: At_100uM_ABA_cDNA_P Parameter: Treatment Value: 100uM ABA vs. No Treatment
  misc_feature: MA Experiment ID: 108609 Result: Down-regulated in Transcription
  misc_feature: MA Experiment 108609 PARAMETER Experiment Name: At_100uM_ABA_cDNA_P Parameter: Timepoint (hr) Value: 24
  misc_feature: MA Experiment 108609 PARAMETER Experiment Name: At_100uM_ABA_cDNA_P Parameter: Tissue Value: Aerial
  misc_feature: MA Experiment 108609 PARAMETER Experiment Name: At_100uM_ABA_cDNA_P Parameter: Treatment Value: 100uM ABA vs. No Treatment
  misc_feature: MA Experiment ID: 20000069 Result: Down-regulated in Transcription
  misc_feature: MA Experiment 20000069 PARAMETER Experiment Name: At_100uM_ABA_Mutants_cDNA_P Parameter: Plant Line Value: CS23
  misc_feature: MA Experiment 20000069 PARAMETER Experiment Name: At_100uM_ABA_Mutants_cDNA_P Parameter: Timepoint (hr) Value: 6
  misc_feature: MA Experiment 20000069 PARAMETER Experiment Name: At_100uM_ABA_Mutants_cDNA_P Parameter: Tissue Value: Aerial
  misc_feature: MA Experiment 20000069 PARAMETER Experiment Name: At_100uM_ABA_Mutants_cDNA_P Parameter: Treatment Value: 100uM ABA vs. No Treatment
  misc_feature: MA Experiment ID: 20000070 Result: Down-regulated in Transcription
  misc_feature: MA Experiment 20000070 PARAMETER Experiment Name: At_100uM_ABA_Mutants_cDNA_P Parameter: Plant Line Value: CS24
  misc_feature: MA Experiment 20000070 PARAMETER Experiment Name: At_100uM_ABA_Mutants_cDNA_P Parameter: Timepoint (hr) Value: 6
  misc_feature: MA Experiment 20000070 PARAMETER Experiment Name: At_100uM_ABA_Mutants_cDNA_P Parameter: Tissue Value: Aerial
  misc_feature: MA Experiment 20000070 PARAMETER Experiment Name: At_100uM_ABA_Mutants_cDNA_P Parameter: Treatment Value: 100uM ABA vs. No Treatment
  misc_feature: MA Experiment ID: 20000071 Result: Down-regulated in Transcription
  misc_feature: MA Experiment 20000071 PARAMETER Experiment Name: At_100uM_ABA_Mutants_cDNA_P Parameter: Plant Line Value: CS8104
  misc_feature: MA Experiment 20000071 PARAMETER Experiment Name: At_100uM_ABA_Mutants_cDNA_P Parameter: Timepoint (hr) Value: 6
  misc_feature: MA Experiment 20000071 PARAMETER Experiment Name: At_100uM_ABA_Mutants_cDNA_P Parameter: Tissue Value: Aerial
  misc_feature: MA Experiment 20000071 PARAMETER Experiment Name: At_100uM_ABA_Mutants_cDNA_P Parameter: Treatment Value: 100uM ABA vs. No Treatment
  misc_feature: MA Experiment ID: 20000072 Result: Down-regulated in Transcription
  misc_feature: MA Experiment 20000072 PARAMETER Experiment Name: At_100uM_ABA_Mutants_cDNA_P Parameter: Plant Line Value: CS8105
  misc_feature: MA Experiment 20000072 PARAMETER Experiment Name: At_100uM_ABA_Mutants_cDNA_P Parameter: Timepoint (hr) Value: 6
  misc_feature: MA Experiment 20000072 PARAMETER Experiment Name: At_100uM_ABA_Mutants_cDNA_P Parameter: Tissue Value: Aerial
  misc_feature: MA Experiment 20000072 PARAMETER Experiment Name: At_100uM_ABA_Mutants_cDNA_P Parameter: Treatment Value: 100uM ABA vs. No Treatment
  misc_feature: MA Experiment ID: 20000086 Result: Down-regulated in Transcription
  misc_feature: MA Experiment 20000086 PARAMETER Experiment Name: At_100uM_ABA_Mutants_cDNA_P Parameter: Plant Line Value: CS22
  misc_feature: MA Experiment 20000086 PARAMETER Experiment Name: At_100uM_ABA_Mutants_cDNA_P Parameter: Timepoint (hr) Value: 6
  misc_feature: MA Experiment 20000086 PARAMETER Experiment Name: At_100uM_ABA_Mutants_cDNA_P Parameter: Tissue Value: Aerial
  misc_feature: MA Experiment 20000086 PARAMETER Experiment Name: At_100uM_ABA_Mutants_cDNA_P Parameter: Treatment Value: 100uM ABA vs. No Treatment
  misc_feature: MA Experiment ID: 20000087 Result: Down-regulated in Transcription
  misc_feature: MA Experiment 20000087 PARAMETER Experiment Name: At_100uM_ABA_Mutants_cDNA_P Parameter: Plant Line Value: WS
  misc_feature: MA Experiment 20000087 PARAMETER Experiment Name: At_100uM_ABA_Mutants_cDNA_P Parameter: Timepoint (hr) Value: 6
  misc_feature: MA Experiment 20000087 PARAMETER Experiment Name: At_100uM_ABA_Mutants_cDNA_P Parameter: Tissue Value: Aerial
  misc_feature: MA Experiment 20000087 PARAMETER Experiment Name: At_100uM_ABA_Mutants_cDNA_P Parameter: Treatment Value: 100uM ABA vs. No Treatment
  misc_feature: MA Experiment ID: 20000088 Result: Down-regulated in Transcription
  misc_feature: MA Experiment 20000088 PARAMETER Experiment Name: At_100uM_ABA_Mutants_cDNA_P Parameter: Plant Line Value: Landsberg
  misc_feature: MA Experiment 20000088 PARAMETER Experiment Name: At_100uM_ABA_Mutants_cDNA_P Parameter: Timepoint (hr) Value: 6
  misc_feature: MA Experiment 20000088 PARAMETER Experiment Name: At_100uM_ABA_Mutants_cDNA_P Parameter: Tissue Value: Aerial
  misc_feature: MA Experiment 20000088 PARAMETER Experiment Name: At_100uM_ABA_Mutants_cDNA_P Parameter: Treatment Value: 100uM ABA vs. No Treatment
  misc_feature: MA Experiment ID: 20000093 Result: Down-regulated in Transcription
  misc_feature: MA Experiment 20000093 PARAMETER Experiment Name: At_42deg_Heat_cDNA_P Parameter: Temperature (deg C) Value: 42 vs. 22
  misc_feature: MA Experiment 20000093 PARAMETER Experiment Name: At_42deg_Heat_cDNA_P Parameter: Timepoint (hr) Value: 0.5
  misc_feature: MA Experiment 20000093 PARAMETER Experiment Name: At_42deg_Heat_cDNA_P Parameter: Tissue Value: Aerial
  misc_feature: MA Experiment ID: 20000111 Result: Down-regulated in Transcription
  misc_feature: MA Experiment 20000111 PARAMETER Experiment Name: At_42deg_Heat_cDNA_P Parameter: Temperature (deg C) Value: 42 vs. 22
  misc_feature: MA Experiment 20000111 PARAMETER Experiment Name: At_42deg_Heat_cDNA_P Parameter: Timepoint (hr) Value: 6
  misc_feature: MA Experiment 20000111 PARAMETER Experiment Name: At_42deg_Heat_cDNA_P Parameter: Tissue Value: Aerial
  misc_feature: MA Experiment ID: 20000112 Result: Down-regulated in Transcription
  misc_feature: MA Experiment 20000112 PARAMETER Experiment Name: At_42deg_Heat_cDNA_P Parameter: Temperature (deg C) Value: 42 vs. 22
  misc_feature: MA Experiment 20000112 PARAMETER Experiment Name: At_42deg_Heat_cDNA_P Parameter: Timepoint (hr) Value: 2
  misc_feature: MA Experiment 20000112 PARAMETER Experiment Name: At_42deg_Heat_cDNA_P Parameter: Tissue Value: Aerial
  misc_feature: MA Experiment ID: 20000113 Result: Down-regulated in Transcription
  misc_feature: MA Experiment 20000113 PARAMETER Experiment Name: At_42deg_Heat_cDNA_P Parameter: Temperature (deg C) Value: 42 vs. 22
  misc_feature: MA Experiment 20000113 PARAMETER Experiment Name: At_42deg_Heat_cDNA_P Parameter: Timepoint (hr) Value: 8
  misc_feature: MA Experiment 20000113 PARAMETER Experiment Name: At_42deg_Heat_cDNA_P Parameter: Tissue Value: Aerial
  misc_feature: MA Experiment ID: 20000117 Result: Down-regulated in Transcription
  misc_feature: MA Experiment 20000117 PARAMETER Experiment Name: At_100uM_ABA_Mutants_cDNA_P Parameter: Plant Line Value: Columbia
  misc_feature: MA Experiment 20000117 PARAMETER Experiment Name: At_100uM_ABA_Mutants_cDNA_P Parameter: Timepoint (hr) Value: 6
  misc_feature: MA Experiment 20000117 PARAMETER Experiment Name: At_100uM_ABA_Mutants_cDNA_P Parameter: Tissue Value: Aerial
  misc_feature: MA Experiment 20000117 PARAMETER Experiment Name: At_100uM_ABA_Mutants_cDNA_P Parameter: Treatment Value: 100uM ABA vs. No Treatment
  misc_feature: MA Experiment ID: 20000144 Result: Down-regulated in Transcription
  misc_feature: MA Experiment 20000144 PARAMETER Experiment Name: At_42deg_Heat_cDNA_P Parameter: Temperature (deg C) Value: 42 vs. 22
  misc_feature: MA Experiment 20000144 PARAMETER Experiment Name: At_42deg_Heat_cDNA_P Parameter: Timepoint (hr) Value: 1
  misc_feature: MA Experiment 20000144 PARAMETER Experiment Name: At_42deg_Heat_cDNA_P Parameter: Tissue Value: Aerial
  misc_feature: MA Experiment ID: 20000166 Result: Down-regulated in Transcription
  misc_feature: MA Experiment 20000166 PARAMETER Experiment Name: At_100uM_ABA_P Parameter: Age (day) Value: 14
  misc_feature: MA Experiment 20000166 PARAMETER Experiment Name: At_100uM_ABA_P Parameter: Organism Value: A. thaliana
  misc_feature: MA Experiment 20000166 PARAMETER Experiment Name: At_100uM_ABA_P Parameter: Plant Line Value: WS
  misc_feature: MA Experiment 20000166 PARAMETER Experiment Name: At_100uM_ABA_P Parameter: Timepoint (hr) Value: 1
  misc_feature: MA Experiment 20000166 PARAMETER Experiment Name: At_100uM_ABA_P Parameter: Tissue Value: Aerial
  misc_feature: MA Experiment 20000166 PARAMETER Experiment Name: At_100uM_ABA_P Parameter: Treatment Value: 100uM ABA vs. No Treatment
  misc_feature: MA Experiment ID: 20000171 Result: Down-regulated in Transcription
  misc_feature: MA Experiment 20000171 PARAMETER Experiment Name: At_42deg_Heat_P Parameter: Age (day) Value: 14
  misc_feature: MA Experiment 20000171 PARAMETER Experiment Name: At_42deg_Heat_P Parameter: Organism Value: A. thaliana
  misc_feature: MA Experiment 20000171 PARAMETER Experiment Name: At_42deg_Heat_P Parameter: Plant Line Value: WS
  misc_feature: MA Experiment 20000171 PARAMETER Experiment Name: At_42deg_Heat_P Parameter: Temperature (deg C) Value: 42 vs. 22
  misc_feature: MA Experiment 20000171 PARAMETER Experiment Name: At_42deg_Heat_P Parameter: Timepoint (hr) Value: 1
  misc_feature: MA Experiment 20000171 PARAMETER Experiment Name: At_42deg_Heat_P Parameter: Tissue Value: Aerial
  misc_feature: MA Experiment ID: 20000173 Result: Down-regulated in Transcription
  misc_feature: MA Experiment 20000173 PARAMETER Experiment Name: At_42deg_Heat_P Parameter: Age (day) Value: 14
  misc_feature: MA Experiment 20000173 PARAMETER Experiment Name: At_42deg_Heat_P Parameter: Organism Value: A. thaliana
  misc_feature: MA Experiment 20000173 PARAMETER Experiment Name: At_42deg_Heat_P Parameter: Plant Line Value: WS
  misc_feature: MA Experiment 20000173 PARAMETER Experiment Name: At_42deg_Heat_P Parameter: Temperature (deg C) Value: 42 vs. 22
  misc_feature: MA Experiment 20000173 PARAMETER Experiment Name: At_42deg_Heat_P Parameter: Timepoint (hr) Value: 6
  misc_feature: MA Experiment 20000173 PARAMETER Experiment Name: At_42deg_Heat_P Parameter: Tissue Value: Aerial
  misc_feature: MA Experiment ID: 20000180 Result: Down-regulated in Transcription
  misc_feature: MA Experiment 20000180 PARAMETER Experiment Name: At_Germinating_Seeds_P Parameter: Age (hr) Value: 24 vs. 0
  misc_feature: MA Experiment 20000180 PARAMETER Experiment Name: At_Germinating_Seeds_P Parameter: Tissue Value: Germinating Seeds
  misc_feature: MA Experiment ID: 20000184 Result: Up-regulated in Transcription
  misc_feature: MA Experiment 20000184 PARAMETER Experiment Name: At_Shoots__P Parameter: Age (day) Value: 7
  misc_feature: MA Experiment 20000184 PARAMETER Experiment Name: At_Shoots__P Parameter: Tissue Value: Shoots vs. Whole Plant
  misc_feature: MA Experiment ID: 20000185 Result: Down-regulated in Transcription
  misc_feature: MA Experiment 20000185 PARAMETER Experiment Name: At_Roots__P Parameter: Age (day) Value: 7 vs. 21
  misc_feature: MA Experiment 20000185 PARAMETER Experiment Name: At_Roots__P Parameter: Organism Value: A. thaliana
  misc_feature: MA Experiment 20000185 PARAMETER Experiment Name: At_Roots__P Parameter: Tissue Value: Roots vs. Whole Plant
  misc_feature: MA Experiment ID: 20000214 Result: Up-regulated in Transcription
  misc_feature: MA Experiment 20000214 PARAMETER Experiment Name: At_4deg_Cold_P Parameter: Timepoint (hr) Value: 6
  misc_feature: MA Experiment ID: 20000234 Result: Down-regulated in Transcription
  misc_feature: MA Experiment 20000234 PARAMETER Experiment Name: At_Siliques_P Parameter: Age (day) Value: 21
  misc_feature: MA Experiment 20000234 PARAMETER Experiment Name: At_Siliques_P Parameter: Organism Value: A. thaliana
  misc_feature: MA Experiment 20000234 PARAMETER Experiment Name: At_Siliques_P Parameter: Plant Line Value: WS
  misc_feature: MA Experiment 20000234 PARAMETER Experiment Name: At_Siliques_P Parameter: Tissue Value: Less Than 5mm Siliques vs. Whole Plant
  misc_feature: MA Experiment ID: 20000264 Result: Down-regulated in Transcription
  misc_feature: MA Experiment 20000264 PARAMETER Experiment Name: At_Open_Flower_P Parameter: Age (day) Value: 21
  misc_feature: MA Experiment 20000264 PARAMETER Experiment Name: At_Open_Flower_P Parameter: Plant Line Value: WS
  misc_feature: MA Experiment 20000264 PARAMETER Experiment Name: At_Open_Flower_P Parameter: Tissue Value: Open Flower vs. Whole Plant
  misc_feature: MA Experiment ID: 20000267 Result: Down-regulated in Transcription
  misc_feature: MA Experiment 20000267 PARAMETER Experiment Name: At_Drought_P Parameter: Age (day) Value: 7
  misc_feature: MA Experiment 20000267 PARAMETER Experiment Name: At_Drought_P Parameter: Organism Value: A. thaliana
  misc_feature: MA Experiment 20000267 PARAMETER Experiment Name: At_Drought_P Parameter: Plant Line Value: WS
  misc_feature: MA Experiment 20000267 PARAMETER Experiment Name: At_Drought_P Parameter: Timepoint (hr) Value: 6
  misc_feature: MA Experiment 20000267 PARAMETER Experiment Name: At_Drought_P Parameter: Tissue Value: Whole Plant
  misc_feature: MA Experiment 20000267 PARAMETER Experiment Name: At_Drought_P Parameter: Treatment Value: Drought vs. No Drought
  misc_feature: MA Experiment ID: 20000288 Result: Down-regulated in Transcription
  misc_feature: MA Experiment 20000288 PARAMETER Experiment Name: At_Drought_P Parameter: Age (day) Value: 7
  misc_feature: MA Experiment 20000288 PARAMETER Experiment Name: At_Drought_P Parameter: Organism Value: A. thaliana
  misc_feature: MA Experiment 20000288 PARAMETER Experiment Name: At_Drought_P Parameter: Plant Line Value: WS
  misc_feature: MA Experiment 20000288 PARAMETER Experiment Name: At_Drought_P Parameter: Timepoint (hr) Value: 1
  misc_feature: MA Experiment 20000288 PARAMETER Experiment Name: At_Drought_P Parameter: Tissue Value: Whole Plant
  misc_feature: MA Experiment 20000288 PARAMETER Experiment Name: At_Drought_P Parameter: Treatment Value: Drought vs. No Drought
  misc_feature: MA Experiment ID: 20000436 Result: Down-regulated in Transcription
  misc_feature: MA Experiment 20000436 PARAMETER Experiment Name: At_Drought_P Parameter: Age (day) Value: 7
  misc_feature: MA Experiment 20000436 PARAMETER Experiment Name: At_Drought_P Parameter: Organism Value: A. thaliana
  misc_feature: MA Experiment 20000436 PARAMETER Experiment Name: At_Drought_P Parameter: Plant Line Value: WS
  misc_feature: MA Experiment 20000436 PARAMETER Experiment Name: At_Drought_P Parameter: Timepoint (hr) Value: 12
  misc_feature: MA Experiment 20000436 PARAMETER Experiment Name: At_Drought_P Parameter: Tissue Value: Whole Plant
  misc_feature: MA Experiment 20000436 PARAMETER Experiment Name: At_Drought_P Parameter: Treatment Value: Drought vs. No Drought
  misc_feature: MA Experiment ID: 20000437 Result: Down-regulated in Transcription
  misc_feature: MA Experiment 20000437 PARAMETER Experiment Name: At_Drought_P Parameter: Age (day) Value: 8
  misc_feature: MA Experiment 20000437 PARAMETER Experiment Name: At_Drought_P Parameter: Organism Value: A. thaliana
  misc_feature: MA Experiment 20000437 PARAMETER Experiment Name: At_Drought_P Parameter: Plant Line Value: WS
  misc_feature: MA Experiment 20000437 PARAMETER Experiment Name: At_Drought_P Parameter: Timepoint (hr) Value: 24
  misc_feature: MA Experiment 20000437 PARAMETER Experiment Name: At_Drought_P Parameter: Tissue Value: Whole Plant
  misc_feature: MA Experiment 20000437 PARAMETER Experiment Name: At_Drought_P Parameter: Treatment Value: Drought vs. No Drought
  misc_feature: MA Experiment ID: 20000438 Result: Up-regulated in Transcription
  misc_feature: MA Experiment 20000438 PARAMETER Experiment Name: At_Shoots__P Parameter: Age (day) Value: 14
  misc_feature: MA Experiment 20000438 PARAMETER Experiment Name: At_Shoots__P Parameter: Tissue Value: Shoots vs. Whole Plant
  misc_feature: MA Experiment ID: 20000439 Result: Down-regulated in Transcription
  misc_feature: MA Experiment 20000439 PARAMETER Experiment Name: At_Roots__P Parameter: Age (day) Value: 14 vs. 21
  misc_feature: MA Experiment 20000439 PARAMETER Experiment Name: At_Roots__P Parameter: Organism Value: A. thaliana
  misc_feature: MA Experiment 20000439 PARAMETER Experiment Name: At_Roots__P Parameter: Tissue Value: Roots vs. Whole Plant
  misc_feature: MA Experiment ID: 20000451 Result: Up-regulated in Transcription
  misc_feature: MA Experiment 20000451 PARAMETER Experiment Name: At_CS6879_Shoots-Roots_P Parameter: Age (day) Value: 14
  misc_feature: MA Experiment 20000451 PARAMETER Experiment Name: At_CS6879_Shoots-Roots_P Parameter: Organism Value: A. thaliana
  misc_feature: MA Experiment 20000451 PARAMETER Experiment Name: At_CS6879_Shoots-Roots_P Parameter: Plant Line Value: CS6879 vs. WS
  misc_feature: MA Experiment 20000451 PARAMETER Experiment Name: At_CS6879_Shoots-Roots_P Parameter: Tissue Value: Roots
  misc_feature: MA Experiment ID: 20000453 Result: Down-regulated in Transcription
  misc_feature: MA Experiment 20000453 PARAMETER Experiment Name: At_100uM_ABA_P Parameter: Age (day) Value: 15
  misc_feature: MA Experiment 20000453 PARAMETER Experiment Name: At_100uM_ABA_P Parameter: Organism Value: A. thaliana
  misc_feature: MA Experiment 20000453 PARAMETER Experiment Name: At_100uM_ABA_P Parameter: Plant Line Value: WS
  misc_feature: MA Experiment 20000453 PARAMETER Experiment Name: At_100uM_ABA_P Parameter: Timepoint (hr) Value: 24
  misc_feature: MA Experiment 20000453 PARAMETER Experiment Name: At_100uM_ABA_P Parameter: Tissue Value: Aerial
  misc_feature: MA Experiment 20000453 PARAMETER Experiment Name: At_100uM_ABA_P Parameter: Treatment Value: 100uM ABA vs. No Treatment
  misc_feature: MA Experiment ID: 20000455 Result: Down-regulated in Transcription
  misc_feature: MA Experiment 20000455 PARAMETER Experiment Name: At_100uM_ABA_P Parameter: Age (day) Value: 16
  misc_feature: MA Experiment 20000455 PARAMETER Experiment Name: At_100uM_ABA_P Parameter: Organism Value: A. thaliana
  misc_feature: MA Experiment 20000455 PARAMETER Experiment Name: At_100uM_ABA_P Parameter: Plant Line Value: WS
  misc_feature: MA Experiment 20000455 PARAMETER Experiment Name: At_100uM_ABA_P Parameter: Timepoint (hr) Value: 48
  misc_feature: MA Experiment 20000455 PARAMETER Experiment Name: At_100uM_ABA_P Parameter: Tissue Value: Aerial
  misc_feature: MA Experiment 20000455 PARAMETER Experiment Name: At_100uM_ABA_P Parameter: Treatment Value: 100uM ABA vs. No Treatment
  misc_feature: MA Experiment ID: 20000456 Result: Up-regulated in Transcription
  misc_feature: MA Experiment 20000456 PARAMETER Experiment Name: At_100uM_BA_P Parameter: Age (day) Value: 14
  misc_feature: MA Experiment 20000456 PARAMETER Experiment Name: At_100uM_BA_P Parameter: Organism Value: A. thaliana
  misc_feature: MA Experiment 20000456 PARAMETER Experiment Name: At_100uM_BA_P Parameter: Plant Line Value: WS
  misc_feature: MA Experiment 20000456 PARAMETER Experiment Name: At_100uM_BA_P Parameter: Timepoint (hr) Value: 6
  misc_feature: MA Experiment 20000456 PARAMETER Experiment Name: At_100uM_BA_P Parameter: Tissue Value: Aerial
  misc_feature: MA Experiment 20000456 PARAMETER Experiment Name: At_100uM_BA_P Parameter: Treatment Value: 100uM BA vs. No Treatment
  misc_feature: MA Experiment ID: 20000573 Result: Down-regulated in Transcription
  misc_feature: MA Experiment 20000573 PARAMETER Experiment Name: At_100uM_ABA_Mutants__P Parameter: Organism Value: A. thaliana
  misc_feature: MA Experiment 20000573 PARAMETER Experiment Name: At_100uM_ABA_Mutants__P Parameter: Plant Line Value: CS22 vs. Ler wt
  misc_feature: MA Experiment 20000573 PARAMETER Experiment Name: At_100uM_ABA_Mutants__P Parameter: Timepoint (hr) Value: N/A
  misc_feature: MA Experiment 20000573 PARAMETER Experiment Name: At_100uM_ABA_Mutants__P Parameter: Tissue Value: Whole Plant
  misc_feature: MA Experiment 20000573 PARAMETER Experiment Name: At_100uM_ABA_Mutants__P Parameter: Treatment Value: None
  misc_feature: MA Experiment ID: 20000574 Result: Down-regulated in Transcription
  misc_feature: MA Experiment 20000574 PARAMETER Experiment Name: At_100uM_ABA_Mutants__P Parameter: Organism Value: A. thaliana
  misc_feature: MA Experiment 20000574 PARAMETER Experiment Name: At_100uM_ABA_Mutants__P Parameter: Plant Line Value: CS23 vs. Ler wt
  misc_feature: MA Experiment 20000574 PARAMETER Experiment Name: At_100uM_ABA_Mutants__P Parameter: Timepoint (hr) Value: N/A
  misc_feature: MA Experiment 20000574 PARAMETER Experiment Name: At_100uM_ABA_Mutants__P Parameter: Tissue Value: Whole Plant
  misc_feature: MA Experiment 20000574 PARAMETER Experiment Name: At_100uM_ABA_Mutants__P Parameter: Treatment Value: None
  misc_feature: MA Experiment ID: 20001451 Result: Down-regulated in Transcription
  misc_feature: MA Experiment 20001451 PARAMETER Experiment Name: At_Far-red-induction_P Parameter: Age (day) Value: 7
  misc_feature: MA Experiment 20001451 PARAMETER Experiment Name: At_Far-red-induction_P Parameter: Light Value: Far-red vs. White
  misc_feature: MA Experiment 20001451 PARAMETER Experiment Name: At_Far-red-induction_P Parameter: Organism Value: A. thaliana
  misc_feature: MA Experiment 20001451 PARAMETER Experiment Name: At_Far-red-induction_P Parameter: Plant Line Value: Columbia
  misc_feature: MA Experiment 20001451 PARAMETER Experiment Name: At_Far-red-induction_P Parameter: Timepoint (hr) Value: 24
  misc_feature: MA Experiment 20001451 PARAMETER Experiment Name: At_Far-red-induction_P Parameter: Tissue Value: Whole Plant
  misc_feature: MA Experiment ID: 20001458 Result: Up-regulated in Transcription
  misc_feature: MA Experiment 20001458 PARAMETER Experiment Name: At_50mM_NH4NO3_L-to-H_P Parameter: Age (day) Value: Undefined
  misc_feature: MA Experiment 20001458 PARAMETER Experiment Name: At_50mM_NH4NO3_L-to-H_P Parameter: Organism Value: Undefined
  misc_feature: MA Experiment 20001458 PARAMETER Experiment Name: At_50mM_NH4NO3_L-to-H_P Parameter: Plant Line Value: Undefined
  misc_feature: MA Experiment 20001458 PARAMETER Experiment Name: At_50mM_NH4NO3_L-to-H_P Parameter: Timepoint (hr) Value: 2
  misc_feature: MA Experiment 20001458 PARAMETER Experiment Name: At_50mM_NH4NO3_L-to-H_P Parameter: Tissue Value: Siliques
  misc_feature: MA Experiment 20001458 PARAMETER Experiment Name: At_50mM_NH4NO3_L-to-H_P Parameter: Treatment Value: 50mM NH4NO3 vs. 100mM Manitol
  misc_feature: MA Experiment ID: 20001554 Result: Down-regulated in Transcription
  misc_feature: MA Experiment 20001554 PARAMETER Experiment Name: At_Drought_Soil_Dry_P Parameter: Age (day) Value: 21
  misc_feature: MA Experiment 20001554 PARAMETER Experiment Name: At_Drought_Soil_Dry_P Parameter: Organism Value: A. thaliana
  misc_feature: MA Experiment 20001554 PARAMETER Experiment Name: At_Drought_Soil_Dry_P Parameter: Plant Line Value: WS
  misc_feature: MA Experiment 20001554 PARAMETER Experiment Name: At_Drought_Soil_Dry_P Parameter: Post Timepoint (hr) Value: None
  misc_feature: MA Experiment 20001554 PARAMETER Experiment Name: At_Drought_Soil_Dry_P Parameter: Post-Treatment Value: None
  misc_feature: MA Experiment 20001554 PARAMETER Experiment Name: At_Drought_Soil_Dry_P Parameter: Timepoint (day) Value: 7
  misc_feature: MA Experiment 20001554 PARAMETER Experiment Name: At_Drought_Soil_Dry_P Parameter: Treatment Value: Drought vs. No Drought
  misc_feature: MA Experiment ID: 20001555 Result: Down-regulated in Transcription
  misc_feature: MA Experiment 20001555 PARAMETER Experiment Name: At_Drought_Soil_Dry_P Parameter: Age (day) Value: 24
  misc_feature: MA Experiment 20001555 PARAMETER Experiment Name: At_Drought_Soil_Dry_P Parameter: Organism Value: A. thaliana
  misc_feature: MA Experiment 20001555 PARAMETER Experiment Name: At_Drought_Soil_Dry_P Parameter: Plant Line Value: WS
  misc_feature: MA Experiment 20001555 PARAMETER Experiment Name: At_Drought_Soil_Dry_P Parameter: Post Timepoint (hr) Value: None
  misc_feature: MA Experiment 20001555 PARAMETER Experiment Name: At_Drought_Soil_Dry_P Parameter: Post-Treatment Value: None
  misc_feature: MA Experiment 20001555 PARAMETER Experiment Name: At_Drought_Soil_Dry_P Parameter: Timepoint (day) Value: 10
  misc_feature: MA Experiment 20001555 PARAMETER Experiment Name: At_Drought_Soil_Dry_P Parameter: Treatment Value: Drought vs. No Drought
  misc_feature: MA Experiment ID: 20001556 Result: Down-regulated in Transcription
  misc_feature: MA Experiment 20001556 PARAMETER Experiment Name: At_Drought_Soil_Dry_P Parameter: Age (day) Value: 26
  misc_feature: MA Experiment 20001556 PARAMETER Experiment Name: At_Drought_Soil_Dry_P Parameter: Organism Value: A. thaliana
  misc_feature: MA Experiment 20001556 PARAMETER Experiment Name: At_Drought_Soil_Dry_P Parameter: Plant Line Value: WS
  misc_feature: MA Experiment 20001556 PARAMETER Experiment Name: At_Drought_Soil_Dry_P Parameter: Post Timepoint (hr) Value: None
  misc_feature: MA Experiment 20001556 PARAMETER Experiment Name: At_Drought_Soil_Dry_P Parameter: Post-Treatment Value: None
  misc_feature: MA Experiment 20001556 PARAMETER Experiment Name: At_Drought_Soil_Dry_P Parameter: Timepoint (day) Value: 12
  misc_feature: MA Experiment 20001556 PARAMETER Experiment Name: At_Drought_Soil_Dry_P Parameter: Treatment Value: Drought vs. No Drought
  misc_feature: MA Experiment ID: 20001557 Result: Up-regulated in Transcription
  misc_feature: MA Experiment 20001557 PARAMETER Experiment Name: At_Drought_Soil_Dry_P Parameter: Age (day) Value: 27
  misc_feature: MA Experiment 20001557 PARAMETER Experiment Name: At_Drought_Soil_Dry_P Parameter: Organism Value: A. thaliana
  misc_feature: MA Experiment 20001557 PARAMETER Experiment Name: At_Drought_Soil_Dry_P Parameter: Plant Line Value: WS
  misc_feature: MA Experiment 20001557 PARAMETER Experiment Name: At_Drought_Soil_Dry_P Parameter: Post Timepoint (hr) Value: 3
  misc_feature: MA Experiment 20001557 PARAMETER Experiment Name: At_Drought_Soil_Dry_P Parameter: Post-Treatment Value: Re-Water vs. No Drought
  misc_feature: MA Experiment 20001557 PARAMETER Experiment Name: At_Drought_Soil_Dry_P Parameter: Timepoint (day) Value: 13
  misc_feature: MA Experiment 20001557 PARAMETER Experiment Name: At_Drought_Soil_Dry_P Parameter: Treatment Value: Drought vs. No Drought
  misc_feature: MA Experiment ID: 20001558 Result: Up-regulated in Transcription
  misc_feature: MA Experiment 20001558 PARAMETER Experiment Name: At_Drought_Soil_Dry_P Parameter: Age (day) Value: 27
  misc_feature: MA Experiment 20001558 PARAMETER Experiment Name: At_Drought_Soil_Dry_P Parameter: Organism Value: A. thaliana
  misc_feature: MA Experiment 20001558 PARAMETER Experiment Name: At_Drought_Soil_Dry_P Parameter: Plant Line Value: WS
  misc_feature: MA Experiment 20001558 PARAMETER Experiment Name: At_Drought_Soil_Dry_P Parameter: Post Timepoint (hr) Value: 6
  misc_feature: MA Experiment 20001558 PARAMETER Experiment Name: At_Drought_Soil_Dry_P Parameter: Post-Treatment Value: Re-Water vs. No Drought
  misc_feature: MA Experiment 20001558 PARAMETER Experiment Name: At_Drought_Soil_Dry_P Parameter: Timepoint (day) Value: 13
  misc_feature: MA Experiment 20001558 PARAMETER Experiment Name: At_Drought_Soil_Dry_P Parameter: Treatment Value: Drought vs. No Drought
  misc_feature: MA Experiment ID: 20001560 Result: Down-regulated in Transcription
  misc_feature: MA Experiment 20001560 PARAMETER Experiment Name: At_Drought_Soil_Dry_P Parameter: Age (day) Value: 28
  misc_feature: MA Experiment 20001560 PARAMETER Experiment Name: At_Drought_Soil_Dry_P Parameter: Organism Value: A. thaliana
  misc_feature: MA Experiment 20001560 PARAMETER Experiment Name: At_Drought_Soil_Dry_P Parameter: Plant Line Value: WS
  misc_feature: MA Experiment 20001560 PARAMETER Experiment Name: At_Drought_Soil_Dry_P Parameter: Post Timepoint (hr) Value: None
  misc_feature: MA Experiment 20001560 PARAMETER Experiment Name: At_Drought_Soil_Dry_P Parameter: Post-Treatment Value: None
  misc_feature: MA Experiment 20001560 PARAMETER Experiment Name: At_Drought_Soil_Dry_P Parameter: Timepoint (day) Value: 14
  misc_feature: MA Experiment 20001560 PARAMETER Experiment Name: At_Drought_Soil_Dry_P Parameter: Treatment Value: Drought vs. No Drought
  misc_feature: MA Experiment ID: 20001755 Result: Up-regulated in Transcription
  misc_feature: MA Experiment 20001755 PARAMETER Experiment Name: At_50mM_NH4NO3_L-to-H_P Parameter: Timepoint (hr) Value: 2
  misc_feature: MA Experiment 20001755 PARAMETER Experiment Name: At_50mM_NH4NO3_L-to-H_P Parameter: Tissue Value: Leaf
  misc_feature: MA Experiment 20001755 PARAMETER Experiment Name: At_50mM_NH4NO3_L-to-H_P Parameter: Treatment Value: 50mM NH4NO3 vs 100mM Mannitol
  misc_feature: MA Experiment ID: 20001757 Result: Up-regulated in Transcription
  misc_feature: MA Experiment 20001757 PARAMETER Experiment Name: At_50mM_NH4NO3_L-to-H_P Parameter: Timepoint (hr) Value: 6
  misc_feature: MA Experiment 20001757 PARAMETER Experiment Name: At_50mM_NH4NO3_L-to-H_P Parameter: Tissue Value: Leaf
  misc_feature: MA Experiment 20001757 PARAMETER Experiment Name: At_50mM_NH4NO3_L-to-H_P Parameter: Treatment Value: 50mM NH4NO3 vs 100mM Mannitol
  misc_feature: MA Experiment ID: 20001905 Result: Down-regulated in Transcription
  misc_feature: MA Experiment 20001905 PARAMETER Experiment Name: At_Drought_Reproduction_P Parameter: Age (day) Value: 40
  misc_feature: MA Experiment 20001905 PARAMETER Experiment Name: At_Drought_Reproduction_P Parameter: Organism Value: A. thaliana
  misc_feature: MA Experiment 20001905 PARAMETER Experiment Name: At_Drought_Reproduction_P Parameter: Plant Line Value: WS
  misc_feature: MA Experiment 20001905 PARAMETER Experiment Name: At_Drought_Reproduction_P Parameter: Timepoint (day) Value: 10
  misc_feature: MA Experiment 20001905 PARAMETER Experiment Name: At_Drought_Reproduction_P Parameter: Tissue Value: Rosettes
  misc_feature: MA Experiment 20001905 PARAMETER Experiment Name: At_Drought_Reproduction_P Parameter: Treatment Value: Drought vs. No Drought
ccaattctaaaccaaacaacagattctcataatcatctcttcttttttcctctttacgaaaagaagaaagatcaaaccttccaagtaatcattttctttctctctctcacacacacacattcactagttttagcttcacaaaatgtgatctaacttcatttacctatatgcaggtttacacaaaaagaaaaaagaacgatggctcttgtcaccttcttgtttattgctacccttggagcaatgacgtcacatgtcaatggttacgccggaggaggttgggtcaacgcacacgccacattctacggtggtggtgatgcttccggcacaatgggaggtgcttgtggatacggaaacctatatagccaaggctatggaaccaacacggcggcgctaagcacggctctattcaataatggtctaagttgtggtgcttgcttcgagataagatgtcaaaacgatggaaaatggtgtcttcctggctcaattgtcgtcacagccacaaacttttgccctcctaacaacgccttaccgaacaacgcaggaggttggtgtaaccctcctcagcagcattttgatctctctcagcccgtatttcaacgcatcgctcaatacagagccggcattgtccccgtcgcttaccgaagagtgccgtgcgtgagaagaggaggaataaggtttacgataaacggacactcttacttcaacctagttctgatcactaacgtcggaggagccggagatgttcactcagcgatggttaaaggttcaagaactggatggcaagcgatgtcaagaaactggggacagaactggcagagtaactcttaccttaacggacaatctctctcattcaaagttacaacaagcgatggccaaaccattgtctctaacaacgttgctaacgcaggctggtctttcggccagaccttcacaggtgcgcagctacgttaggaagagtgattcggtgaaaattcatctcattgatcgtgtggtattgacgtgttgtagtagaagcagttagagagaggggcatgatagtaatttggtcctttctttcaattgaggttaacctaaaaagaagtggtgcttcgagtgcttgattttgcacgaggccttgatgatgtcatcttttgggaaccttttcttatctttcttcatttttattggtaaggttttatgttatactgatgcagaggtggtattgagttgaagtaccacccgctagtagtagtagtagtctctcgtgtcatttgtatcccttctcgaagcgagagggagagttttagattttattaatctcgttaaagtcatttgtatgttgtaaatttttcaatttctacaagtaagaaatattggagatttgtttgtt

SEQ ID NO: 105432 - protein, 250 aa, Arabidopsis thaliana; identical to SEQ ID NO: 24990
  peptide (1)..(250): Ceres Seq. ID no. 13617233
  misc_feature (158)..(235): Pfam Name: Pollen allergen Pfam Description: Pollen allergen
  misc_feature (1)..(250): Homolog of NCBI NO: 30697882 NR Description: expansin, putative (EXP1) [Arabidopsis thaliana]
  misc_feature (1)..(250): Homolog of NCBI NO: 15222356 NR Description: expansin, putative (EXP1) [Arabidopsis thaliana]
  misc_feature (19)..(250): Homolog of NCBI NO: 11281293 NR Description: expansin EXP1 [imported] - Arabidopsis thaliana
  misc_feature (1)..(250): Homolog of NCBI NO: 38046730 NR Description: alpha-expansin 3 [Populus tremula x Populus
  misc_feature (1)..(250): Homolog of NCBI NO: 15223347 NR Description: expansin, putative (EXP10) [Arabidopsis thaliana]
  misc_feature (1)..(250): Homolog of NCBI NO: 29467507 NR Description: expansin [Pyrus communis]
  misc_feature (1)..(250): Homolog of NCBI NO: 17484121 NR Description: alpha-expansin [Prunus cerasus]
  misc_feature (1)..(250): Homolog of NCBI NO: 29466641 NR Description: expansin [Prunus persica]
  misc_feature (1)..(250): Homolog of NCBI NO: 10180019 NR Description: expansin 2 [Prunus avium]
  misc_feature (1)..(250): Homolog of NCBI NO: 21553381 NR Description: alpha-expansin 10 precursor (At-EXP10) (AtEx10)

SEQ ID NO: 105433 - protein, 236 aa, Arabidopsis thaliana; identical to SEQ ID NO: 24991
  peptide (1)..(236): Ceres Seq. ID no. 13617234
  misc_feature (144)..(221): Pfam Name: Pollen allergen Pfam Description: Pollen allergen
  misc_feature (1)..(236): Homolog of NCBI NO: 30697882 NR Description: expansin, putative (EXP1) [Arabidopsis thaliana]
  misc_feature (1)..(236): Homolog of NCBI NO: 15222356 NR Description: expansin, putative (EXP1) [Arabidopsis thaliana]
  misc_feature (5)..(236): Homolog of NCBI NO: 11281293 NR Description: expansin EXP1 [imported] - Arabidopsis thaliana
  misc_feature (1)..(236): Homolog of NCBI NO: 38046730 NR Description: alpha-expansin 3 [Populus tremula x Populus
  misc_feature (1)..(236): Homolog of NCBI NO: 15223347 NR Description: expansin, putative (EXP10) [Arabidopsis thaliana]
  misc_feature (1)..(236): Homolog of NCBI NO: 29467507 NR Description: expansin [Pyrus communis]
  misc_feature (1)..(236): Homolog of NCBI NO: 17484121 NR Description: alpha-expansin [Prunus cerasus]
  misc_feature (1)..(236): Homolog of NCBI NO: 29466641 NR Description: expansin [Prunus persica]
  misc_feature (1)..(236): Homolog of NCBI NO: 10180019 NR Description: expansin 2 [Prunus avium]
  misc_feature (1)..(236): Homolog of NCBI NO: 21553381 NR Description: alpha-expansin 10 precursor (At-EXP10) (AtEx10)

SEQ ID NO: 105434 - protein, 207 aa, Arabidopsis thaliana; identical to SEQ ID NO: 24992
  peptide (1)..(207): Ceres Seq. ID no. 13617235
  misc_feature (115)..(192): Pfam Name: Pollen allergen Pfam Description: Pollen allergen
  misc_feature (1)..(207): Homolog of NCBI NO: 30697882 NR Description: expansin, putative (EXP1) [Arabidopsis thaliana]
  misc_feature (1)..(207): Homolog of NCBI NO: 15222356 NR Description: expansin, putative (EXP1) [Arabidopsis thaliana]
  misc_feature (1)..(207): Homolog of NCBI NO: 11281293 NR Description: expansin EXP1 [imported] - Arabidopsis thaliana
  misc_feature (1)..(207): Homolog of NCBI NO: 38046730 NR Description: alpha-expansin 3 [Populus tremula x Populus
  misc_feature (1)..(207): Homolog of NCBI NO: 15223347 NR Description: expansin, putative (EXP10) [Arabidopsis thaliana]
  misc_feature (1)..(207): Homolog of NCBI NO: 29467507 NR Description: expansin [Pyrus communis]
  misc_feature (1)..(207): Homolog of NCBI NO: 17484121 NR Description: alpha-expansin [Prunus cerasus]
  misc_feature (1)..(207): Homolog of NCBI NO: 29466641 NR Description: expansin [Prunus persica]
  misc_feature (1)..(207): Homolog of NCBI NO: 10180019 NR Description: expansin 2 [Prunus avium]
  misc_feature (1)..(207): Homolog of NCBI NO: 21553381 NR Description: alpha-expansin 10 precursor (At-EXP10) (AtEx10)

SEQ ID NO: 105435 - DNA, 1217 bp, Arabidopsis thaliana
  misc_feature (1)..(1217): Ceres Seq. ID no. 13617236
  misc_feature: MA Experiment ID: 20000184 Result: Down-regulated in Transcription
  misc_feature: MA Experiment 20000184 PARAMETER Experiment Name: At_Shoots__P Parameter: Age (day) Value: 7
  misc_feature: MA Experiment 20000184 PARAMETER Experiment Name: At_Shoots__P Parameter: Tissue Value: Shoots vs. Whole Plant
  misc_feature: MA Experiment ID: 20000439 Result: Up-regulated in Transcription
  misc_feature: MA Experiment 20000439 PARAMETER Experiment Name: At_Roots__P Parameter: Age (day) Value: 14 vs. 21
  misc_feature: MA Experiment 20000439 PARAMETER Experiment Name: At_Roots__P Parameter: Organism Value: A. thaliana
  misc_feature: MA Experiment 20000439 PARAMETER Experiment Name: At_Roots__P Parameter: Tissue Value: Roots vs. Whole Plant
  misc_feature: MA Experiment ID: 20000495 Result: Up-regulated in Transcription
  misc_feature: MA Experiment 20000495 PARAMETER Experiment Name: At_Guard_Cells_P Parameter: Harvest Date Value: 8/2/2002
  misc_feature: MA Experiment 20000495 PARAMETER Experiment Name: At_Guard_Cells_P Parameter: Organism Value: A. thaliana
  misc_feature: MA Experiment 20000495 PARAMETER Experiment Name: At_Guard_Cells_P Parameter: Tissue Value: Guard Cells vs. Leaves
  misc_feature: MA Experiment ID: 20001906 Result: Down-regulated in Transcription
  misc_feature: MA Experiment 20001906 PARAMETER Experiment Name: At_Drought_Reproduction_P Parameter: Age (day) Value: 35
  misc_feature: MA Experiment 20001906 PARAMETER Experiment Name: At_Drought_Reproduction_P Parameter: Organism Value: A. thaliana
  misc_feature: MA Experiment 20001906 PARAMETER Experiment Name: At_Drought_Reproduction_P Parameter: Plant Line Value: WS
  misc_feature: MA Experiment 20001906 PARAMETER Experiment Name: At_Drought_Reproduction_P Parameter: Timepoint (day) Value: 5
  misc_feature: MA Experiment 20001906 PARAMETER Experiment Name: At_Drought_Reproduction_P Parameter: Tissue Value: Siliques
  misc_feature: MA Experiment 20001906 PARAMETER Experiment Name: At_Drought_Reproduction_P Parameter: Treatment Value: Drought vs. No Drought
aacaaacccaacaatctttgaaaacaaatcaccctttcgtttttatttaaatttcttgggtcgtttcttaaatttgtatgtgtttattaatggagatcaacaataatgccaacaatactaatactactattgataatcacaaggcaaagatgagccttgtgttgtcaacggatgctaagccaaggttgaaatggacttgtgatcttcatcacaaattcatcgaagccgttaatcaacttggaggacctaacaaagcaacacctaagggtttgatgaaggttatggagattcctgggcttaccttataccatctcaagagccatttacagaaatatcggttagggaagagcatgaagttcgatgataacaagctagaagtttcctctgcatcagagaatcaagaagttgagagtaaaaacgattcaagagatctccgaggctgcagtgtcaccgaagaaaacagcaatccagctaaagacagagggctacaaatcacagaggctttacaaatgcagatggaagttcagaagaaacttcatgaacaaatcgaagttcagaggcatttgcaggtgaagattgaggcacaaggaaagtatctacagtccgttttaatgaaagctcaacaaactctcgctggctactcatcttcaaatctcggcatggattttgcgaggaccgagctctctagattagcttcaatggtgaacagaggctgtccaagcacttcgttctcagagctaacgcaagtagaagaagaagaagaaggtttcttgtggtacaagaaaccagaaaacagaggaattagtcagctgagatgttcagtagagagctcgttgacatcttcagagacctcagagacaaaactggatactgacaataaccttaataaatcgattgaacttccgttgatggagatcaactcggaagtgatgaaggggaagaagagaagcataaacgacgtcgtttgcgtggagcagcctctaatgaagagagcttttggagttgatgatgatgagcatttgaagttgagtttgaatacttacaagaaagacatggaggcgtgtacgaacataggactagggtttaattaaaaaaaaaacattttactaaagttatataaaaatgttttaaaagaatccagtaatatatatgcgtagatttctatagattattgtagagattttgtgagtaagtcgtggtgaagaagaacgcatggg

SEQ ID NO: 105436 - protein, 337 aa, Arabidopsis thaliana
  peptide (1)..(337): Ceres Seq. ID no. 13617237
  misc_feature (36)..(87): Pfam Name: Myb-like DNA-binding domain Pfam Description: Myb-like DNA-binding domain
  misc_feature (5)..(337): Homolog of NCBI NO: 15222366 NR Description: transfactor -related [Arabidopsis thaliana]
  misc_feature (20)..(268): Homolog of NCBI NO: 6223653 NR Description: transfactor-like [Arabidopsis thaliana]
  misc_feature (20)..(269): Homolog of NCBI NO: 14596181 NR Description: transfactor-like protein [Arabidopsis thaliana]
  misc_feature (20)..(269): Homolog of NCBI NO: 15238770 NR Description: transfactor-related protein [Arabidopsis thaliana]
  misc_feature (20)..(269): Homolog of NCBI NO: 28059694 NR Description: transfactor-like protein [Arabidopsis thaliana]
  misc_feature (7)..(256): Homolog of NCBI NO: 18414049 NR Description: expressed protein [Arabidopsis thaliana]
  misc_feature (20)..(268): Homolog of NCBI NO: 22330835 NR Description: transfactor-related [Arabidopsis thaliana] AT3g04030/T11I18_14 [Arabidopsis thaliana]
  misc_feature (27)..(255): Homolog of NCBI NO: 18404044 NR Description: transfactor -related [Arabidopsis thaliana] AT3g24120/MUJ8_3 [Arabidopsis thaliana] AT3g24120/MUJ8_3 [Arabidopsis thaliana]
  misc_feature (20)..(269): Homolog of NCBI NO: 30686726 NR Description: transfactor-related protein [Arabidopsis
  misc_feature (27)..(185): Homolog of NCBI NO: 34394528 NR Description: transfactor-like protein [Oryza sativa (japonica
MCLLMEINNNANNTNTTIDNHKAKMSLVLSTDAKPRLKWTCDLHHKFIEAVNQLGGPNKATPKGLMKVMEIPGLTLYHLKSHLQKYRLGKSMKFDDNKLEVSSASENQEVESKNDSRDLRGCSVTEENSNPAKDRGLQITEALQMQMEVQKKLHEQIEVQRHLQVKIEAQGKYLQSVLMKAQQTLAGYSSSNLGMDFARTELSRLASMVNRGCPSTSFSELTQVEEEEEGFLWYKKPENRGISQLRCSVESSLTSSETSETKLDTDNNLNKSIELPLMEINSEVMKGKKRSINDVVCVEQPLMKRAFGVDDDEHLKLSLNTYKKDMEACTNIGLGFN

SEQ ID NO: 105437 - protein, 333 aa, Arabidopsis thaliana
  peptide (1)..(333): Ceres Seq. ID no. 13617238
  misc_feature (32)..(83): Pfam Name: Myb-like DNA-binding domain Pfam Description: Myb-like DNA-binding domain
  misc_feature (1)..(333): Homolog of NCBI NO: 15222366 NR Description: transfactor -related [Arabidopsis thaliana]
  misc_feature (16)..(264): Homolog of NCBI NO: 6223653 NR Description: transfactor-like [Arabidopsis thaliana]
  misc_feature (16)..(265): Homolog of NCBI NO: 14596181 NR Description: transfactor-like protein [Arabidopsis thaliana]
  misc_feature (16)..(265): Homolog of NCBI NO: 28059694 NR Description: transfactor-like protein [Arabidopsis thaliana]
  misc_feature (16)..(265): Homolog of NCBI NO: 15238770 NR Description: transfactor-related protein [Arabidopsis thaliana]
  misc_feature (3)..(252): Homolog of NCBI NO: 18414049 NR Description: expressed protein [Arabidopsis thaliana]
  misc_feature (16)..(264): Homolog of NCBI NO: 22330835 NR Description: transfactor-related [Arabidopsis thaliana] AT3g04030/T11I18_14 [Arabidopsis thaliana]
  misc_feature (23)..(251): Homolog of NCBI NO: 18404044 NR Description: transfactor -related [Arabidopsis thaliana] AT3g24120/MUJ8_3 [Arabidopsis thaliana] AT3g24120/MUJ8_3 [Arabidopsis thaliana]
  misc_feature (16)..(265): Homolog of NCBI NO: 30686726 NR Description: transfactor-related protein [Arabidopsis
  misc_feature (23)..(181): Homolog of NCBI NO: 34394528 NR Description: transfactor-like protein [Oryza sativa (japonica
MEINNNANNTNTTIDNHKAKMSLVLSTDAKPRLKWTCDLHHKFIEAVNQLGGPNKATPKGLMKVMEIPGLTLYHLKSHLQKYRLGKSMKFDDNKLEVSSASENQEVESKNDSRDLRGCSVTEENSNPAKDRGLQITEALQMQMEVQKKLHEQIEVQRHLQVKIEAQGKYLQSVLMKAQQTLAGYSSSNLGMDFARTELSRLASMVNRGCPSTSFSELTQVEEEEEGFLWYKKPENRGISQLRCSVESSLTSSETSETKLDTDNNLNKSIELPLMEINSEVMKGKKRSINDVVCVEQPLMKRAFGVDDDEHLKLSLNTYKKDMEACTNIGLGFN

SEQ ID NO: 105438 - protein, 313 aa, Arabidopsis thaliana
  peptide (1)..(313): Ceres Seq. ID no. 13617239
  misc_feature (12)..(63): Pfam Name: Myb-like DNA-binding domain Pfam Description: Myb-like DNA-binding domain
  misc_feature (1)..(313): Homolog of NCBI NO: 15222366 NR Description: transfactor -related [Arabidopsis thaliana]
  misc_feature (1)..(244): Homolog of NCBI NO: 6223653 NR Description: transfactor-like [Arabidopsis thaliana]
  misc_feature (1)..(245): Homolog of NCBI NO: 14596181 NR Description: transfactor-like protein [Arabidopsis thaliana]
  misc_feature (1)..(245): Homolog of NCBI NO: 28059694 NR Description: transfactor-like protein [Arabidopsis thaliana]
  misc_feature (1)..(245): Homolog of NCBI NO: 15238770 NR Description: transfactor-related protein [Arabidopsis thaliana]
  misc_feature (1)..(232): Homolog of NCBI NO: 18414049 NR Description: expressed protein [Arabidopsis thaliana]
  misc_feature (1)..(244): Homolog of NCBI NO: 22330835 NR Description: transfactor-related [Arabidopsis thaliana] AT3g04030/T11I18_14 [Arabidopsis thaliana]
  misc_feature (3)..(231): Homolog of NCBI NO: 18404044 NR Description: transfactor -related [Arabidopsis thaliana] AT3g24120/MUJ8_3 [Arabidopsis thaliana] AT3g24120/MUJ8_3 [Arabidopsis thaliana]
  misc_feature (1)..(245): Homolog of NCBI NO: 30686726 NR Description: transfactor-related protein [Arabidopsis
  misc_feature (3)..(161): Homolog of NCBI NO: 34394528 NR Description: transfactor-like protein [Oryza sativa (japonica
MSLVLSTDAKPRLKWTCDLHHKFIEAVNQLGGPNKATPKGLMKVMEIPGLTLYHLKSHLQKYRLGKSMKFDDNKLEVSSASENQEVESKNDSRDLRGCSVTEENSNPAKDRGLQITEALQMQMEVQKKLHEQIEVQRHLQVKIEAQGKYLQSVLMKAQQTLAGYSSSNLGMDFARTELSRLASMVNRGCPSTSFSELTQVEEEEEGFLWYKKPENRGISQLRCSVESSLTSSETSETKLDTDNNLNKSIELPLMEINSEVMKGKKRSINDVVCVEQPLMKRAFGVDDDEHLKLSLNTYKKDMEACTNIGLGFN

SEQ ID NO: 105439 - DNA, 1395 bp, Arabidopsis thaliana
  misc_feature (1)..(1395): Ceres Seq. ID no. 13617243
  misc_feature: MA Experiment ID: 108435 Result: Up-regulated in Transcription
  misc_feature: MA Experiment 108435 PARAMETER Experiment Name: At_stm_Mutants_cDNA_P Parameter: Plant Line Value: wt Landsburg vs stm
  misc_feature: MA Experiment 108435 PARAMETER Experiment Name: At_stm_Mutants_cDNA_P Parameter: Tissue Value: Shoot Apical Meristem Region
  misc_feature: MA Experiment ID: 108461 Result: Up-regulated in Transcription
  misc_feature: MA Experiment 108461 PARAMETER Experiment Name: At_Germinating_Seeds_cDNA_P Parameter: Age (day) Value: 1 vs. 0
  misc_feature: MA Experiment 108461 PARAMETER Experiment Name: At_Germinating_Seeds_cDNA_P Parameter: Tissue Value: Germinating Seeds
  misc_feature: MA Experiment ID: 108462 Result: Up-regulated in Transcription
  misc_feature: MA Experiment 108462 PARAMETER Experiment Name: At_Germinating_Seeds_cDNA_P Parameter: Age (day) Value: 2 vs. 0
  misc_feature: MA Experiment 108462 PARAMETER Experiment Name: At_Germinating_Seeds_cDNA_P Parameter: Tissue Value: Germinating Seeds
  misc_feature: MA Experiment ID: 108463 Result: Up-regulated in Transcription
  misc_feature: MA Experiment 108463 PARAMETER Experiment Name: At_Germinating_Seeds_cDNA_P Parameter: Age (day) Value: 3 vs. 0
  misc_feature: MA Experiment 108463 PARAMETER Experiment Name: At_Germinating_Seeds_cDNA_P Parameter: Tissue Value: Germinating Seeds
  misc_feature: MA Experiment ID: 108464 Result: Up-regulated in Transcription
  misc_feature: MA Experiment 108464 PARAMETER Experiment Name: At_Germinating_Seeds_cDNA_P Parameter: Age (day) Value: 4 vs. 0
  misc_feature: MA Experiment 108464 PARAMETER Experiment Name: At_Germinating_Seeds_cDNA_P Parameter: Tissue Value: Germinating Seeds
  misc_feature: MA Experiment ID: 108501 Result: Up-regulated in Transcription
  misc_feature: MA Experiment 108501 PARAMETER Experiment Name: At_ap2_floral_buds_cDNA_P Parameter: Plant Line Value: ap2 (Ler.)
  misc_feature: MA Experiment 108501 PARAMETER Experiment Name: At_ap2_floral_buds_cDNA_P Parameter: Tissue Value: Closed Flower
  misc_feature: MA Experiment ID: 108577 Result: Down-regulated in Transcription
  misc_feature: MA Experiment 108577 PARAMETER Experiment Name: At_42deg_Heat_cDNA_P Parameter: Temperature (deg C) Value: 42 vs. 22
  misc_feature: MA Experiment 108577 PARAMETER Experiment Name: At_42deg_Heat_cDNA_P Parameter: Timepoint (hr) Value: 6
  misc_feature: MA Experiment 108577 PARAMETER Experiment Name: At_42deg_Heat_cDNA_P Parameter: Tissue Value: Aerial
  misc_feature: MA Experiment ID: 108594 Result: Down-regulated in Transcription
  misc_feature: MA Experiment 108594 PARAMETER Experiment Name: At_Ler-rhl_Root_cDNA_P Parameter: Plant Line Value: null
  misc_feature: MA Experiment ID: 20000069 Result: Down-regulated in Transcription
  misc_feature: MA Experiment 20000069 PARAMETER Experiment Name: At_100uM_ABA_Mutants_cDNA_P Parameter: Plant Line Value: CS23
  misc_feature: MA Experiment 20000069 PARAMETER Experiment Name: At_100uM_ABA_Mutants_cDNA_P Parameter: Timepoint (hr) Value: 6
  misc_feature: MA Experiment 20000069 PARAMETER Experiment Name: At_100uM_ABA_Mutants_cDNA_P Parameter: Tissue Value: Aerial
  misc_feature: MA Experiment 20000069 PARAMETER Experiment Name: At_100uM_ABA_Mutants_cDNA_P Parameter: Treatment Value: 100uM ABA vs. No Treatment
  misc_feature: MA Experiment ID: 20000071 Result: Down-regulated in Transcription
  misc_feature: MA Experiment 20000071 PARAMETER Experiment Name: At_100uM_ABA_Mutants_cDNA_P Parameter: Plant Line Value: CS8104
  misc_feature: MA Experiment 20000071 PARAMETER Experiment Name: At_100uM_ABA_Mutants_cDNA_P Parameter: Timepoint (hr) Value: 6
  misc_feature: MA Experiment 20000071 PARAMETER Experiment Name: At_100uM_ABA_Mutants_cDNA_P Parameter: Tissue Value: Aerial
  misc_feature: MA Experiment 20000071 PARAMETER Experiment Name: At_100uM_ABA_Mutants_cDNA_P Parameter: Treatment Value: 100uM ABA vs. No Treatment
  misc_feature: MA Experiment ID: 20000072 Result: Down-regulated in Transcription
  misc_feature: MA Experiment 20000072 PARAMETER Experiment Name: At_100uM_ABA_Mutants_cDNA_P Parameter: Plant Line Value: CS8105
  misc_feature: MA Experiment 20000072 PARAMETER Experiment Name: At_100uM_ABA_Mutants_cDNA_P Parameter: Timepoint (hr) Value: 6
  misc_feature: MA Experiment 20000072 PARAMETER Experiment Name: At_100uM_ABA_Mutants_cDNA_P Parameter: Tissue Value: Aerial
  misc_feature: MA Experiment 20000072 PARAMETER Experiment Name: At_100uM_ABA_Mutants_cDNA_P Parameter: Treatment Value: 100uM ABA vs. No Treatment
  misc_feature: MA Experiment ID: 20000173 Result: Down-regulated in Transcription
  misc_feature: MA Experiment 20000173 PARAMETER Experiment Name: At_42deg_Heat_P Parameter: Age (day) Value: 14
  misc_feature: MA Experiment 20000173 PARAMETER Experiment Name: At_42deg_Heat_P Parameter: Organism Value: A. thaliana
  misc_feature: MA Experiment 20000173 PARAMETER Experiment Name: At_42deg_Heat_P Parameter: Plant Line Value: WS
  misc_feature: MA Experiment 20000173 PARAMETER Experiment Name: At_42deg_Heat_P Parameter: Temperature (deg C) Value: 42 vs. 22
  misc_feature: MA Experiment 20000173 PARAMETER Experiment Name: At_42deg_Heat_P Parameter: Timepoint (hr) Value: 6
  misc_feature: MA Experiment 20000173 PARAMETER Experiment Name: At_42deg_Heat_P Parameter: Tissue Value: Aerial
  misc_feature: MA Experiment ID: 20000235 Result: Up-regulated in Transcription
  misc_feature: MA Experiment 20000235 PARAMETER Experiment Name: At_Siliques_P Parameter: Age (day) Value: 21
  misc_feature: MA Experiment 20000235 PARAMETER Experiment Name: At_Siliques_P Parameter: Organism Value: A. thaliana
  misc_feature: MA Experiment 20000235 PARAMETER Experiment Name: At_Siliques_P Parameter: Plant Line Value: WS
  misc_feature: MA Experiment 20000235 PARAMETER Experiment Name: At_Siliques_P Parameter: Tissue Value: 5-10mm Siliques vs. Whole Plant
accagaagtggtatagtctaggccgatacatttcactatctctctctcttttgtttttcctcttcttctttttttccatttgatttcaaactctcacacaaagagcttcagatttataagaccatgataatggctttaagacaaagattggcaagaagaaaaaactaaagagaaacgaccaaaatctcaagcaaacagtactaacttctgttgcaaaacagaagaagatgtcttgtaataatggaatgtcttttttcccttcaaatttcatgatccaaacctcttacgaagatgatcatcctcatcaatctccatctcttgctcctcttcttccttcttgctctctacctcaagatctccatggatttgcttcgtttctaggtaagagatctccaatggaagggtgttgtgatttagaaacagggaacaatatgaatggagaagaggattattcagatgatgggtcacaaatgggagagaagaagaggagattgaacatggaacaagtgaagacactagagaagaactttgagcttggaaacaaacttgaaccagagaggaaaatgcagctagctcgtgccttaggtttgcaaccaagacagatcgcgatttggtttcaaaatcgaagagctcgttggaaaacaaagcagctagagaaagattatgatactcttaaacgacagtttgatacacttaaagctgaaaatgatcttcttcaaactcataatcagaaactccaagctgagataatgggattaaaaaacagagaacaaacagaatcaataaatctaaacaaagaaactgaaggatcttgcagtaacagaagtgataacagttcagataatctcagactagatatctcaactgcgccgccatcaaacgacagtacattaaccggtggccacccaccgccaccacagacagttggtcgacacttcttcccaccgtcgccagccaccgcaacgacaactactacaacaatgcagttctttcaaaactcatcttcaggacagagtatggttaaagaagagaatagtatcagtaacatgttctgtgcaatggatgaccattctggtttttggccatggcttgatcagcaacagtacaattgaaattggtctacctgttttttttgtttttgtttttaaaaaaatttatattttttttttttgtatttggaattttgatcagaagaacccatgcatgttttcaaaaactggaatctatatcattagctcactttgaaatctgcaaccaaacaccactgaggttttttgtttactttttgagtaaatgagatgtaaaaaaatgggtaatatccattatattatataaaaaataatatcattatggcccaacatttttctgtatggagaaaaataaaataaattgtat

SEQ ID NO: 105440 - protein, 294 aa, Arabidopsis thaliana; identical to SEQ ID NO: 26506
  peptide (1)..(294): Ceres Seq. ID no. 13617244
  misc_feature (85)..(139): Pfam Name: Homeobox domain Pfam Description: Homeobox domain
  misc_feature (1)..(294): Homolog of NCBI NO: 15222452 NR Description: homeobox-leucine zipper protein ATHB-13 (HD-Zip
  misc_feature (7)..(294): Homolog of NCBI NO: 21555784 NR Description: homeobox gene 13 protein [Arabidopsis thaliana]
  misc_feature (1)..(294): Homolog of NCBI NO: 7446247 NR Description: homeotic protein - common sunflower
  misc_feature (1)..(241): Homolog of NCBI NO: 18396130 NR Description: homeobox-leucine zipper protein. putative
  misc_feature (1)..(241): Homolog of NCBI NO: 25386233 NR Description: hypothetical protein T2P11.15 - Arabidopsis
  misc_feature (2)..(292): Homolog of NCBI NO: 7446243 NR Description: homeotic protein - carrot
  misc_feature (41)..(294): Homolog of NCBI NO: 1435022 NR Description: DNA-binding protein [Daucus carota]
  misc_feature (24)..(222): Homolog of NCBI NO: 19071644 NR Description: putative DNA-binding protein [Oryza sativa
  misc_feature (85)..(282): Homolog of NCBI NO: 6175248 NR Description: jasmonic acid 1 [Lycopersicon esculentum]
  misc_feature (7)..(294): Homolog of NCBI NO: 30685207 NR Description: Homeobox-leucine zipper protein HAT7 (HD-ZIP

SEQ ID NO: 105441 - protein, 288 aa, Arabidopsis thaliana; identical to SEQ ID NO: 26507
  peptide (1)..(288): Ceres Seq. ID no. 13617245
  misc_feature (79)..(133): Pfam Name: Homeobox domain Pfam Description: Homeobox domain
  misc_feature (1)..(288): Homolog of NCBI NO: 15222452 NR Description: homeobox-leucine zipper protein ATHB-13 (HD-Zip
  misc_feature (1)..(288): Homolog of NCBI NO: 21555784 NR Description: homeobox gene 13 protein [Arabidopsis thaliana]
  misc_feature (1)..(288): Homolog of NCBI NO: 7446247 NR Description: homeotic protein - common sunflower
  misc_feature (1)..(235): Homolog of NCBI NO: 18396130 NR Description: homeobox-leucine zipper protein. putative
  misc_feature (1)..(235): Homolog of NCBI NO: 25386233 NR Description: hypothetical protein T2P11.15 - Arabidopsis
  misc_feature (1)..(286): Homolog of NCBI NO: 7446243 NR Description: homeotic protein - carrot
  misc_feature (35)..(288): Homolog of NCBI NO: 1435022 NR Description: DNA-binding protein [Daucus carota]
  misc_feature (18)..(216): Homolog of NCBI NO: 19071644 NR Description: putative DNA-binding protein [Oryza sativa
  misc_feature (79)..(276): Homolog of NCBI NO: 6175248 NR Description: jasmonic acid 1 [Lycopersicon esculentum]
  misc_feature (1)..(288): Homolog of NCBI NO: 30685207 NR Description: Homeobox-leucine zipper protein HAT7 (HD-ZIP

SEQ ID NO: 105442 - protein, 280 aa, Arabidopsis thaliana; identical to SEQ ID NO: 26508
  peptide (1)..(280): Ceres Seq. ID no. 13617246
  misc_feature (71)..(125): Pfam Name: Homeobox domain Pfam Description: Homeobox domain
  misc_feature (1)..(280): Homolog of NCBI NO: 15222452 NR Description: homeobox-leucine zipper protein ATHB-13 (HD-Zip
  misc_feature (1)..(280): Homolog of NCBI NO: 21555784 NR Description: homeobox gene 13 protein [Arabidopsis thaliana]
  misc_feature (1)..(280): Homolog of NCBI NO: 7446247 NR Description: homeotic protein - common sunflower
  misc_feature (1)..(227): Homolog of NCBI NO: 18396130 NR Description: homeobox-leucine zipper protein. putative
  misc_feature (1)..(227): Homolog of NCBI NO: 25386233 NR Description: hypothetical protein T2P11.15 - Arabidopsis
  misc_feature (1)..(278): Homolog of NCBI NO: 7446243 NR Description: homeotic protein - carrot
  misc_feature (27)..(280): Homolog of NCBI NO: 1435022 NR Description: DNA-binding protein [Daucus carota]
  misc_feature (10)..(208): Homolog of NCBI NO: 19071644 NR Description: putative DNA-binding protein [Oryza sativa
  misc_feature (71)..(268): Homolog of NCBI NO: 6175248 NR Description: jasmonic acid 1 [Lycopersicon esculentum]
  misc_feature (1)..(280): Homolog of NCBI NO: 30685207 NR Description: Homeobox-leucine zipper protein HAT7 (HD-ZIP

SEQ ID NO: 105443 - DNA, 2167 bp, Arabidopsis thaliana
  misc_feature (1)..(2167): Ceres Seq. ID no. 13617247
  misc_feature: MA Experiment ID: 108461 Result: Down-regulated in Transcription
  misc_feature: MA Experiment 108461 PARAMETER Experiment Name: At_Germinating_Seeds_cDNA_P Parameter: Age (day) Value: 1 vs. 0
  misc_feature: MA Experiment 108461 PARAMETER Experiment Name: At_Germinating_Seeds_cDNA_P Parameter: Tissue Value: Germinating Seeds
  misc_feature: MA Experiment ID: 108488 Result: Down-regulated in Transcription
  misc_feature: MA Experiment ID: 108573 Result: Up-regulated in Transcription
  misc_feature: MA Experiment 108573 PARAMETER Experiment Name: At_Drought_cDNA_P Parameter: Timepoint (hr) Value: 6
  misc_feature: MA Experiment 108573 PARAMETER Experiment Name: At_Drought_cDNA_P Parameter: Tissue Value: Aerial
  misc_feature: MA Experiment 108573 PARAMETER Experiment Name: At_Drought_cDNA_P Parameter: Treatment Value: Drought vs. No Drought
  misc_feature: MA Experiment ID: 108574 Result: Up-regulated in Transcription
  misc_feature: MA Experiment 108574 PARAMETER Experiment Name: At_Wounding__cDNA_P Parameter: Timepoint (hr) Value: 1
  misc_feature: MA Experiment 108574 PARAMETER Experiment Name: At_Wounding__cDNA_P Parameter: Tissue Value: Aerial
  misc_feature: MA Experiment 108574 PARAMETER Experiment Name: At_Wounding__cDNA_P Parameter: Treatment Value: Wounding vs. No Wounding
  misc_feature: MA Experiment ID: 108577 Result: Down-regulated in Transcription
  misc_feature: MA Experiment 108577 PARAMETER Experiment Name: At_42deg_Heat_cDNA_P Parameter: Temperature (deg C) Value: 42 vs. 22
  misc_feature: MA Experiment 108577 PARAMETER Experiment Name: At_42deg_Heat_cDNA_P Parameter: Timepoint (hr) Value: 6
  misc_feature: MA Experiment 108577 PARAMETER Experiment Name: At_42deg_Heat_cDNA_P Parameter: Tissue Value: Aerial
  misc_feature: MA Experiment ID: 108579 Result: Up-regulated in Transcription
  misc_feature: MA Experiment 108579 PARAMETER Experiment Name: At_4deg_Cold_cDNA_P Parameter: Temperature (deg C) Value: 4 vs. 22
  misc_feature: MA Experiment 108579 PARAMETER Experiment Name: At_4deg_Cold_cDNA_P Parameter: Timepoint (hr) Value: 6
  misc_feature: MA Experiment 108579 PARAMETER Experiment Name: At_4deg_Cold_cDNA_P Parameter: Tissue Value: Aerial
  misc_feature: MA Experiment ID: 108585 Result: Up-regulated in Transcription
  misc_feature: MA Experiment 108585 PARAMETER Experiment Name: At_5mM_NaNP_cDNA_P Parameter: Timepoint (hr) Value: 6
  misc_feature: MA Experiment 108585 PARAMETER Experiment Name: At_5mM_NaNP_cDNA_P Parameter: Tissue Value: Aerial
  misc_feature: MA Experiment 108585 PARAMETER Experiment Name: At_5mM_NaNP_cDNA_P Parameter: Treatment Value: null
  misc_feature: MA Experiment ID: 20000069 Result: Up-regulated in Transcription
  misc_feature: MA Experiment 20000069 PARAMETER Experiment Name: At_100uM_ABA_Mutants_cDNA_P Parameter: Plant Line Value: CS23
  misc_feature: MA Experiment 20000069 PARAMETER Experiment Name: At_100uM_ABA_Mutants_cDNA_P Parameter: Timepoint (hr) Value: 6
  misc_feature: MA Experiment 20000069 PARAMETER Experiment Name: At_100uM_ABA_Mutants_cDNA_P Parameter: Tissue Value: Aerial
  misc_feature: MA Experiment 20000069 PARAMETER Experiment Name: At_100uM_ABA_Mutants_cDNA_P Parameter: Treatment Value: 100uM ABA vs. No Treatment
  misc_feature: MA Experiment ID: 20000070 Result: Up-regulated in Transcription
  misc_feature: MA Experiment 20000070 PARAMETER Experiment Name: At_100uM_ABA_Mutants_cDNA_P Parameter: Plant Line Value: CS24
  misc_feature: MA Experiment 20000070 PARAMETER Experiment Name: At_100uM_ABA_Mutants_cDNA_P Parameter: Timepoint (hr) Value: 6
  misc_feature: MA Experiment 20000070 PARAMETER Experiment Name: At_100uM_ABA_Mutants_cDNA_P Parameter: Tissue Value: Aerial
  misc_feature: MA Experiment 20000070 PARAMETER Experiment Name: At_100uM_ABA_Mutants_cDNA_P Parameter: Treatment Value: 100uM ABA vs. No Treatment
  misc_feature: MA Experiment ID: 20000071 Result: Up-regulated in Transcription
  misc_feature: MA Experiment 20000071 PARAMETER Experiment Name: At_100uM_ABA_Mutants_cDNA_P Parameter: Plant Line Value: CS8104
  misc_feature: MA Experiment 20000071 PARAMETER Experiment Name: At_100uM_ABA_Mutants_cDNA_P Parameter: Timepoint (hr) Value: 6
  misc_feature: MA Experiment 20000071 PARAMETER Experiment Name: At_100uM_ABA_Mutants_cDNA_P Parameter: Tissue Value: Aerial
  misc_feature: MA Experiment 20000071 PARAMETER Experiment Name: At_100uM_ABA_Mutants_cDNA_P Parameter: Treatment Value: 100uM ABA vs. No Treatment
  misc_feature: MA Experiment ID: 20000089 Result: Up-regulated in Transcription
  misc_feature: MA Experiment ID: 20000112 Result: Down-regulated in Transcription
  misc_feature: MA Experiment 20000112 PARAMETER Experiment Name: At_42deg_Heat_cDNA_P Parameter: Temperature (deg C) Value: 42 vs. 22
  misc_feature: MA Experiment 20000112 PARAMETER Experiment Name: At_42deg_Heat_cDNA_P Parameter: Timepoint (hr) Value: 2
  misc_feature: MA Experiment 20000112 PARAMETER Experiment Name: At_42deg_Heat_cDNA_P Parameter: Tissue Value: Aerial
  misc_feature: MA Experiment ID: 20000166 Result: Up-regulated in Transcription
  misc_feature: MA Experiment 20000166 PARAMETER Experiment Name: At_100uM_ABA_P Parameter: Age (day) Value: 14
  misc_feature: MA Experiment 20000166 PARAMETER Experiment Name: At_100uM_ABA_P Parameter: Organism Value: A. thaliana
  misc_feature: MA Experiment 20000166 PARAMETER Experiment Name: At_100uM_ABA_P Parameter: Plant Line Value: WS
  misc_feature: MA Experiment 20000166 PARAMETER Experiment Name: At_100uM_ABA_P Parameter: Timepoint (hr) Value: 1
  misc_feature: MA Experiment 20000166 PARAMETER Experiment Name: At_100uM_ABA_P Parameter: Tissue Value: Aerial
  misc_feature: MA Experiment 20000166 PARAMETER Experiment Name: At_100uM_ABA_P Parameter: Treatment Value: 100uM ABA vs. No Treatment
  misc_feature: MA Experiment ID: 20000171 Result: Down-regulated in Transcription
  misc_feature: MA Experiment 20000171 PARAMETER Experiment Name: At_42deg_Heat_P Parameter: Age (day) Value: 14
  misc_feature: MA Experiment 20000171 PARAMETER Experiment Name: At_42deg_Heat_P Parameter: Organism Value: A. thaliana
  misc_feature: MA Experiment 20000171 PARAMETER Experiment Name: At_42deg_Heat_P Parameter: Plant Line Value: WS
  misc_feature: MA Experiment 20000171 PARAMETER Experiment Name: At_42deg_Heat_P Parameter: Temperature (deg C) Value: 42 vs. 22
  misc_feature: MA Experiment 20000171 PARAMETER Experiment Name: At_42deg_Heat_P Parameter: Timepoint (hr) Value: 1
  misc_feature: MA Experiment 20000171 PARAMETER Experiment Name: At_42deg_Heat_P Parameter: Tissue Value: Aerial
  misc_feature: MA Experiment ID: 20000173 Result: Down-regulated in Transcription
  misc_feature: MA Experiment 20000173 PARAMETER Experiment Name: At_42deg_Heat_P Parameter: Age (day) Value: 14
  misc_feature: MA Experiment 20000173 PARAMETER Experiment Name: At_42deg_Heat_P Parameter: Organism Value: A. thaliana
  misc_feature: MA Experiment 20000173 PARAMETER Experiment Name: At_42deg_Heat_P Parameter: Plant Line Value: WS
  misc_feature: MA Experiment 20000173 PARAMETER Experiment Name: At_42deg_Heat_P Parameter: Temperature (deg C) Value: 42 vs. 22
  misc_feature: MA Experiment 20000173 PARAMETER Experiment Name: At_42deg_Heat_P Parameter: Timepoint (hr) Value: 6
  misc_feature: MA Experiment 20000173 PARAMETER Experiment Name: At_42deg_Heat_P Parameter: Tissue Value: Aerial
  misc_feature: MA Experiment ID: 20000180 Result: Down-regulated in Transcription
  misc_feature: MA Experiment 20000180 PARAMETER Experiment Name: At_Germinating_Seeds_P Parameter: Age (hr) Value: 24 vs. 0
  misc_feature: MA Experiment 20000180 PARAMETER Experiment Name: At_Germinating_Seeds_P Parameter: Tissue Value: Germinating Seeds
  misc_feature: MA Experiment ID: 20000184 Result: Down-regulated in Transcription
  misc_feature: MA Experiment 20000184 PARAMETER Experiment Name: At_Shoots__P Parameter: Age (day) Value: 7
  misc_feature: MA Experiment 20000184 PARAMETER Experiment Name: At_Shoots__P Parameter: Tissue Value: Shoots vs. Whole Plant
  misc_feature: MA Experiment ID: 20000185 Result: Down-regulated in Transcription
  misc_feature: MA Experiment 20000185 PARAMETER Experiment Name: At_Roots__P Parameter: Age (day) Value: 7 vs. 21
  misc_feature: MA Experiment 20000185 PARAMETER Experiment Name: At_Roots__P Parameter: Organism Value: A. thaliana
  misc_feature: MA Experiment 20000185 PARAMETER Experiment Name: At_Roots__P Parameter: Tissue Value: Roots vs. Whole Plant
  misc_feature: MA Experiment ID: 20000213 Result: Up-regulated in Transcription
  misc_feature: MA Experiment 20000213 PARAMETER Experiment Name: At_4deg_Cold_P Parameter: Timepoint (hr) Value: 2
  misc_feature: MA Experiment ID: 20000234 Result: Down-regulated in Transcription
  misc_feature: MA Experiment 20000234 PARAMETER Experiment Name: At_Siliques_P Parameter: Age (day) Value: 21
  misc_feature: MA Experiment 20000234 PARAMETER Experiment Name: At_Siliques_P Parameter: Organism Value: A. thaliana
  misc_feature: MA Experiment 20000234 PARAMETER Experiment Name: At_Siliques_P Parameter: Plant Line Value: WS
  misc_feature: MA Experiment 20000234 PARAMETER Experiment Name: At_Siliques_P Parameter: Tissue Value: Less Than 5mm Siliques vs. Whole Plant
  misc_feature: MA Experiment ID: 20000308 Result: Up-regulated in Transcription
  misc_feature: MA Experiment 20000308 PARAMETER Experiment Name: At_100mM_NaCl__P Parameter: Age (day) Value: 17
  misc_feature: MA Experiment 20000308 PARAMETER Experiment Name: At_100mM_NaCl__P Parameter: Organism Value: A. thaliana
  misc_feature: MA Experiment 20000308 PARAMETER Experiment Name: At_100mM_NaCl__P Parameter: Plant Line Value: WS
  misc_feature: MA Experiment 20000308 PARAMETER Experiment Name: At_100mM_NaCl__P Parameter: Timepoint (hr) Value: 72
  misc_feature: MA Experiment 20000308 PARAMETER Experiment Name: At_100mM_NaCl__P Parameter: Tissue Value: Whole Plant
  misc_feature: MA Experiment 20000308 PARAMETER Experiment Name: At_100mM_NaCl__P Parameter: Treatment Value: 100mM NaCl vs. No Treatment
  misc_feature: MA Experiment ID: 20000437 Result: Up-regulated in Transcription
  misc_feature: MA Experiment 20000437 PARAMETER Experiment Name: At_Drought_P Parameter: Age (day) Value: 8
  misc_feature: MA Experiment 20000437 PARAMETER Experiment Name: At_Drought_P Parameter: Organism Value: A. thaliana
  misc_feature: MA Experiment 20000437 PARAMETER Experiment Name: At_Drought_P Parameter: Plant Line Value: WS
  misc_feature: MA Experiment 20000437 PARAMETER Experiment Name: At_Drought_P Parameter: Timepoint (hr) Value: 24
  misc_feature: MA Experiment 20000437 PARAMETER Experiment Name: At_Drought_P Parameter: Tissue Value: Whole Plant
  misc_feature: MA Experiment 20000437 PARAMETER Experiment Name: At_Drought_P Parameter: Treatment Value: Drought vs. No Drought
  misc_feature: MA Experiment ID: 20000438 Result: Down-regulated in Transcription
  misc_feature: MA Experiment 20000438 PARAMETER Experiment Name: At_Shoots__P Parameter: Age (day) Value: 14
  misc_feature: MA Experiment 20000438 PARAMETER Experiment Name: At_Shoots__P Parameter: Tissue Value: Shoots vs. Whole Plant
  misc_feature: MA Experiment ID: 20000439 Result: Down-regulated in Transcription
  misc_feature: MA Experiment 20000439 PARAMETER Experiment Name: At_Roots__P Parameter: Age (day) Value: 14 vs. 21
  misc_feature: MA Experiment 20000439 PARAMETER Experiment Name: At_Roots__P Parameter: Organism Value: A. thaliana
  misc_feature: MA Experiment 20000439 PARAMETER Experiment Name: At_Roots__P Parameter: Tissue Value: Roots vs. Whole Plant
  misc_feature: MA Experiment ID: 20000495 Result: Down-regulated in Transcription
  misc_feature: MA Experiment 20000495 PARAMETER Experiment Name: At_Guard_Cells_P Parameter: Harvest Date Value: 8/2/2002
  misc_feature: MA Experiment 20000495 PARAMETER Experiment Name: At_Guard_Cells_P Parameter: Organism Value: A. thaliana
  misc_feature: MA Experiment 20000495 PARAMETER Experiment Name: At_Guard_Cells_P Parameter: Tissue Value: Guard Cells vs. Leaves
  misc_feature: MA Experiment ID: 20000574 Result: Up-regulated in Transcription
  misc_feature: MA Experiment 20000574 PARAMETER Experiment Name: At_100uM_ABA_Mutants__P Parameter: Organism Value: A. thaliana
  misc_feature: MA Experiment 20000574 PARAMETER Experiment Name: At_100uM_ABA_Mutants__P Parameter: Plant Line Value: CS23 vs. Ler wt
  misc_feature: MA Experiment 20000574 PARAMETER Experiment Name: At_100uM_ABA_Mutants__P Parameter: Timepoint (hr) Value: N/A
  misc_feature: MA Experiment 20000574 PARAMETER Experiment Name: At_100uM_ABA_Mutants__P Parameter: Tissue Value: Whole Plant
  misc_feature: MA Experiment 20000574 PARAMETER Experiment Name: At_100uM_ABA_Mutants__P Parameter: Treatment Value: None
  misc_feature: MA Experiment ID: 20000794 Result: Up-regulated in Transcription
  misc_feature: MA Experiment 20000794 PARAMETER Experiment Name: At_Petals_P Parameter: Age (day) Value: 23-25 days
  misc_feature: MA Experiment 20000794 PARAMETER Experiment Name: At_Petals_P Parameter: Plant Line Value: WS
  misc_feature: MA Experiment 20000794 PARAMETER Experiment Name: At_Petals_P Parameter: Tissue Value: Petals vs. Whole plant
  misc_feature: MA Experiment ID: 20001451 Result: Down-regulated in Transcription
  misc_feature: MA Experiment 20001451 PARAMETER Experiment Name: At_Far-red-induction_P Parameter: Age (day) Value: 7
  misc_feature: MA Experiment 20001451 PARAMETER Experiment Name: At_Far-red-induction_P Parameter: Light Value: Far-red vs. White
  misc_feature: MA Experiment 20001451 PARAMETER Experiment Name: At_Far-red-induction_P Parameter: Organism Value: A. thaliana
  misc_feature: MA Experiment 20001451 PARAMETER Experiment Name: At_Far-red-induction_P Parameter: Plant Line Value: Columbia
  misc_feature: MA Experiment 20001451 PARAMETER Experiment Name: At_Far-red-induction_P Parameter: Timepoint (hr) Value: 24
  misc_feature: MA Experiment 20001451 PARAMETER Experiment Name: At_Far-red-induction_P Parameter: Tissue Value: Whole Plant
  misc_feature: MA Experiment ID: 20001557 Result: Up-regulated in Transcription
  misc_feature: MA Experiment 20001557 PARAMETER Experiment Name: At_Drought_Soil_Dry_P Parameter: Age (day) Value: 27
  misc_feature: MA Experiment 20001557 PARAMETER Experiment Name: At_Drought_Soil_Dry_P Parameter: Organism Value: A. thaliana
  misc_feature: MA Experiment 20001557 PARAMETER Experiment Name: At_Drought_Soil_Dry_P Parameter: Plant Line Value: WS
  misc_feature: MA Experiment 20001557 PARAMETER Experiment Name: At_Drought_Soil_Dry_P Parameter: Post Timepoint (hr) Value: 3
  misc_feature: MA Experiment 20001557 PARAMETER Experiment Name: At_Drought_Soil_Dry_P Parameter: Post-Treatment Value: Re-Water vs. No Drought
  misc_feature: MA Experiment 20001557 PARAMETER Experiment Name: At_Drought_Soil_Dry_P Parameter: Timepoint (day) Value: 13
  misc_feature: MA Experiment 20001557 PARAMETER Experiment Name: At_Drought_Soil_Dry_P Parameter: Treatment Value: Drought vs. No Drought
  misc_feature: MA Experiment ID: 20001906 Result: Up-regulated in Transcription
  misc_feature: MA Experiment 20001906 PARAMETER Experiment Name: At_Drought_Reproduction_P Parameter: Age (day) Value: 35
  misc_feature: MA Experiment 20001906 PARAMETER Experiment Name: At_Drought_Reproduction_P Parameter: Organism Value: A. thaliana
  misc_feature: MA Experiment 20001906 PARAMETER Experiment Name: At_Drought_Reproduction_P Parameter: Plant Line Value: WS
  misc_feature: MA Experiment 20001906 PARAMETER Experiment Name: At_Drought_Reproduction_P Parameter: Timepoint (day) Value: 5
  misc_feature: MA Experiment 20001906 PARAMETER Experiment Name: At_Drought_Reproduction_P Parameter: Tissue Value: Siliques
  misc_feature: MA Experiment 20001906 PARAMETER Experiment Name: At_Drought_Reproduction_P Parameter: Treatment Value: Drought vs. No Drought
actacacccaaaaaagcttctaacaaagagaaagtgtctgtatgttgtgcccactctctacatttatcaatcacttcatgtgtgttaccttgattgcaaaaaagtgagaatatattctcacaacattaaatccaccccgaaatcgaagtgagtatatcacgagtgtagtaatatcttagagatggttttggaggatagaaaggacggttcttctttgccgggacgatccggtagtttctctaaatcgtcaccgtcggagttggatgttgttgatccctacaagcggataagttcgccgggatctatattggatgctgagaaggtagagaaaaagcctggaggatggagagccgtctcgttcattttaggaaatgagacgctggagagactgggatcgataggattgttggcaaacttcatggtttatctaaccaaagtgtttcacttagaacaagtcgacgctgcaaatgtcatcaacatttggtcaggtttcaccaatctcactcctctcgtcggagcgtatatctcagacacttatgttggccgcttcaagaccatcgctttcgcctcattcgccactctcctcggactaataacaattacactcacagcatcgtttcctcaactccacccagcatcatgcaacagccaggacccactcagttgcggcggtccgaataagctccagatcggagttttgctattgggactctgtttcctctccgtagggagtggaggaatacgaccttgtagcatcccttttggggttgatcagtttgaccaacgaactgaggaaggggttaaaggagtggccagtttcttcaactggtattacatgactttcactgtggttctgatcattacacagaccgtagttgtgtatatccaggatcaagtcagttggattatcggttttagtatccctaccggactcatggctcttgcggttgttatgttttttgccggaatgaagcgttatgtctacgttaaaccagaaggaagtatattctctgggatcgctcaagttatcgtggcagctcgtaagaagcgaaagctgaaacttccggcggaagatgacggcactgtcacctattacgacccagccatcaagtctagcgtgttatccaagttacaccgcagtaaccaattcaggtgtcttgacaaagccgcggtggttatagaaggtgacctaacacccgagggacctcccgcagacaagtggcggttatgcagcgtccaagaagtggaagaagtgaagtgtttgatccgaattgttcctatctggtcggccggaataatctcactcgcggccatgacaacacaaggcactttcacggtctctcaagctttgaaaatggatcgaaacttaggtcctaaattcgagattccggctggttcactctccgtcatctctctcctcacaatcggcatctttcttcccttctacgaccgcgtttttgtaccattcatgcggcgaatcaccggccataaatccggaatcacactcctccaaaggataggaacagggatcgttttcgcgatcttttctatgatcgttgcgggcattgtggagcgtatgagacgcatacgctccatcaatgccggagatccaacgggaatgactccaatgtcggtgttttggctttcgccgcagctaattctcatgggactatgtgaagcattcaatatcatcggacaaattgagttcttcaacagtcagtttccagagcacatgagaagtatcgctaactctctcttctctttatcgttcgccggttcgagctaccttagtagtttccttgtgactgtcgttcataaattctccggtgggcatgatcgtccggattggctaaacaagaatctcaacgcgggaaaattggattacttctattatctgattgcggttttgggtgtggttaatctggtttacttttggtattgtgctcggggataccggtacaaggtcggtttaccgattgaagactttgaggaggacaagtcctccgatgatgttgagatgacttcgaagaaatcgatgaaatgatttaatagactatccttagggacaacaagaagattgtcgatgttgtttgaataattactatgacaatgtatgtatcataatatgtaagaactagaatatttaataaaattttacctttcatta

SEQ ID NO: 105444 - protein, 620 aa, Arabidopsis thaliana; identical to SEQ ID NO: 35261
  peptide (1)..(620): Ceres Seq. ID no. 13617248
  misc_feature (137)..(530): Pfam Name: POT family Pfam Description: POT family
  misc_feature (59)..(612): Homolog of NCBI NO: 25403285 NR Description: protein T7N9.14 [imported] - Arabidopsis thaliana
  misc_feature (89)..(612): Homolog of NCBI NO: 15223425 NR Description: peptide transporter -related [Arabidopsis
  misc_feature (24)..(594): Homolog of NCBI NO: 15241927 NR Description: peptide transporter [Arabidopsis thaliana]

SEQ ID NO: 105445 - protein, 541 aa, Arabidopsis thaliana; identical to SEQ ID NO: 35262
  peptide (1)..(541): Ceres Seq. ID no. 13617249
  misc_feature (58)..(451): Pfam Name: POT family Pfam Description: POT family
  misc_feature (1)..(533): Homolog of NCBI NO: 25403285 NR Description: protein T7N9.14 [imported] - Arabidopsis thaliana
  misc_feature (10)..(533): Homolog of NCBI NO: 15223425 NR Description: peptide transporter -related [Arabidopsis
  misc_feature (1)..(515): Homolog of NCBI NO: 15241927 NR Description: peptide transporter [Arabidopsis thaliana]

SEQ ID NO: 105446 - protein, 402 aa, Arabidopsis thaliana; identical to SEQ ID NO: 35263
  peptide (1)..(402): Ceres Seq. ID no. 13617250
  misc_feature (1)..(312): Pfam Name: POT family Pfam Description: POT family
  misc_feature (1)..(394): Homolog of NCBI NO: 25403285 NR Description: protein T7N9.14 [imported] - Arabidopsis thaliana
  misc_feature (1)..(394): Homolog of NCBI NO: 15223425 NR Description: peptide transporter -related [Arabidopsis
  misc_feature (1)..(376): Homolog of NCBI NO: 15241927 NR Description: peptide transporter [Arabidopsis thaliana]

SEQ ID NO: 105447 - DNA, 1217 bp, Arabidopsis thaliana
  misc_feature (1)..(1217): Ceres Seq. ID no. 13617263
  misc_feature: MA Experiment ID: 108434 Result: Down-regulated in Transcription
  misc_feature: MA Experiment 108434 PARAMETER Experiment Name: At_Root_Tips_cDNA_P Parameter: Tissue Value: Root Tips
  misc_feature: MA Experiment ID: 108435 Result: Down-regulated in Transcription
  misc_feature: MA Experiment 108435 PARAMETER Experiment Name: At_stm_Mutants_cDNA_P Parameter: Plant Line Value: wt Landsburg vs stm
  misc_feature: MA Experiment 108435 PARAMETER Experiment Name: At_stm_Mutants_cDNA_P Parameter: Tissue Value: Shoot Apical Meristem Region
  misc_feature: MA Experiment ID: 108488 Result: Up-regulated in Transcription
  misc_feature: MA Experiment ID: 108595 Result: Down-regulated in Transcription
  misc_feature: MA Experiment 108595 PARAMETER Experiment Name: At_Ler-pi_Ovule_cDNA_P Parameter: Plant Line Value: null
  misc_feature: MA Experiment ID: 20000069 Result: Down-regulated in Transcription
  misc_feature: MA Experiment 20000069 PARAMETER Experiment Name: At_100uM_ABA_Mutants_cDNA_P Parameter: Plant Line Value: CS23
  misc_feature: MA Experiment 20000069 PARAMETER Experiment Name: At_100uM_ABA_Mutants_cDNA_P Parameter: Timepoint (hr) Value: 6
  misc_feature: MA Experiment 20000069 PARAMETER Experiment Name: At_100uM_ABA_Mutants_cDNA_P Parameter: Tissue Value: Aerial
  misc_feature: MA Experiment 20000069 PARAMETER Experiment Name: At_100uM_ABA_Mutants_cDNA_P Parameter: Treatment Value: 100uM ABA vs. No Treatment
  misc_feature: MA Experiment ID: 20000070 Result: Down-regulated in Transcription
  misc_feature: MA Experiment 20000070 PARAMETER Experiment Name: At_100uM_ABA_Mutants_cDNA_P Parameter: Plant Line Value: CS24
  misc_feature: MA Experiment 20000070 PARAMETER Experiment Name: At_100uM_ABA_Mutants_cDNA_P Parameter: Timepoint (hr) Value: 6
  misc_feature: MA Experiment 20000070 PARAMETER Experiment Name: At_100uM_ABA_Mutants_cDNA_P Parameter: Tissue Value: Aerial
  misc_feature: MA Experiment 20000070 PARAMETER Experiment Name: At_100uM_ABA_Mutants_cDNA_P Parameter: Treatment Value: 100uM ABA vs. No Treatment
  misc_feature: MA Experiment ID: 20000071 Result: Down-regulated in Transcription
  misc_feature: MA Experiment 20000071 PARAMETER Experiment Name: At_100uM_ABA_Mutants_cDNA_P Parameter: Plant Line Value: CS8104
  misc_feature: MA Experiment 20000071 PARAMETER Experiment Name: At_100uM_ABA_Mutants_cDNA_P Parameter: Timepoint (hr) Value: 6
  misc_feature: MA Experiment 20000071 PARAMETER Experiment Name: At_100uM_ABA_Mutants_cDNA_P Parameter: Tissue Value: Aerial
  misc_feature: MA Experiment 20000071 PARAMETER Experiment Name: At_100uM_ABA_Mutants_cDNA_P Parameter: Treatment Value: 100uM ABA vs. No Treatment
  misc_feature: MA Experiment ID: 20000072 Result: Down-regulated in Transcription
  misc_feature: MA Experiment 20000072 PARAMETER Experiment Name: At_100uM_ABA_Mutants_cDNA_P Parameter: Plant Line Value: CS8105
  misc_feature: MA Experiment 20000072 PARAMETER Experiment Name: At_100uM_ABA_Mutants_cDNA_P Parameter: Timepoint (hr) Value: 6
  misc_feature: MA Experiment 20000072 PARAMETER Experiment Name: At_100uM_ABA_Mutants_cDNA_P Parameter: Tissue Value: Aerial
  misc_feature: MA Experiment 20000072 PARAMETER Experiment Name: At_100uM_ABA_Mutants_cDNA_P Parameter: Treatment Value: 100uM ABA vs. No Treatment
  misc_feature: MA Experiment ID: 20000086 Result: Down-regulated in Transcription
  misc_feature: MA Experiment 20000086 PARAMETER Experiment Name: At_100uM_ABA_Mutants_cDNA_P Parameter: Plant Line Value: CS22
  misc_feature: MA Experiment 20000086 PARAMETER Experiment Name: At_100uM_ABA_Mutants_cDNA_P Parameter: Timepoint (hr) Value: 6
  misc_feature: MA Experiment 20000086 PARAMETER Experiment Name: At_100uM_ABA_Mutants_cDNA_P Parameter: Tissue Value: Aerial
  misc_feature: MA Experiment 20000086 PARAMETER Experiment Name: At_100uM_ABA_Mutants_cDNA_P Parameter: Treatment Value: 100uM ABA vs. No Treatment
  misc_feature: MA Experiment ID: 20000088 Result: Down-regulated in Transcription
  misc_feature: MA Experiment 20000088 PARAMETER Experiment Name: At_100uM_ABA_Mutants_cDNA_P Parameter: Plant Line Value: Landsberg
  misc_feature: MA Experiment 20000088 PARAMETER Experiment Name: At_100uM_ABA_Mutants_cDNA_P Parameter: Timepoint (hr) Value: 6
  misc_feature: MA Experiment 20000088 PARAMETER Experiment Name: At_100uM_ABA_Mutants_cDNA_P Parameter: Tissue Value: Aerial
  misc_feature: MA Experiment 20000088 PARAMETER Experiment Name: At_100uM_ABA_Mutants_cDNA_P Parameter: Treatment Value: 100uM ABA vs. No Treatment
  misc_feature: MA Experiment ID: 20000089 Result: Down-regulated in Transcription
  misc_feature: MA Experiment ID: 20000090 Result: Down-regulated in Transcription
  misc_feature: MA Experiment ID: 20000117 Result: Down-regulated in Transcription
  misc_feature: MA Experiment 20000117 PARAMETER Experiment Name: At_100uM_ABA_Mutants_cDNA_P Parameter: Plant Line Value: Columbia
  misc_feature: MA Experiment 20000117 PARAMETER Experiment Name: At_100uM_ABA_Mutants_cDNA_P Parameter: Timepoint (hr) Value: 6
  misc_feature: MA Experiment 20000117 PARAMETER Experiment Name: At_100uM_ABA_Mutants_cDNA_P Parameter: Tissue Value: Aerial
  misc_feature: MA Experiment 20000117 PARAMETER Experiment Name: At_100uM_ABA_Mutants_cDNA_P Parameter: Treatment Value: 100uM ABA vs. No Treatment
  misc_feature: MA Experiment ID: 20001248 Result: Down-regulated in Transcription
  misc_feature: MA Experiment 20001248 PARAMETER Experiment Name: At_Far-red-induction_P Parameter: Age (day) Value: 7
  misc_feature: MA Experiment 20001248 PARAMETER Experiment Name: At_Far-red-induction_P Parameter: Light Value: Far-red vs. White
  misc_feature: MA Experiment 20001248 PARAMETER Experiment Name: At_Far-red-induction_P Parameter: Organism Value: A. thaliana
  misc_feature: MA Experiment 20001248 PARAMETER Experiment Name: At_Far-red-induction_P Parameter: Plant Line Value: Columbia
  misc_feature: MA Experiment 20001248 PARAMETER Experiment Name: At_Far-red-induction_P Parameter: Timepoint (hr) Value: 4
  misc_feature: MA Experiment 20001248 PARAMETER Experiment Name: At_Far-red-induction_P Parameter: Tissue Value: Whole Plant
  misc_feature: MA Experiment ID: 20001906 Result: Down-regulated in Transcription
  misc_feature: MA Experiment 20001906 PARAMETER Experiment Name: At_Drought_Reproduction_P Parameter: Age (day) Value: 35
  misc_feature: MA Experiment 20001906 PARAMETER Experiment Name: At_Drought_Reproduction_P Parameter: Organism Value: A. thaliana
  misc_feature: MA Experiment 20001906 PARAMETER Experiment Name: At_Drought_Reproduction_P Parameter: Plant Line Value: WS
  misc_feature: MA Experiment 20001906 PARAMETER Experiment Name: At_Drought_Reproduction_P Parameter: Timepoint (day) Value: 5
  misc_feature: MA Experiment 20001906 PARAMETER Experiment Name: At_Drought_Reproduction_P Parameter: Tissue Value: Siliques
  misc_feature: MA Experiment 20001906 PARAMETER Experiment Name: At_Drought_Reproduction_P Parameter: Treatment Value: Drought vs. No Drought
acttatttcaattcccaaaatcctctgcctcatcatcttcaaactgttaccacgtccatagggttgtcgaagagctaggaagagccttaccaagagcttcttcttcccctaacatttaggttggtaggagaagcaaaggaagagatcatttataatggctcctgcattcggaaaatgtttcatgttctgctgcgctaaaacctccccggaaaaagacgaaatggcaacggaatcgtacgaagccgccattaaaggactcaatgatcttctcagtacgaaagcggatctcggaaacgtcgccgccgcgaagatcaaagcgttgacggcggagctaaaggagcttgactcaagcaattcagacgcaattgaacgaatcaagaccggttttactcaattcaaaaccgagaaatatttgaagaatagtactttgttcaatcatcttgccaagactcagaccccaaagtttctggtgtttgcttgctctgattctcgagtttgtccatctcacatcttgaatttccaacctggtgaggcttttgttgtcagaaacatagccaatatggttccaccttttgaccagaagagacactctggagttggcgccgccgttgaatacgcagttgtacatctcaaggtggagaacattttggtgataggccatagctgctgtggtggtattaagggactcatgtccattgaagatgatgctgccccaactcaaagtgacttcattgaaaattgggtgaagataggcgcatcagcgaggaacaagatcaaggaggaacataaagacttgagctacgatgatcaatgcaacaagtgtgagaaggaagctgtgaacgtatcgcttggaaacttgctttcgtacccattcgtgagagctgaggtggtgaagaacacacttgcaataagaggaggtcactacaatttcgtcaaaggaacgtttgatctctgggagctcgatttcaagaccactcctgcttttgccttctcttaagaaagaaagctaccggaacatataaaactcttttgagataaaaaaagacactttgactcatctttcttcattctctcatgttgatgattcctctccaacttctttgatttctttttgttaattcaaaacttcaactttgctgcttctatttcaaaagctcaaacaataaagctgtaaccaacgtttgaaacttctatatttgtctaattgatgtttgaac

SEQ ID NO: 105448 - protein, 280 aa, Arabidopsis thaliana; identical to SEQ ID NO: 24626
  peptide (1)..(280): Ceres Seq. ID no. 13617264
  misc_feature (1)..(280): Homolog of NCBI NO: 15223141 NR Description: carbonic anhydrase -related [Arabidopsis >gi|14334470|gb|AAK59433.1| putative carbonic anhydrase thaliana] >gi|21281000|gb|AAM44970.1| putative carbonic anhydrase
  misc_feature (23)..(280): Homolog of NCBI NO: 30698715 NR Description: carbonic anhydrase -related [Arabidopsis thaliana]
  misc_feature (23)..(280): Homolog of NCBI NO: 15220853 NR Description: carbonic anhydrase -related [Arabidopsis thaliana]
  misc_feature (5)..(270): Homolog of NCBI NO: 27652184 NR Description: carbonic anhydrase 2 [Flaveria bidentis]
  misc_feature (20)..(278): Homolog of NCBI NO: 3061271 NR Description: NPCA1 [Nicotiana paniculata]
  misc_feature (20)..(278): Homolog of NCBI NO: 115473 NR Description: CARBONIC ANHYDRASE, CHLOROPLAST PRECURSOR DEHYDRATASE) >gi|7436813|pir||T02936 carbonate dehydratase (EC
  misc_feature (20)..(278): Homolog of NCBI NO: 7436815 NR Description: carbonate dehydratase (EC 4.2.1.1), chloroplast -
  misc_feature (23)..(275): Homolog of NCBI NO: 27652186 NR Description: carbonic anhydrase 3 [Flaveria bidentis]
  misc_feature (20)..(278): Homolog of NCBI NO: 22550386 NR Description: beta-carbonic anhydrase [Nicotiana tabacum]
  misc_feature (4)..(275): Homolog of NCBI NO: 30685030 NR Description: CARBONIC ANHYDRASE 2 [Arabidopsis thaliana]

SEQ ID NO: 105449 - protein, 271 aa, Arabidopsis thaliana; identical to SEQ ID NO: 24627
  peptide (1)..(271): Ceres Seq. ID no. 13617265
  misc_feature (1)..(271): Homolog of NCBI NO: 15223141 NR Description: carbonic anhydrase -related [Arabidopsis >gi|14334470|gb|AAK59433.1| putative carbonic anhydrase thaliana] >gi|21281000|gb|AAM44970.1| putative carbonic anhydrase
  misc_feature (14)..(271): Homolog of NCBI NO: 30698715 NR Description: carbonic anhydrase -related [Arabidopsis thaliana]
  misc_feature (14)..(271): Homolog of NCBI NO: 15220853 NR Description: carbonic anhydrase -related [Arabidopsis thaliana]
  misc_feature (1)..(261): Homolog of NCBI NO: 27652184 NR Description: carbonic anhydrase 2 [Flaveria bidentis]
  misc_feature (11)..(269): Homolog of NCBI NO: 3061271 NR Description: NPCA1 [Nicotiana paniculata]
  misc_feature (11)..(269): Homolog of NCBI NO: 115473 NR Description: CARBONIC ANHYDRASE, CHLOROPLAST PRECURSOR DEHYDRATASE) >gi|7436813|pir||T02936 carbonate dehydratase (EC
  misc_feature (11)..(269): Homolog of NCBI NO: 7436815 NR Description: carbonate dehydratase (EC 4.2.1.1), chloroplast -
  misc_feature (14)..(266): Homolog of NCBI NO: 27652186 NR Description: carbonic anhydrase 3 [Flaveria bidentis]
  misc_feature (11)..(269): Homolog of NCBI NO: 22550386 NR Description: beta-carbonic anhydrase [Nicotiana tabacum]
  misc_feature (1)..(266): Homolog of NCBI NO: 30685030 NR Description: CARBONIC ANHYDRASE 2 [Arabidopsis thaliana]

SEQ ID NO: 105450 - protein, 258 aa, Arabidopsis thaliana; identical to SEQ ID NO: 21610
  peptide (1)..(258): Ceres Seq. ID no. 13617266
  misc_feature (1)..(258): Homolog of NCBI NO: 15223141 NR Description: carbonic anhydrase -related [Arabidopsis >gi|14334470|gb|AAK59433.1| putative carbonic anhydrase thaliana] >gi|21281000|gb|AAM44970.1| putative carbonic anhydrase
  misc_feature (1)..(258): Homolog of NCBI NO: 30698715 NR Description: carbonic anhydrase -related [Arabidopsis thaliana]
  misc_feature (1)..(258): Homolog of NCBI NO: 15220853 NR Description: carbonic anhydrase -related [Arabidopsis thaliana]
  misc_feature (1)..(248): Homolog of NCBI NO: 27652184 NR Description: carbonic anhydrase 2 [Flaveria bidentis]
  misc_feature (1)..(256): Homolog of NCBI NO: 3061271 NR Description: NPCA1 [Nicotiana paniculata]
  misc_feature (1)..(256): Homolog of NCBI NO: 115473 NR Description: CARBONIC ANHYDRASE, CHLOROPLAST PRECURSOR DEHYDRATASE) >gi|7436813|pir||T02936 carbonate dehydratase (EC
  misc_feature (1)..(256): Homolog of NCBI NO: 7436815 NR Description: carbonate dehydratase (EC 4.2.1.1), chloroplast -
  misc_feature (1)..(253): Homolog of NCBI NO: 27652186 NR Description: carbonic anhydrase 3 [Flaveria bidentis]
  misc_feature (1)..(256): Homolog of NCBI NO: 22550386 NR Description: beta-carbonic anhydrase [Nicotiana tabacum]
  misc_feature (1)..(253): Homolog of NCBI NO: 30685030 NR Description: CARBONIC ANHYDRASE 2 [Arabidopsis thaliana]

SEQ ID NO: 105451 - DNA, 3673 bp, Arabidopsis thaliana
  misc_feature (1)..(3673): Ceres Seq. ID no. 13617282
  misc_feature: MA Experiment ID: 20000328 Result: Down-regulated in Transcription
  misc_feature: MA Experiment 20000328 PARAMETER Experiment Name: At_42deg_Heat_Sub_P Parameter: Age (day) Value: 14
  misc_feature: MA Experiment 20000328 PARAMETER Experiment Name: At_42deg_Heat_Sub_P Parameter: Organism Value: A. thaliana
  misc_feature: MA Experiment 20000328 PARAMETER Experiment Name: At_42deg_Heat_Sub_P Parameter: Plant Line Value: WS
  misc_feature: MA Experiment 20000328 PARAMETER Experiment Name: At_42deg_Heat_Sub_P Parameter: Temperature (deg C) Value: 42 vs. 22
  misc_feature: MA Experiment 20000328 PARAMETER Experiment Name: At_42deg_Heat_Sub_P Parameter: Timepoint (hr) Value: 6
  misc_feature: MA Experiment 20000328 PARAMETER Experiment Name: At_42deg_Heat_Sub_P Parameter: Tissue Value: Aerial
tgtaggagagttttttttttttttttgttaacggataattttactactgttacattgcatgaacattctactcataaagtaagactatcatccaacaacaaaaacctagatgagatcgaagtcctacaattattcagaagcacaagaaaaagaaaaaaaaaaaaacagaacacgaaagtaagacagaaaaccacgaaatttcgattcaacaaaaacagagcaaataacagaacaagtgaacaacaccgtttatccagtatatcccccgccggttccgtacccggtggcaccaccaccaccaacgtgagtgttatgagcggttgtccgaccagttccagtgttccttccaatcgggtcggtcacagccgtgccctccacaacgcggtcggtcagttgtcccgttccgtgaccaggcagagccgacatctgatgtgtcccagtgccgtgtccgacttgtccagtggtcgagtgagtggccgtccccaaacctaaaccggttccggctccagccgcttctttcatggccgcgttgtgctgacgcgtttctctcttctgcatctcagcttgattgatcttatcttctttaacctgtgtagccatctgtttctgaacagggtctcgtgtcttcatcttctccgccttttcctccaaggtagctttggttttgtccatgccagattttgcagaagctgcaatattcgaagctgtttctttcatcgactgcatttttaccaaatctctctcttttcctttagcgaaattcaaagatgttacaaagatatcttctgattacttttgtttattcggttctcgagaaccgatttaggcgcccaaaagctcaaaaattcattcatgtccaccgttaatcatcactgcctcctcaattttcctcatatcccaccttcaattcctccgaatcatcgtcccaaacttctttcttctctctccctctatcgaaaaccagaacgcctctttgctctctctgcgtctctgtctctttcaccagcaacaatccatgaatgttcttcttcctcatcttcttcttcttcatcgttcgataaagaagaaacggaagacattgaatctgttattgatgggtttttctatctgcttcgattgtctgctcaataccacgacgtcgaggtaacaaaagctgtgcacgcttcgtttcttaagctcagagaagaaaaaacccgtcttggaaatgcccttatctctacttatctcaaacttggtttccctcgtgaagctattctcgtcttcgtgtctctgtcttcgccaacggtggtttcttacacagctcttatctcgggtttctcaaggttaaaccttgaaattgaggctcttaaggttttcttcaggatgagaaaagcaggtcttgttcagccgaatgagtatacttttgtagcgattttgactgcttgcgtgagagtttcccgattctcgcttgggattcagattcatggattgatagttaaatcagggtttttgaattctgtgtttgttagtaattcgctgatgagtttgtatgataaggattctgggtcttcgtgtgatgatgtgcttaagttgttcgatgaaattcctcagagagatgtggcgtcttggaacactgtggtttcgagtttagtgaaagagggcaagtctcataaagctttcgatttgttttatgagatgaatagagtcgaaggatttggagttgatagttttacgctttcaacgcttttgagctcttgtactgattctagtgtcttattgagaggtagagaactccatggtcgtgcaattaggatagggttgatgcaggagttgagtgtgaacaacgctctgattgggttttattctaaattttgggatatgaaaaaggtagagagtttatacgagatgatgatggcgcaagatgctgttactttcacggagatgatcacagcttacatgtcatttggaatggtggattccgctgttgagatattcgcgaatgtaactgaaaaaaacactattacgtataatgcgctcatggctgggttctgtagaaatggccatggcttgaaggcactaaaattattcactgatatgctgcagagaggtgttgagttgacggattttagtttaacaagcgctgttgatgcttgtggtttagtttcagagaagaaagtaagcgaacagattcacgggttttgtattaagtttggaactgctttcaacccttgtatccagactgcattgcttgatatgtgcacaaggtgtgaaaggatggcagatgctgaggagatgtttgaccaatggccttctaatctcgatagctcgaaagcaacgacgtctataatcggtggttacgctcggaatggcttacctgataaggctgtatcgctattccatcgcactctctgtgaacagaagttgtttttagatgaagtttcgttgactttgattcttgcggtctgcgggacattaggttttcgggaaatgggttatcagatccattgctatgctcttaaagctgggtacttttctgatataagcttgggaaattctttgattagcatgtacgcgaaatgttgtgactcagatgatgccataaagattttcaacactatgcgagaacatgatgttatttcttggaacagcttgatttcttgctacatccttcaaagaaatggtgatgaggcactggctctatggtcgaggatgaatgagaaagagatcaagcctgacataatcaccctcactcttgttatttctgcatttcggtatacagagtcaaataagcttagtagctgccgtgatctgtttctctccatgaagactatctatgacattgaaccaacgactgaacattacactgcattcgtccgtgttcttggtcattggggtcttcttgaagaagcggaagacacaataaactcaatgccggttcagcccgaggtctctgttttgagagctctgcttgatagctgcagaatacattcaaacacaagcgttgcgaaacgagtagcaaagcttatactatctacaaagccagaaaccccgtctgagtacatcctcaaatccaacatctactcagcttccggattctggcatcgctctgaaatgataagagaggaaatgcgggaaagaggttaccggaaacatcctgctaaaagctggataatccatgagaacaaaatacattcctttcacgcgcgtgacacatcccacccgcaagagaaagacatatacaggggattggagatactgataatggaatgtctgaaagttggatacgaaccaaacacagagtatgttcttcaggaggttgatgagtttatgaagaagagtttcttgtttcaccacagcgcgaaactcgcagtgacttatggaattctctcgagcaatactcggggcaagccggttcgggttatgaagaacgtaatgctctgtggtgattgccacgagttcttcaagtatatttcagttgtggtaaaaagagagatagttttgagagattcctcagggtttcatcattttgtgaatggcaagtgttcttgtagagatctgtggtgaatcgaccaagacccttagtttttgtaatgttttcttttataaattcgtaagttgttaatacgagagttttggttctgatagctacatagtccattcaaagtttcaaataaaaaagcattgcaaacgcaat

SEQ ID NO: 105452 - protein, 896 aa, Arabidopsis thaliana
  peptide (1)..(896): Ceres Seq. ID no. 13617283
  misc_feature (588)..(622): Pfam Name: PPR repeat Pfam Description: PPR repeat
  misc_feature (115)..(893): Homolog of NCBI NO: 34394447 NR Description: selenium-binding protein-like [Oryza sativa
  misc_feature (357)..(896): Homolog of NCBI NO: 15234006 NR Description: pentatricopeptide (PPR) repeat-containing protein
  misc_feature (114)..(380): Homolog of NCBI NO: 15234006 NR Description: pentatricopeptide (PPR) repeat-containing protein
  misc_feature (343)..(896): Homolog of NCBI NO: 15220337 NR Description: pentatricopeptide (PPR) repeat-containing protein
  misc_feature (120)..(380): Homolog of NCBI NO: 15220337 NR Description: pentatricopeptide (PPR) repeat-containing protein
  misc_feature (96)..(896): Homolog of NCBI NO: 15237421 NR Description: pentatricopeptide (PPR) repeat-containing protein
  misc_feature (350)..(896): Homolog of NCBI NO: 15236324 NR Description: pentatricopeptide (PPR) repeat-containing protein
  misc_feature (100)..(374): Homolog of NCBI NO: 15236324 NR Description: pentatricopeptide (PPR) repeat-containing protein
  misc_feature (319)..(896): Homolog of NCBI NO: 18394615 NR Description: pentatricopeptide (PPR) repeat-containing protein
  misc_feature (69)..(365): Homolog of NCBI NO: 18394615 NR Description: pentatricopeptide (PPR) repeat-containing protein
MSTVNHHCLLNFPHIPPSIPPNHRPKLLSSLSLYRKPERLFALSASLSLSPATIHECSSSSSSSSSSFDKEETEDIESVIDGFFYLLRLSAQYHDVEVTKAVHASFLKLREEKTRLGNALISTYLKLGFPREAILVFVSLSSPTVVSYTALISGFSRLNLEIEALKVFFRMRKAGLVQPNEYTFVAILTACVRVSRFSLGIQIHGLIVKSGFLNSVFVSNSLMSLYDKDSGSSCDDVLKLFDEIPQRDVASWNTVVSSLVKEGKSHKAFDLFYEMNRVEGFGVDSFTLSTLLSSCTDSSVLLRGRELHGRAIRIGLMQELSVNNALIGFYSKFWDMKKVESLYEMMMAQDAVTFTEMITAYMSFGMVDSAVEIFANVTEKNTITYNALMAGFCRNGHGLKALKLFTDMLQRGVELTDFSLTSAVDACGLVSEKKVSEQIHGFCIKFGTAFNPCIQTALLDMCTRCERMADAEEMFDQWPSNLDSSKATTSIIGGYARNGLPDKAVSLFHRTLCEQKLFLDEVSLTLILAVCGTLGFREMGYQIHCYALKAGYFSDISLGNSLISMYAKCCDSDDAIKIFNTMREHDVISWNSLISCYILQRNGDEALALWSRMNEKEIKPDIITLTLVISAFRYTESNKLSSCRDLFLSMKTIYDIEPTTEHYTAFVRVLGHWGLLEEAEDTINSMPVQPEVSVLRALLDSCRIHSNTSVAKRVAKLILSTKPETPSEYILKSNIYSASGFWHRSEMIREEMRERGYRKHPAKSWIIHENKIHSFHARDTSHPQEKDIYRGLEILIMECLKVGYEPNTEYVLQEVDEFMKKSFLFHHSAKLAVTYGILSSNTRGKPVRVMKNVMLCGDCHEFFKYISVVVKREIVLRDSSGFHHFVNGKCSCRDLW

SEQ ID NO: 105453 - protein, 726 aa, Arabidopsis thaliana
  peptide (1)..(726): Ceres Seq. ID no. 13617284
  misc_feature (418)..(452): Pfam Name: PPR repeat Pfam Description: PPR repeat
  misc_feature (1)..(723): Homolog of NCBI NO: 34394447 NR Description: selenium-binding protein-like [Oryza sativa
  misc_feature (187)..(726): Homolog of NCBI NO: 15234006 NR Description: pentatricopeptide (PPR) repeat-containing protein
  misc_feature (1)..(210): Homolog of NCBI NO: 15234006 NR Description: pentatricopeptide (PPR) repeat-containing protein
  misc_feature (173)..(726): Homolog of NCBI NO: 15220337 NR Description: pentatricopeptide (PPR) repeat-containing protein
  misc_feature (1)..(210): Homolog of NCBI NO: 15220337 NR Description: pentatricopeptide (PPR) repeat-containing protein
  misc_feature (1)..(726): Homolog of NCBI NO: 15237421 NR Description: pentatricopeptide (PPR) repeat-containing protein
  misc_feature (180)..(726): Homolog of NCBI NO: 15236324 NR Description: pentatricopeptide (PPR) repeat-containing protein
  misc_feature (1)..(204): Homolog of NCBI NO: 15236324 NR Description: pentatricopeptide (PPR) repeat-containing protein
  misc_feature (149)..(726): Homolog of NCBI NO: 18394615 NR Description: pentatricopeptide (PPR) repeat-containing protein
  misc_feature (1)..(195): Homolog of NCBI NO: 18394615 NR Description: pentatricopeptide (PPR) repeat-containing protein
MRKAGLVQPNEYTFVAILTACVRVSRFSLGIQIHGLIVKSGFLNSVFVSNSLMSLYDKDSGSSCDDVLKLFDEIPQRDVASWNTVVSSLVKEGKSHKAFDLFYEMNRVEGFGVDSFTLSTLLSSCTDSSVLLRGRELHGRAIRIGLMQELSVNNALIGFYSKFWDMKKVESLYEMMMAQDAVTFTEMITAYMSFGMVDSAVEIFANVTEKNTITYNALMAGFCRNGHGLKALKLFTDMLQRGVELTDFSLTSAVDACGLVSEKKVSEQIHGFCIKFGTAFNPCIQTALLDMCTRCERMADAEEMFDQWPSNLDSSKATTSIIGGYARNGLPDKAVSLFHRTLCEQKLFLDEVSLTLILAVCGTLGFREMGYQIHCYALKAGYFSDISLGNSLISMYAKCCDSDDAIKIFNTMREHDVISWNSLISCYILQRNGDEALALWSRMNEKEIKPDIITLTLVISAFRYTESNKLSSCRDLFLSMKTIYDIEPTTEHYTAFVRVLGHWGLLEEAEDTINSMPVQPEVSVLRALLDSCRIHSNTSVAKRVAKLILSTKPETPSEYILKSNIYSASGFWHRSEMIREEMRERGYRKHPAKSWIIHENKIHSFHARDTSHPQEKDIYRGLEILIMECLKVGYEPNTEYVLQEVDEFMKKSFLFHHSAKLAVTYGILSSNTRGKPVRVMKNVMLCGDCHEFFKYISVVVKREIVLRDSSGFHHFVNGKCSCRDLW

SEQ ID NO: 105454 - protein, 674 aa, Arabidopsis thaliana
  peptide (1)..(674): Ceres Seq. ID no. 13617285
  misc_feature (366)..(400): Pfam Name: PPR repeat Pfam Description: PPR repeat
  misc_feature (1)..(671): Homolog of NCBI NO: 34394447 NR Description: selenium-binding protein-like [Oryza sativa
  misc_feature (135)..(674): Homolog of NCBI NO: 15234006 NR Description: pentatricopeptide (PPR) repeat-containing protein
  misc_feature (1)..(158): Homolog of NCBI NO: 15234006 NR Description: pentatricopeptide (PPR) repeat-containing protein
  misc_feature (121)..(674): Homolog of NCBI NO: 15220337 NR Description: pentatricopeptide (PPR) repeat-containing protein
  misc_feature (1)..(158): Homolog of NCBI NO: 15220337 NR Description: pentatricopeptide (PPR) repeat-containing protein
  misc_feature (1)..(674): Homolog of NCBI NO: 15237421 NR Description: pentatricopeptide (PPR) repeat-containing protein
  misc_feature (128)..(674): Homolog of NCBI NO: 15236324 NR Description: pentatricopeptide (PPR) repeat-containing protein
  misc_feature (1)..(152): Homolog of NCBI NO: 15236324 NR Description: pentatricopeptide (PPR) repeat-containing protein
  misc_feature (97)..(674): Homolog of NCBI NO: 18394615 NR Description: pentatricopeptide (PPR) repeat-containing protein
  misc_feature (1)..(143): Homolog of NCBI NO: 18394615 NR Description: pentatricopeptide (PPR) repeat-containing protein
MSLYDKDSGSSCDDVLKLFDEIPQRDVASWNTVVSSLVKEGKSHKAFDLFYEMNRVEGFGVDSFTLSTLLSSCTDSSVLLRGRELHGRAIRIGLMQELSVNNALIGFYSKFWDMKKVESLYEMMMAQDAVTFTEMITAYMSFGMVDSAVEIFANVTEKNTITYNALMAGFCRNGHGLKALKLFTDMLQRGVELTDFSLTSAVDACGLVSEKKVSEQIHGFCIKFGTAFNPCIQTALLDMCTRCERMADAEEMFDQWPSNLDSSKATTSIIGGYARNGLPDKAVSLFHRTLCEQKLFLDEVSLTLILAVCGTLGFREMGYQIHCYALKAGYFSDISLGNSLISMYAKCCDSDDAIKIFNTMREHDVISWNSLISCYILQRNGDEALALWSRMNEKEIKPDIITLTLVISAFRYTESNKLSSCRDLFLSMKTIYDIEPTTEHYTAFVRVLGHWGLLEEAEDTINSMPVQPEVSVLRALLDSCRIHSNTSVAKRVAKLILSTKPETPSEYILKSNIYSASGFWHRSEMIREEMRERGYRKHPAKSWIIHENKIHSFHARDTSHPQEKDIYRGLEILIMECLKVGYEPNTEYVLQEVDEFMKKSFLFHHSAKLAVTYGILSSNTRGKPVRVMKNVMLCGDCHEFFKYISVVVKREIVLRDSSGFHHFVNGKCSCRDLW

SEQ ID NO: 105455 - DNA, 1091 bp, Arabidopsis thaliana
  misc_feature (1)..(1091): Ceres Seq. ID no. 13617301
  misc_feature: MA Experiment ID: 108462 Result: Up-regulated in Transcription
  misc_feature: MA Experiment 108462 PARAMETER Experiment Name: At_Germinating_Seeds_cDNA_P Parameter: Age (day) Value: 2 vs. 0
  misc_feature: MA Experiment 108462 PARAMETER Experiment Name: At_Germinating_Seeds_cDNA_P Parameter: Tissue Value: Germinating Seeds
  misc_feature: MA Experiment ID: 108463 Result: Up-regulated in Transcription
  misc_feature: MA Experiment 108463 PARAMETER Experiment Name: At_Germinating_Seeds_cDNA_P Parameter: Age (day) Value: 3 vs. 0
  misc_feature: MA Experiment 108463 PARAMETER Experiment Name: At_Germinating_Seeds_cDNA_P Parameter: Tissue Value: Germinating Seeds
  misc_feature: MA Experiment ID: 108464 Result: Up-regulated in Transcription
  misc_feature: MA Experiment 108464 PARAMETER Experiment Name: At_Germinating_Seeds_cDNA_P Parameter: Age (day) Value: 4 vs. 0
  misc_feature: MA Experiment 108464 PARAMETER Experiment Name: At_Germinating_Seeds_cDNA_P Parameter: Tissue Value: Germinating Seeds
  misc_feature: MA Experiment ID: 108572 Result: Up-regulated in Transcription
  misc_feature: MA Experiment 108572 PARAMETER Experiment Name: At_Drought_cDNA_P Parameter: Timepoint (hr) Value: 1
  misc_feature: MA Experiment 108572 PARAMETER Experiment Name: At_Drought_cDNA_P Parameter: Tissue Value: Aerial
  misc_feature: MA Experiment 108572 PARAMETER Experiment Name: At_Drought_cDNA_P Parameter: Treatment Value: Drought vs. No Drought
  misc_feature: MA Experiment ID: 108573 Result: Up-regulated in Transcription
  misc_feature: MA Experiment 108573 PARAMETER Experiment Name: At_Drought_cDNA_P Parameter: Timepoint (hr) Value: 6
  misc_feature: MA Experiment 108573 PARAMETER Experiment Name: At_Drought_cDNA_P Parameter: Tissue Value: Aerial
  misc_feature: MA Experiment 108573 PARAMETER Experiment Name: At_Drought_cDNA_P Parameter: Treatment Value: Drought vs. No Drought
  misc_feature: MA Experiment ID: 108576 Result: Down-regulated in Transcription
  misc_feature: MA Experiment 108576 PARAMETER Experiment Name: At_42deg_Heat_cDNA_P Parameter: Temperature (deg C) Value: 42 vs. 22
  misc_feature: MA Experiment 108576 PARAMETER Experiment Name: At_42deg_Heat_cDNA_P Parameter: Timepoint (hr) Value: 1
  misc_feature: MA Experiment 108576 PARAMETER Experiment Name: At_42deg_Heat_cDNA_P Parameter: Tissue Value: Aerial
  misc_feature: MA Experiment ID: 108577 Result: Down-regulated in Transcription
  misc_feature: MA Experiment 108577 PARAMETER Experiment Name: At_42deg_Heat_cDNA_P Parameter: Temperature (deg C) Value: 42 vs. 22
  misc_feature: MA Experiment 108577 PARAMETER Experiment Name: At_42deg_Heat_cDNA_P Parameter: Timepoint (hr) Value: 6
  misc_feature: MA Experiment 108577 PARAMETER Experiment Name: At_42deg_Heat_cDNA_P Parameter: Tissue Value: Aerial
  misc_feature: MA Experiment ID: 108595 Result: Down-regulated in Transcription
  misc_feature: MA Experiment 108595 PARAMETER Experiment Name: At_Ler-pi_Ovule_cDNA_P Parameter: Plant Line Value: null
  misc_feature: MA Experiment ID: 20000111 Result: Down-regulated in Transcription
  misc_feature: MA Experiment 20000111 PARAMETER Experiment Name: At_42deg_Heat_cDNA_P Parameter: Temperature (deg C) Value: 42 vs. 22
  misc_feature: MA Experiment 20000111 PARAMETER Experiment Name: At_42deg_Heat_cDNA_P Parameter: Timepoint (hr) Value: 6
  misc_feature: MA Experiment 20000111 PARAMETER Experiment Name: At_42deg_Heat_cDNA_P Parameter: Tissue Value: Aerial
  misc_feature: MA Experiment ID: 20000112 Result: Down-regulated in Transcription
  misc_feature: MA Experiment 20000112 PARAMETER Experiment Name: At_42deg_Heat_cDNA_P Parameter: Temperature (deg C) Value: 42 vs. 22
  misc_feature: MA Experiment 20000112 PARAMETER Experiment Name: At_42deg_Heat_cDNA_P Parameter: Timepoint (hr) Value: 2
  misc_feature: MA Experiment 20000112 PARAMETER Experiment Name: At_42deg_Heat_cDNA_P Parameter: Tissue Value: Aerial
  misc_feature: MA Experiment ID: 20000113 Result: Down-regulated in Transcription
  misc_feature: MA Experiment 20000113 PARAMETER Experiment Name: At_42deg_Heat_cDNA_P Parameter: Temperature (deg C) Value: 42 vs. 22
  misc_feature: MA Experiment 20000113 PARAMETER Experiment Name: At_42deg_Heat_cDNA_P Parameter: Timepoint (hr) Value: 8
  misc_feature: MA Experiment 20000113 PARAMETER Experiment Name: At_42deg_Heat_cDNA_P Parameter: Tissue Value: Aerial
  misc_feature: MA Experiment ID: 20000144 Result: Down-regulated in Transcription
  misc_feature: MA Experiment 20000144 PARAMETER Experiment Name: At_42deg_Heat_cDNA_P Parameter: Temperature (deg C) Value: 42 vs. 22
  misc_feature: MA Experiment 20000144 PARAMETER Experiment Name: At_42deg_Heat_cDNA_P Parameter: Timepoint (hr) Value: 1
  misc_feature: MA Experiment 20000144 PARAMETER Experiment Name: At_42deg_Heat_cDNA_P Parameter: Tissue Value: Aerial
  misc_feature: MA Experiment ID: 20000185 Result: Down-regulated in Transcription
  misc_feature: MA Experiment 20000185 PARAMETER Experiment Name: At_Roots__P Parameter: Age (day) Value: 7 vs. 21
  misc_feature: MA Experiment 20000185 PARAMETER Experiment Name: At_Roots__P Parameter: Organism Value: A. thaliana
  misc_feature: MA Experiment 20000185 PARAMETER Experiment Name: At_Roots__P Parameter: Tissue Value: Roots vs. Whole Plant
  misc_feature: MA Experiment ID: 20000265 Result: Down-regulated in Transcription
  misc_feature: MA Experiment 20000265 PARAMETER Experiment Name: At_Open_Flower_P Parameter: Age (day) Value: 21
  misc_feature: MA Experiment 20000265 PARAMETER Experiment Name: At_Open_Flower_P Parameter: Plant Line Value: WS
  misc_feature: MA Experiment 20000265 PARAMETER Experiment Name: At_Open_Flower_P Parameter: Tissue Value: Closed Flower vs. Whole Plant
  misc_feature: MA Experiment ID: 20000286 Result: Down-regulated in Transcription
  misc_feature: MA Experiment 20000286 PARAMETER Experiment Name: At_Open_Flower_P Parameter: Age (day) Value: 21
  misc_feature: MA Experiment 20000286 PARAMETER Experiment Name: At_Open_Flower_P Parameter: Plant Line Value: WS
  misc_feature: MA Experiment 20000286 PARAMETER Experiment Name: At_Open_Flower_P Parameter: Tissue Value: Half Open vs. Whole Plant
  misc_feature: MA Experiment ID: 20000439 Result: Down-regulated in Transcription
  misc_feature: MA Experiment 20000439 PARAMETER Experiment Name: At_Roots__P Parameter: Age (day) Value: 14 vs. 21
  misc_feature: MA Experiment 20000439 PARAMETER Experiment Name: At_Roots__P Parameter: Organism Value: A. thaliana
  misc_feature: MA Experiment 20000439 PARAMETER Experiment Name: At_Roots__P Parameter: Tissue Value: Roots vs. Whole Plant
  misc_feature: MA Experiment ID: 20000794 Result: Down-regulated in Transcription
  misc_feature: MA Experiment 20000794 PARAMETER Experiment Name: At_Petals_P Parameter: Age (day) Value: 23-25 days
  misc_feature: MA Experiment 20000794 PARAMETER Experiment Name: At_Petals_P Parameter: Plant Line Value: WS
  misc_feature: MA Experiment 20000794 PARAMETER Experiment Name: At_Petals_P Parameter: Tissue Value: Petals vs. Whole plant
  misc_feature: MA Experiment ID: 20001557 Result: Down-regulated in Transcription
  misc_feature: MA Experiment 20001557 PARAMETER Experiment Name: At_Drought_Soil_Dry_P Parameter: Age (day) Value: 27
  misc_feature: MA Experiment 20001557 PARAMETER Experiment Name: At_Drought_Soil_Dry_P Parameter: Organism Value: A. thaliana
  misc_feature: MA Experiment 20001557 PARAMETER Experiment Name: At_Drought_Soil_Dry_P Parameter: Plant Line Value: WS
  misc_feature: MA Experiment 20001557 PARAMETER Experiment Name: At_Drought_Soil_Dry_P Parameter: Post Timepoint (hr) Value: 3
  misc_feature: MA Experiment 20001557 PARAMETER Experiment Name: At_Drought_Soil_Dry_P Parameter: Post-Treatment Value: Re-Water vs. No Drought
  misc_feature: MA Experiment 20001557 PARAMETER Experiment Name: At_Drought_Soil_Dry_P Parameter: Timepoint (day) Value: 13
  misc_feature: MA Experiment 20001557 PARAMETER Experiment Name: At_Drought_Soil_Dry_P Parameter: Treatment Value: Drought vs. No Drought
aaaaaaagataaattacaaaatatcattttccttatcttattgacttgtcaagattctcttcttcttcttcttcttcctcctcctccaaactcagttccctccgtccatggcagcaaccttacctctatctccgatcaatcatcagttgtgtcggttcgggaacaactctttgacgactcaccggttctgttctcctggcttcttgatttcttctccttgtttcattggtttgaccggaatgggctctgctactcagttacgtgctcgtcgttctctgatctcttcagcagttgcgacgaattcgctgttgcatgacgtcggagccaccgtggcagtgcttggtggagcatacgcgcttgtcttaagcttcgagagtctcaccaagcgaaacgtcattcaacagagtttgagcagaaagcttgtgcatatactctcaggtctgcttttcgtacttgcgtggccaatcttcagcggatcgaccgaggctcgatactttgctgcttttgttccgttagtgaatggcttaaggcttgttattaacggactatccatttccccaaattcgatgctaatcaaatccgtcacaagagaagggagagcagaagagttgcttaaaggtcctttgttctacgttctagctcttcttttctctgcggttttcttctggagagagtctcctatcggtatgatctcgttagcaatgatgtgtggtggcgatggaatagctgatataatgggacgtaagtttgggtcaactaagataccttacaacccaagaaagagttgggcaggaagcatctccatgttcatcttcggcttcttcatctccatcgcattactttactattactcaagccttgggtaccttcacatgaactgggaaacgaccttgcagagagtagcaatggtctcaatggtcgccacggtagtcgagtcgctacccatcaccgatcaattagacgacaatatttcggttcctctggctactattttagctgcttatttaagtttcggatattagattaatccctcataaaccgaatgtgtatatacgtatttttttaatgaatccgaccttacaaatgtttcc

SEQ ID NO: 105456 - protein, 304 aa, Arabidopsis thaliana
  peptide (1)..(304): Ceres Seq. ID no. 13617302
  misc_feature (1)..(304): Homolog of NCBI NO: 15238184 NR Description: expressed protein [Arabidopsis thaliana]
  misc_feature (1)..(304): Homolog of NCBI NO: 28393229 NR Description: unknown protein [Arabidopsis thaliana]
  misc_feature (1)..(304): Homolog of NCBI NO: 21537252 NR Description: unknown [Arabidopsis thaliana]
  misc_feature (2)..(304): Homolog of NCBI NO: 32488404 NR Description: OSJNBa0043A12.34 [Oryza sativa (japonica
  misc_feature (54)..(302): Homolog of NCBI NO: 34907982 NR Description: P0446G04.23 [Oryza sativa (japonica
  misc_feature (48)..(302): Homolog of NCBI NO: 15237702 NR Description: expressed protein [Arabidopsis thaliana]
  misc_feature (48)..(302): Homolog of NCBI NO: 21593148 NR Description: unknown [Arabidopsis thaliana]
  misc_feature (48)..(272): Homolog of NCBI NO: 8843778 NR Description: emb|CAB85555.1~gene_id:MZN1.2~similar to unknown
  misc_feature (62)..(304): Homolog of NCBI NO: 28850457 NR Description: similar to Oryza sativa (japonica
  misc_feature (69)..(300): Homolog of NCBI NO: 21674801 NR Description: conserved hypothetical protein [Chlorobium TLS] >gi|21648018|gb|AAM73208.1| conserved hypothetical protein
MAATLPLSPINHQLCRFGNNSLTTHRFCSPGFLISSPCFIGLTGMGSATQLRARRSLISSAVATNSLLHDVGATVAVLGGAYALVLSFESLTKRNVIQQSLSRKLVHILSGLLFVLAWPIFSGSTEARYFAAFVPLVNGLRLVINGLSISPNSMLIKSVTREGRAEELLKGPLFYVLALLFSAVFFWRESPIGMISLAMMCGGDGIADIMGRKFGSTKIPYNPRKSWAGSISMFIFGFFISIALLYYYSSLGYLHMNWETTLQRVAMVSMVATVVESLPITDQLDDNISVPLATILAAYLSFGY

SEQ ID NO: 105457 - protein, 260 aa, Arabidopsis thaliana
  peptide (1)..(260): Ceres Seq. ID no. 13617303
  misc_feature (1)..(260): Homolog of NCBI NO: 15238184 NR Description: expressed protein [Arabidopsis thaliana]
  misc_feature (1)..(260): Homolog of NCBI NO: 28393229 NR Description: unknown protein [Arabidopsis thaliana]
  misc_feature (1)..(260): Homolog of NCBI NO: 21537252 NR Description: unknown [Arabidopsis thaliana]
  misc_feature (1)..(260): Homolog of NCBI NO: 32488404 NR Description: OSJNBa0043A12.34 [Oryza sativa (japonica
  misc_feature (10)..(258): Homolog of NCBI NO: 34907982 NR Description: P0446G04.23 [Oryza sativa (japonica
  misc_feature (4)..(258): Homolog of NCBI NO: 15237702 NR Description: expressed protein [Arabidopsis thaliana]
  misc_feature (4)..(258): Homolog of NCBI NO: 21593148 NR Description: unknown [Arabidopsis thaliana]
  misc_feature (4)..(228): Homolog of NCBI NO: 8843778 NR Description: emb|CAB85555.1~gene_id:MZN1.2~similar to unknown
  misc_feature (18)..(260): Homolog of NCBI NO: 28850457 NR Description: similar to Oryza sativa (japonica
  misc_feature (25)..(256): Homolog of NCBI NO: 21674801 NR Description: conserved hypothetical protein [Chlorobium TLS] >gi|21648018|gb|AAM73208.1| conserved hypothetical protein
MGSATQLRARRSLISSAVATNSLLHDVGATVAVLGGAYALVLSFESLTKRNVIQQSLSRKLVHILSGLLFVLAWPIFSGSTEARYFAAFVPLVNGLRLVINGLSISPNSMLIKSVTREGRAEELLKGPLFYVLALLFSAVFFWRESPIGMISLAMMCGGDGIADIMGRKFGSTKIPYNPRKSWAGSISMFIFGFFISIALLYYYSSLGYLHMNWETTLQRVAMVSMVATVVESLPITDQLDDNISVPLATILAAYLSFGY

SEQ ID NO: 105458 - DNA, 854 bp, Arabidopsis thaliana
  misc_feature (1)..(854): Ceres Seq. ID no. 13617308
  misc_feature: MA Experiment ID: 108434 Result: Up-regulated in Transcription
  misc_feature: MA Experiment 108434 PARAMETER Experiment Name: At_Root_Tips_cDNA_P Parameter: Tissue Value: Root Tips
  misc_feature: MA Experiment ID: 108461 Result: Down-regulated in Transcription
  misc_feature: MA Experiment 108461 PARAMETER Experiment Name: At_Germinating_Seeds_cDNA_P Parameter: Age (day) Value: 1 vs. 0
  misc_feature: MA Experiment 108461 PARAMETER Experiment Name: At_Germinating_Seeds_cDNA_P Parameter: Tissue Value: Germinating Seeds
  misc_feature: MA Experiment ID: 108462 Result: Down-regulated in Transcription
  misc_feature: MA Experiment 108462 PARAMETER Experiment Name: At_Germinating_Seeds_cDNA_P Parameter: Age (day) Value: 2 vs. 0
  misc_feature: MA Experiment 108462 PARAMETER Experiment Name: At_Germinating_Seeds_cDNA_P Parameter: Tissue Value: Germinating Seeds
  misc_feature: MA Experiment ID: 108463 Result: Down-regulated in Transcription
  misc_feature: MA Experiment 108463 PARAMETER Experiment Name: At_Germinating_Seeds_cDNA_P Parameter: Age (day) Value: 3 vs. 0
  misc_feature: MA Experiment 108463 PARAMETER Experiment Name: At_Germinating_Seeds_cDNA_P Parameter: Tissue Value: Germinating Seeds
  misc_feature: MA Experiment ID: 108464 Result: Down-regulated in Transcription
  misc_feature: MA Experiment 108464 PARAMETER Experiment Name: At_Germinating_Seeds_cDNA_P Parameter: Age (day) Value: 4 vs. 0
  misc_feature: MA Experiment 108464 PARAMETER Experiment Name: At_Germinating_Seeds_cDNA_P Parameter: Tissue Value: Germinating Seeds
  misc_feature: MA Experiment ID: 108573 Result: Down-regulated in Transcription
  misc_feature: MA Experiment 108573 PARAMETER Experiment Name: At_Drought_cDNA_P Parameter: Timepoint (hr) Value: 6
  misc_feature: MA Experiment 108573 PARAMETER Experiment Name: At_Drought_cDNA_P Parameter: Tissue Value: Aerial
  misc_feature: MA Experiment 108573 PARAMETER Experiment Name: At_Drought_cDNA_P Parameter: Treatment Value: Drought vs. No Drought
  misc_feature: MA Experiment ID: 20000113 Result: Up-regulated in Transcription
  misc_feature: MA Experiment 20000113 PARAMETER Experiment Name: At_42deg_Heat_cDNA_P Parameter: Temperature (deg C) Value: 42 vs. 22
  misc_feature: MA Experiment 20000113 PARAMETER Experiment Name: At_42deg_Heat_cDNA_P Parameter: Timepoint (hr) Value: 8
  misc_feature: MA Experiment 20000113 PARAMETER Experiment Name: At_42deg_Heat_cDNA_P Parameter: Tissue Value: Aerial
  misc_feature: MA Experiment ID: 20000180 Result: Down-regulated in Transcription
  misc_feature: MA Experiment 20000180 PARAMETER Experiment Name: At_Germinating_Seeds_P Parameter: Age (hr) Value: 24 vs. 0
  misc_feature: MA Experiment 20000180 PARAMETER Experiment Name: At_Germinating_Seeds_P Parameter: Tissue Value: Germinating Seeds
  misc_feature: MA Experiment ID: 20000184 Result: Down-regulated in Transcription
  misc_feature: MA Experiment 20000184 PARAMETER Experiment Name: At_Shoots__P Parameter: Age (day) Value: 7
  misc_feature: MA Experiment 20000184 PARAMETER Experiment Name: At_Shoots__P Parameter: Tissue Value: Shoots vs. Whole Plant
  misc_feature: MA Experiment ID: 20000224 Result: Up-regulated in Transcription
  misc_feature: MA Experiment ID: 20001451 Result: Up-regulated in Transcription
  misc_feature: MA Experiment 20001451 PARAMETER Experiment Name: At_Far-red-induction_P Parameter: Age (day) Value: 7
  misc_feature: MA Experiment 20001451 PARAMETER Experiment Name: At_Far-red-induction_P Parameter: Light Value: Far-red vs. White
  misc_feature: MA Experiment 20001451 PARAMETER Experiment Name: At_Far-red-induction_P Parameter: Organism Value: A. thaliana
  misc_feature: MA Experiment 20001451 PARAMETER Experiment Name: At_Far-red-induction_P Parameter: Plant Line Value: Columbia
  misc_feature: MA Experiment 20001451 PARAMETER Experiment Name: At_Far-red-induction_P Parameter: Timepoint (hr) Value: 24
  misc_feature: MA Experiment 20001451 PARAMETER Experiment Name: At_Far-red-induction_P Parameter: Tissue Value: Whole Plant
  misc_feature: MA Experiment ID: 20001557 Result: Up-regulated in Transcription
  misc_feature: MA Experiment 20001557 PARAMETER Experiment Name: At_Drought_Soil_Dry_P Parameter: Age (day) Value: 27
  misc_feature: MA Experiment 20001557 PARAMETER Experiment Name: At_Drought_Soil_Dry_P Parameter: Organism Value: A. thaliana
  misc_feature: MA Experiment 20001557 PARAMETER Experiment Name: At_Drought_Soil_Dry_P Parameter: Plant Line Value: WS
  misc_feature: MA Experiment 20001557 PARAMETER Experiment Name: At_Drought_Soil_Dry_P Parameter: Post Timepoint (hr) Value: 3
  misc_feature: MA Experiment 20001557 PARAMETER Experiment Name: At_Drought_Soil_Dry_P Parameter: Post-Treatment Value: Re-Water vs. No Drought
  misc_feature: MA Experiment 20001557 PARAMETER Experiment Name: At_Drought_Soil_Dry_P Parameter: Timepoint (day) Value: 13
  misc_feature: MA Experiment 20001557 PARAMETER Experiment Name: At_Drought_Soil_Dry_P Parameter: Treatment Value: Drought vs. No Drought
  misc_feature: MA Experiment ID: 20001558 Result: Up-regulated in Transcription
  misc_feature: MA Experiment 20001558 PARAMETER Experiment Name: At_Drought_Soil_Dry_P Parameter: Age (day) Value: 27
  misc_feature: MA Experiment 20001558 PARAMETER Experiment Name: At_Drought_Soil_Dry_P Parameter: Organism Value: A. thaliana
  misc_feature: MA Experiment 20001558 PARAMETER Experiment Name: At_Drought_Soil_Dry_P Parameter: Plant Line Value: WS
  misc_feature: MA Experiment 20001558 PARAMETER Experiment Name: At_Drought_Soil_Dry_P Parameter: Post Timepoint (hr) Value: 6
  misc_feature: MA Experiment 20001558 PARAMETER Experiment Name: At_Drought_Soil_Dry_P Parameter: Post-Treatment Value: Re-Water vs. No Drought
  misc_feature: MA Experiment 20001558 PARAMETER Experiment Name: At_Drought_Soil_Dry_P Parameter: Timepoint (day) Value: 13
  misc_feature: MA Experiment 20001558 PARAMETER Experiment Name: At_Drought_Soil_Dry_P Parameter: Treatment Value: Drought vs. No Drought
  misc_feature: MA Experiment ID: 20001757 Result: Up-regulated in Transcription
  misc_feature: MA Experiment 20001757 PARAMETER Experiment Name: At_50mM_NH4NO3_L-to-H_P Parameter: Timepoint (hr) Value: 6
  misc_feature: MA Experiment 20001757 PARAMETER Experiment Name: At_50mM_NH4NO3_L-to-H_P Parameter: Tissue Value: Leaf
  misc_feature: MA Experiment 20001757 PARAMETER Experiment Name: At_50mM_NH4NO3_L-to-H_P Parameter: Treatment Value: 50mM NH4NO3 vs 100mM Mannitol
ctaattgtatcatcctcttccttgcgttctctctttctctctctcgccgacgacgaaaacatgggtgccaaggcgaagaaagctttgaagaagaacatgaagaaggttgctgcttcggcttcttcttctcagctacctcttccccagaacccgaaaccttcagctgattttttgccactagaaggaggtccagctcgaaaagctccagttaccaccccacctcttcagaataaagctactgtgctatacatcggtagaatccctcatggcttctatgagactgagattgaagctttcttctcgcagtttggaacagttaagagagttagagtcgccagaaacaaaaagactgggaaatcaaagcattttgggttcatacagtttgaggaccctgaggtggcggaaattgcagcgggtgcaatgaatgattatttgttgatggagcacatgcttaaagtccatgtcattgaaccagagaatgttaaacccaatctgtggagagggtttaaatgtaacttcaaaccagtggattcggttcagattgagcgaagacaacttaataaggaaaggacattggaagagcataggaaaatgttgcagaagatagttaaaaaggatcagaaaaggaggaagagaatcgaagccgctggaatagaatacgaatgccctgagcttgttggaaacacacagccagtcccgaagaggatcaagtttagtgaagaagactaaaagctgaagctgaacaacacttttccgataaccttttttgaatagaaatctgttctgttgtactcttgatattggatcaataactaaactttaaagtttgcaatgaaaacttctgtttcaatgat

SEQ ID NO: 105459 - protein, 242 aa, Arabidopsis thaliana
  peptide (1)..(242): Ceres Seq. ID no. 13617309
  misc_feature (82)..(153): Pfam Name: RNA recognition motif. (a.k.a. RRM, RBD, or RNP domain) Pfam Description: RNA recognition motif. (a.k.a. RRM, RBD, or RNP
  misc_feature (21)..(242): Homolog of NCBI NO: 15238220 NR Description: RNA recognition motif (RRM)-containing protein
  misc_feature (21)..(242): Homolog of NCBI NO: 18652180 NR Description: RNA binding protein [Elaeis oleifera]
  misc_feature (81)..(234): Homolog of NCBI NO: 40741317 NR Description: hypothetical protein AN4346.2 [Aspergillus
  misc_feature (47)..(242): Homolog of NCBI NO: 27545352 NR Description: mki67 (FHA domain) interacting nucleolar
  misc_feature (78)..(242): Homolog of NCBI NO: 32418170 NR Description: hypothetical protein [Neurospora crassa]
  misc_feature (34)..(223): Homolog of NCBI NO: 32450283 NR Description: Unknown (protein for IMAGE:6878823) [Xenopus
  misc_feature (75)..(221): Homolog of NCBI NO: 19076051 NR Description: putative RNA-binding protein [Schizosaccharomyces
  misc_feature (47)..(234): Homolog of NCBI NO: 13699902 NR Description: nucleolar phosphoprotein Nopp34 [Homo sapiens]
  misc_feature (47)..(234): Homolog of NCBI NO: 21314753 NR Description: MKI67 (FHA domain) interacting nucleolar nucleolar phosphoprotein Nopp34; nucleolar protein interacting
  misc_feature (55)..(221): Homolog of NCBI NO: 20302745 NR Description: unknown [Branchiostoma floridae]
LIVSSSSLRSLFLSLADDENMGAKAKKALKKNMKKVAASASSSQLPLPQNPKPSADFLPLEGGPARKAPVTTPPLQNKATVLYIGRIPHGFYETEIEAFFSQFGTVKRVRVARNKKTGKSKHFGFIQFEDPEVAEIAAGAMNDYLLMEHMLKVHVIEPENVKPNLWRGFKCNFKPVDSVQIERRQLNKERTLEEHRKMLQKIVKKDQKRRKRIEAAGIEYECPELVGNTQPVPKRIKFSEED

SEQ ID NO: 105460 - protein, 222 aa, Arabidopsis thaliana; identical to SEQ ID NO: 26736
  peptide (1)..(222): Ceres Seq. ID no. 13617310
  misc_feature (62)..(133): Pfam Name: RNA recognition motif. (a.k.a. RRM, RBD, or RNP domain) Pfam Description: RNA recognition motif. (a.k.a. RRM, RBD, or RNP
  misc_feature (1)..(222): Homolog of NCBI NO: 15238220 NR Description: RNA recognition motif (RRM)-containing protein
  misc_feature (1)..(222): Homolog of NCBI NO: 18652180 NR Description: RNA binding protein [Elaeis oleifera]
  misc_feature (61)..(214): Homolog of NCBI NO: 40741317 NR Description: hypothetical protein AN4346.2 [Aspergillus
  misc_feature (27)..(222): Homolog of NCBI NO: 27545352 NR Description: mki67 (FHA domain) interacting nucleolar
  misc_feature (58)..(222): Homolog of NCBI NO: 32418170 NR Description: hypothetical protein [Neurospora crassa]
  misc_feature (14)..(203): Homolog of NCBI NO: 32450283 NR Description: Unknown (protein for IMAGE:6878823) [Xenopus
  misc_feature (55)..(201): Homolog of NCBI NO: 19076051 NR Description: putative RNA-binding protein [Schizosaccharomyces
  misc_feature (27)..(214): Homolog of NCBI NO: 13699902 NR Description: nucleolar phosphoprotein Nopp34 [Homo sapiens]
  misc_feature (27)..(214): Homolog of NCBI NO: 21314753 NR Description: MKI67 (FHA domain) interacting nucleolar nucleolar phosphoprotein Nopp34; nucleolar protein interacting
  misc_feature (35)..(201): Homolog of NCBI NO: 20302745 NR Description: unknown [Branchiostoma floridae]

SEQ ID NO: 105461 - protein, 210 aa, Arabidopsis thaliana; identical to SEQ ID NO: 26737
  peptide (1)..(210): Ceres Seq. ID no. 13617311
  misc_feature (50)..(121): Pfam Name: RNA recognition motif. (a.k.a. RRM, RBD, or RNP domain) Pfam Description: RNA recognition motif. (a.k.a. RRM, RBD, or RNP
  misc_feature (1)..(210): Homolog of NCBI NO: 15238220 NR Description: RNA recognition motif (RRM)-containing protein
  misc_feature (1)..(210): Homolog of NCBI NO: 18652180 NR Description: RNA binding protein [Elaeis oleifera]
  misc_feature (49)..(202): Homolog of NCBI NO: 40741317 NR Description: hypothetical protein AN4346.2 [Aspergillus
  misc_feature (15)..(210): Homolog of NCBI NO: 27545352 NR Description: mki67 (FHA domain) interacting nucleolar
  misc_feature (46)..(210): Homolog of NCBI NO: 32418170 NR Description: hypothetical protein [Neurospora crassa]
  misc_feature (2)..(191): Homolog of NCBI NO: 32450283 NR Description: Unknown (protein for IMAGE:6878823) [Xenopus
  misc_feature (43)..(189): Homolog of NCBI NO: 19076051 NR Description: putative RNA-binding protein [Schizosaccharomyces
  misc_feature (15)..(202): Homolog of NCBI NO: 13699902 NR Description: nucleolar phosphoprotein Nopp34 [Homo sapiens]
  misc_feature (15)..(202): Homolog of NCBI NO: 21314753 NR Description: MKI67 (FHA domain) interacting nucleolar nucleolar phosphoprotein Nopp34; nucleolar protein interacting
  misc_feature (23)..(189): Homolog of NCBI NO: 20302745 NR Description: unknown [Branchiostoma floridae]

SEQ ID NO: 105462 - DNA, 1671 bp, Arabidopsis thaliana
  misc_feature (1)..(1671): Ceres Seq. ID no. 13617316
  misc_feature: MA Experiment ID: 20000171 Result: Down-regulated in Transcription
  misc_feature: MA Experiment 20000171 PARAMETER Experiment Name: At_42deg_Heat_P Parameter: Age (day) Value: 14
  misc_feature: MA Experiment 20000171 PARAMETER Experiment Name: At_42deg_Heat_P Parameter: Organism Value: A. thaliana
  misc_feature: MA Experiment 20000171 PARAMETER Experiment Name: At_42deg_Heat_P Parameter: Plant Line Value: WS
  misc_feature: MA Experiment 20000171 PARAMETER Experiment Name: At_42deg_Heat_P Parameter: Temperature (deg C) Value: 42 vs. 22
  misc_feature: MA Experiment 20000171 PARAMETER Experiment Name: At_42deg_Heat_P Parameter: Timepoint (hr) Value: 1
  misc_feature: MA Experiment 20000171 PARAMETER Experiment Name: At_42deg_Heat_P Parameter: Tissue Value: Aerial
  misc_feature: MA Experiment ID: 20000173 Result: Down-regulated in Transcription
  misc_feature: MA Experiment 20000173 PARAMETER Experiment Name: At_42deg_Heat_P Parameter: Age (day) Value: 14
  misc_feature: MA Experiment 20000173 PARAMETER Experiment Name: At_42deg_Heat_P Parameter: Organism Value: A. thaliana
  misc_feature: MA Experiment 20000173 PARAMETER Experiment Name: At_42deg_Heat_P Parameter: Plant Line Value: WS
  misc_feature: MA Experiment 20000173 PARAMETER Experiment Name: At_42deg_Heat_P Parameter: Temperature (deg C) Value: 42 vs. 22
  misc_feature: MA Experiment 20000173 PARAMETER Experiment Name: At_42deg_Heat_P Parameter: Timepoint (hr) Value: 6
  misc_feature: MA Experiment 20000173 PARAMETER Experiment Name: At_42deg_Heat_P Parameter: Tissue Value: Aerial
  misc_feature: MA Experiment ID: 20000180 Result: Down-regulated in Transcription
  misc_feature: MA Experiment 20000180 PARAMETER Experiment Name: At_Germinating_Seeds_P Parameter: Age (hr) Value: 24 vs. 0
  misc_feature: MA Experiment 20000180 PARAMETER Experiment Name: At_Germinating_Seeds_P Parameter: Tissue Value: Germinating Seeds
  misc_feature: MA Experiment ID: 20000185 Result: Down-regulated in Transcription
  misc_feature: MA Experiment 20000185 PARAMETER Experiment Name: At_Roots__P Parameter: Age (day) Value: 7 vs. 21
  misc_feature: MA Experiment 20000185 PARAMETER Experiment Name: At_Roots__P Parameter: Organism Value: A. thaliana
  misc_feature: MA Experiment 20000185 PARAMETER Experiment Name: At_Roots__P Parameter: Tissue Value: Roots vs. Whole Plant
  misc_feature: MA Experiment ID: 20000234 Result: Up-regulated in Transcription
  misc_feature: MA Experiment 20000234 PARAMETER Experiment Name: At_Siliques_P Parameter: Age (day) Value: 21
  misc_feature: MA Experiment 20000234 PARAMETER Experiment Name: At_Siliques_P Parameter: Organism Value: A. thaliana
  misc_feature: MA Experiment 20000234 PARAMETER Experiment Name: At_Siliques_P Parameter: Plant Line Value: WS
  misc_feature: MA Experiment 20000234 PARAMETER Experiment Name: At_Siliques_P Parameter: Tissue Value: Less Than 5mm Siliques vs. Whole Plant
  misc_feature: MA Experiment ID: 20000235 Result: Up-regulated in Transcription
  misc_feature: MA Experiment 20000235 PARAMETER Experiment Name: At_Siliques_P Parameter: Age (day) Value: 21
  misc_feature: MA Experiment 20000235 PARAMETER Experiment Name: At_Siliques_P Parameter: Organism Value: A. thaliana
  misc_feature: MA Experiment 20000235 PARAMETER Experiment Name: At_Siliques_P Parameter: Plant Line Value: WS
  misc_feature: MA Experiment 20000235 PARAMETER Experiment Name: At_Siliques_P Parameter: Tissue Value: 5-10mm Siliques vs. Whole Plant
  misc_feature: MA Experiment ID: 20000264 Result: Up-regulated in Transcription
  misc_feature: MA Experiment 20000264 PARAMETER Experiment Name: At_Open_Flower_P Parameter: Age (day) Value: 21
  misc_feature: MA Experiment 20000264 PARAMETER Experiment Name: At_Open_Flower_P Parameter: Plant Line Value: WS
  misc_feature: MA Experiment 20000264 PARAMETER Experiment Name: At_Open_Flower_P Parameter: Tissue Value: Open Flower vs. Whole Plant
  misc_feature: MA Experiment ID: 20000265 Result: Up-regulated in Transcription
  misc_feature: MA Experiment 20000265 PARAMETER Experiment Name: At_Open_Flower_P Parameter: Age (day) Value: 21
  misc_feature: MA Experiment 20000265 PARAMETER Experiment Name: At_Open_Flower_P Parameter: Plant Line Value: WS
  misc_feature: MA Experiment 20000265 PARAMETER Experiment Name: At_Open_Flower_P Parameter: Tissue Value: Closed Flower vs. Whole Plant
  misc_feature: MA Experiment ID: 20000286 Result: Up-regulated in Transcription
  misc_feature: MA Experiment 20000286 PARAMETER Experiment Name: At_Open_Flower_P Parameter: Age (day) Value: 21
  misc_feature: MA Experiment 20000286 PARAMETER Experiment Name: At_Open_Flower_P Parameter: Plant Line Value: WS
  misc_feature: MA Experiment 20000286 PARAMETER Experiment Name: At_Open_Flower_P Parameter: Tissue Value: Half Open vs. Whole Plant
  misc_feature: MA Experiment ID: 20000436 Result: Up-regulated in Transcription
  misc_feature: MA Experiment 20000436 PARAMETER Experiment Name: At_Drought_P Parameter: Age (day) Value: 7
  misc_feature: MA Experiment 20000436 PARAMETER Experiment Name: At_Drought_P Parameter: Organism Value: A. thaliana
  misc_feature: MA Experiment 20000436 PARAMETER Experiment Name: At_Drought_P Parameter: Plant Line Value: WS
  misc_feature: MA Experiment 20000436 PARAMETER Experiment Name: At_Drought_P Parameter: Timepoint (hr) Value: 12
  misc_feature: MA Experiment 20000436 PARAMETER Experiment Name: At_Drought_P Parameter: Tissue Value: Whole Plant
  misc_feature: MA Experiment 20000436 PARAMETER Experiment Name: At_Drought_P Parameter: Treatment Value: Drought vs. No Drought
  misc_feature: MA Experiment ID: 20000439 Result: Down-regulated in Transcription
  misc_feature: MA Experiment 20000439 PARAMETER Experiment Name: At_Roots__P Parameter: Age (day) Value: 14 vs. 21
  misc_feature: MA Experiment 20000439 PARAMETER Experiment Name: At_Roots__P Parameter: Organism Value: A. thaliana
  misc_feature: MA Experiment 20000439 PARAMETER Experiment Name: At_Roots__P Parameter: Tissue Value: Roots vs. Whole Plant
  misc_feature: MA Experiment ID: 20000573 Result: Down-regulated in Transcription
  misc_feature: MA Experiment 20000573 PARAMETER Experiment Name: At_100uM_ABA_Mutants__P Parameter: Organism Value: A. thaliana
  misc_feature: MA Experiment 20000573 PARAMETER Experiment Name: At_100uM_ABA_Mutants__P Parameter: Plant Line Value: CS22 vs. Ler wt
  misc_feature: MA Experiment 20000573 PARAMETER Experiment Name: At_100uM_ABA_Mutants__P Parameter: Timepoint (hr) Value: N/A
  misc_feature: MA Experiment 20000573 PARAMETER Experiment Name: At_100uM_ABA_Mutants__P Parameter: Tissue Value: Whole Plant
  misc_feature: MA Experiment 20000573 PARAMETER Experiment Name: At_100uM_ABA_Mutants__P Parameter: Treatment Value: None
  misc_feature: MA Experiment ID: 20001248 Result: Down-regulated in Transcription
  misc_feature: MA Experiment 20001248 PARAMETER Experiment Name: At_Far-red-induction_P Parameter: Age (day) Value: 7
  misc_feature: MA Experiment 20001248 PARAMETER Experiment Name: At_Far-red-induction_P Parameter: Light Value: Far-red vs. White
  misc_feature: MA Experiment 20001248 PARAMETER Experiment Name: At_Far-red-induction_P Parameter: Organism Value: A. thaliana
  misc_feature: MA Experiment 20001248 PARAMETER Experiment Name: At_Far-red-induction_P Parameter: Plant Line Value: Columbia
  misc_feature: MA Experiment 20001248 PARAMETER Experiment Name: At_Far-red-induction_P Parameter: Timepoint (hr) Value: 4
  misc_feature: MA Experiment 20001248 PARAMETER Experiment Name: At_Far-red-induction_P Parameter: Tissue Value: Whole Plant
aatcttcgtcttcttcttctctgcttgagtcaacaagaaataaacagagctaaaatgtttcctctaatctccttttctccaacttctcttgatttcaccttcttcgccattatcatctcaggtttcgttttcatcatcactcgatggaattccaattcaaagaaacgtttaaaccttcctccaggtccgccaggttggccggtggtcggaaacttattccagttcgcgcgctcaggtaaaccgtttttcgaatacgcagaggatctcaagaaaacgtatggcccgatttttacactgagaatggggactcgaacaatgatcatcctctccgacgcaactctagtccacgaagctttgatccaacgcggagctctcttcgcttcacgacccgccgagaatccgacccgaacaatcttcagctgcaacaaattcaccgtcaacgccgctaaatacggtccagtgtggcgatctctgagaagaaacatggttcagaacatgcttagctcaacacgtctcaaggaattcgggaaactgagacaatccgccatggataaactcatcgagaggatcaaatcggaagctagagacaacgacgggctaatctgggttcttaaaaacgcaagattcgctgcgttttgtattctcttggaaatgtgtttcggaatcgagatggatgaagagacaatcgagaagatggatgagattttgaagacggtgttaatgactgttgatccacgaatcgacgattatcttccgattcttgctccgttcttctctaaagagaggaaacgagctctcgaagttcgccgtgaacaagtcgattacgtcgtcggagttatcgagagacgacggagagcgattcagaatccaggatctgataaaacggcgtcgtctttttcatacttagatacactctttgatttaaaaatcgaaggtcgtaaaacgacgccgtctaacgaagagctcgtgacgctctgctctgagtttcttaacggtggtacggatacgacggggacggcgatcgagtgggggatagcgcagctgattgcgaatcctgagattcaatctcggctctacgatgagattaaatcaacggtgggagatgatcgtagggtcgatgagaaagatgtggacaaaatggtctttttacaagcttttgttaaggagcttctccggaaacatccgccgacttatttttctctgacgcatgccgttatggagacgacgacgcttgctggttacgatattcccgccggcgttaacgtcgaggtttatcttccgggtattagtgaggatccgagaatttggaataacccgaaaaagtttgatccggaccggtttatgttgggtaaggaagatgctgacataaccgggattagtggagtaaaaatgattccgtttggtgtgggccgtaggatctgtccaggacttgcaatggcaaccatacacgtccatttgatgcttgcgcggatggttcaggagttcgagtggtgtgctcatccaccaggaagtgagattgatttcgccggaaaattggagtttacggtggtgatgaagaatccgttgagagctatggtcaaaccaaggatttagtcttttattgtttttttgttaagaatattgagattattgtaaggtgtgtttgcttataaacattaaagtacccaaatc

SEQ ID NO: 105463 - protein, 530 aa, Arabidopsis thaliana
  peptide (1)..(530): Ceres Seq. ID no. 13617317
  misc_feature (60)..(528): Pfam Name: Cytochrome P450 Pfam Description: Cytochrome P450
  misc_feature (19)..(530): Homolog of NCBI NO: 15238249 NR Description: cytochrome P450, putative [Arabidopsis thaliana]
  misc_feature (19)..(530): Homolog of NCBI NO: 21595357 NR Description: cytochrom P450-like protein [Arabidopsis thaliana]
  misc_feature (22)..(530): Homolog of NCBI NO: 15228331 NR Description: cytochrome P450, putative [Arabidopsis thaliana]
  misc_feature (22)..(530): Homolog of NCBI NO: 28393336 NR Description: putative cytochrome p450 [Arabidopsis thaliana]
  misc_feature (23)..(530): Homolog of NCBI NO: 15228330 NR Description: cytochrome P450, putative [Arabidopsis thaliana]
  misc_feature (32)..(530): Homolog of NCBI NO: 15238242 NR Description: cytochrome P450, putative [Arabidopsis thaliana]
NLRLLLLCLSQQEINRAKMFPLISFSPTSLDFTFFAIIISGFVFIITRWNSNSKKRLNLPPGPPGWPVVGNLFQFARSGKPFFEYAEDLKKTYGPIFTLRMGTRTMIILSDATLVHEALIQRGALFASRPAENPTRTIFSCNKFTVNAAKYGPVWRSLRRNMVQNMLSSTRLKEFGKLRQSAMDKLIERIKSEARDNDGLIWVLKNARFAAFCILLEMCFGIEMDEETIEKMDEILKTVLMTVDPRIDDYLPILAPFFSKERKRALEVRREQVDYVVGVIERRRRAIQNPGSDKTASSFSYLDTLFDLKIEGRKTTPSNEELVTLCSEFLNGGTDTTGTAIEWGIAQLIANPEIQSRLYDEIKSTVGDDRRVDEKDVDKMVFLQAFVKELLRKHPPTYFSLTHAVMETTTLAGYDIPAGVNVEVYLPGISEDPRIWNNPKKFDPDRFMLGKEDADITGISGVKMIPFGVGRRICPGLAMATIHVHLMLARMVQEFEWCAHPPGSEIDFAGKLEFTVVMKNPLRAMVKPRI

SEQ ID NO: 105464 - protein, 512 aa, Arabidopsis thaliana
  peptide (1)..(512): Ceres Seq. ID no. 13617318
  misc_feature (42)..(510): Pfam Name: Cytochrome P450 Pfam Description: Cytochrome P450
  misc_feature (1)..(512): Homolog of NCBI NO: 15238249 NR Description: cytochrome P450, putative [Arabidopsis thaliana]
  misc_feature (1)..(512): Homolog of NCBI NO: 21595357 NR Description: cytochrom P450-like protein [Arabidopsis thaliana]
  misc_feature (4)..(512): Homolog of NCBI NO: 15228331 NR Description: cytochrome P450, putative [Arabidopsis thaliana]
  misc_feature (4)..(512): Homolog of NCBI NO: 28393336 NR Description: putative cytochrome p450 [Arabidopsis thaliana]
  misc_feature (5)..(512): Homolog of NCBI NO: 15228330 NR Description: cytochrome P450, putative [Arabidopsis thaliana]
  misc_feature (14)..(512): Homolog of NCBI NO: 15238242 NR Description: cytochrome P450, putative [Arabidopsis thaliana]
MFPLISFSPTSLDFTFFAIIISGFVFIITRWNSNSKKRLNLPPGPPGWPVVGNLFQFARSGKPFFEYAEDLKKTYGPIFTLRMGTRTMIILSDATLVHEALIQRGALFASRPAENPTRTIFSCNKFTVNAAKYGPVWRSLRRNMVQNMLSSTRLKEFGKLRQSAMDKLIERIKSEARDNDGLIWVLKNARFAAFCILLEMCFGIEMDEETIEKMDEILKTVLMTVDPRIDDYLPILAPFFSKERKRALEVRREQVDYVVGVIERRRRAIQNPGSDKTASSFSYLDTLFDLKIEGRKTTPSNEELVTLCSEFLNGGTDTTGTAIEWGIAQLIANPEIQSRLYDEIKSTVGDDRRVDEKDVDKMVFLQAFVKELLRKHPPTYFSLTHAVMETTTLAGYDIPAGVNVEVYLPGISEDPRIWNNPKKFDPDRFMLGKEDADITGISGVKMIPFGVGRRICPGLAMATIHVHLMLARMVQEFEWCAHPPGSEIDFAGKLEFTVVMKNPLRAMVKPRI

SEQ ID NO: 105465 - protein, 430 aa, Arabidopsis thaliana
  peptide (1)..(430): Ceres Seq. ID no. 13617319
  misc_feature (1)..(428): Pfam Name: Cytochrome P450 Pfam Description: Cytochrome P450
  misc_feature (1)..(430): Homolog of NCBI NO: 15238249 NR Description: cytochrome P450, putative [Arabidopsis thaliana]
  misc_feature (1)..(430): Homolog of NCBI NO: 21595357 NR Description: cytochrom P450-like protein [Arabidopsis thaliana]
  misc_feature (1)..(430): Homolog of NCBI NO: 15228331 NR Description: cytochrome P450, putative [Arabidopsis thaliana]
  misc_feature (1)..(430): Homolog of NCBI NO: 28393336 NR Description: putative cytochrome p450 [Arabidopsis thaliana]
  misc_feature (1)..(430): Homolog of NCBI NO: 15228330 NR Description: cytochrome P450, putative [Arabidopsis thaliana]
  misc_feature (1)..(430): Homolog of NCBI NO: 15238242 NR Description: cytochrome P450, putative [Arabidopsis thaliana]
MGTRTMIILSDATLVHEALIQRGALFASRPAENPTRTIFSCNKFTVNAAKYGPVWRSLRRNMVQNMLSSTRLKEFGKLRQSAMDKLIERIKSEARDNDGLIWVLKNARFAAFCILLEMCFGIEMDEETIEKMDEILKTVLMTVDPRIDDYLPILAPFFSKERKRALEVRREQVDYVVGVIERRRRAIQNPGSDKTASSFSYLDTLFDLKIEGRKTTPSNEELVTLCSEFLNGGTDTTGTAIEWGIAQLIANPEIQSRLYDEIKSTVGDDRRVDEKDVDKMVFLQAFVKELLRKHPPTYFSLTHAVMETTTLAGYDIPAGVNVEVYLPGISEDPRIWNNPKKFDPDRFMLGKEDADITGISGVKMIPFGVGRRICPGLAMATIHVHLMLARMVQEFEWCAHPPGSEIDFAGKLEFTVVMKNPLRAMVKPRI

SEQ ID NO: 105466 - DNA, 1154 bp, Arabidopsis thaliana
  misc_feature (1)..(1154): Ceres Seq. ID no. 13617320
  misc_feature: MA Experiment ID: 108595 Result: Up-regulated in Transcription
  misc_feature: MA Experiment 108595 PARAMETER Experiment Name: At_Ler-pi_Ovule_cDNA_P Parameter: Plant Line Value: null
  misc_feature: MA Experiment ID: 20000179 Result: Up-regulated in Transcription
  misc_feature: MA Experiment 20000179 PARAMETER Experiment Name: At_Germinating_Seeds_P Parameter: Age (hr) Value: 6 vs. 0
  misc_feature: MA Experiment 20000179 PARAMETER Experiment Name: At_Germinating_Seeds_P Parameter: Tissue Value: Germinating Seeds
  misc_feature: MA Experiment ID: 20000180 Result: Up-regulated in Transcription
  misc_feature: MA Experiment 20000180 PARAMETER Experiment Name: At_Germinating_Seeds_P Parameter: Age (hr) Value: 24 vs. 0
  misc_feature: MA Experiment 20000180 PARAMETER Experiment Name: At_Germinating_Seeds_P Parameter: Tissue Value: Germinating Seeds
  misc_feature: MA Experiment ID: 20000185 Result: Up-regulated in Transcription
  misc_feature: MA Experiment 20000185 PARAMETER Experiment Name: At_Roots__P Parameter: Age (day) Value: 7 vs. 21
  misc_feature: MA Experiment 20000185 PARAMETER Experiment Name: At_Roots__P Parameter: Organism Value: A. thaliana
  misc_feature: MA Experiment 20000185 PARAMETER Experiment Name: At_Roots__P Parameter: Tissue Value: Roots vs. Whole Plant
  misc_feature: MA Experiment ID: 20000439 Result: Up-regulated in Transcription
  misc_feature: MA Experiment 20000439 PARAMETER Experiment Name: At_Roots__P Parameter: Age (day) Value: 14 vs. 21
  misc_feature: MA Experiment 20000439 PARAMETER Experiment Name: At_Roots__P Parameter: Organism Value: A. thaliana
  misc_feature: MA Experiment 20000439 PARAMETER Experiment Name: At_Roots__P Parameter: Tissue Value: Roots vs. Whole Plant
  misc_feature: MA Experiment ID: 20000794 Result: Up-regulated in Transcription
  misc_feature: MA Experiment 20000794 PARAMETER Experiment Name: At_Petals_P Parameter: Age (day) Value: 23-25 days
  misc_feature: MA Experiment 20000794 PARAMETER Experiment Name: At_Petals_P Parameter: Plant Line Value: WS
  misc_feature: MA Experiment 20000794 PARAMETER Experiment Name: At_Petals_P Parameter: Tissue Value: Petals vs. Whole plant
  misc_feature: MA Experiment ID: 20001757 Result: Down-regulated in Transcription
  misc_feature: MA Experiment 20001757 PARAMETER Experiment Name: At_50mM_NH4NO3_L-to-H_P Parameter: Timepoint (hr) Value: 6
  misc_feature: MA Experiment 20001757 PARAMETER Experiment Name: At_50mM_NH4NO3_L-to-H_P Parameter: Tissue Value: Leaf
  misc_feature: MA Experiment 20001757 PARAMETER Experiment Name: At_50mM_NH4NO3_L-to-H_P Parameter: Treatment Value: 50mM NH4NO3 vs 100mM Mannitol
aatttctctcgccattttatagattaaggtgttctctctgacttcggaggagaaagaaagaaaaaaaatattcttgtttcaaacttcaatggcgttctcgagttccatcttctctgttactcagttttcttcttcgttagcttcgcgtccttcttctgcaatcagtaggcagactcgttttcccgctcaaattgcttctccagatctatcgcctgctttgttcgatgatcgccggaagttcgtcggaggtgtaatgtctctcttgacgaagagtattaaaaaccgtgtatatgcttcgattaacagcattgattcggccgctactccatcgtatccgaaatcggaagacgatgacgacgttgttccaatgccaatggttatgatagaccaggatgctgaccctgaagctactattgtacaactcagttttggaaatcgtcttggggctcttattgacacaatgcgggcgctgaaagatttgggattggatgtaataaaaggaactgtctcaactgaaggatccattaagcagaccaaattttctataacgaaacgagacactggccggaaagtggaagatcctgacttgttggaacaaatccgattaacaatcatcaacaatctcttgaaataccatccggaatgcagtgagcaacttgcaatgggtgagacttttggaataaaggctcccgaaaagaagattgatgtcgatatcgcaactcatatacatgtgaaagaagatggaccaaagaggagcctgcttgtcatagagacagcggacaggccaggtcttgtcgtagagatgatcaaagtgatggctgatgtcaacatagacgtggaatccgcagagatagatacagagggactggttgcgaaagacaagtttcacgtaagctaccaagggcaagctctaaacagatctttgtcacaggttttggtgaactgtctgcgttacttcctgagaaggcctgaaactgacattgacagctactaaatgagcttttgtttgctctaaaacaaaactgctctttatcctttaaagcaatcatatctgtgcttgcgaaactttcagacttctgtatggaagattatgtggaaattcgtgatactataattgaaccactgtggctaaaaaataaatgggttcttgacac

SEQ ID NO: 105467 - protein, 301 aa, Arabidopsis thaliana; identical to SEQ ID NO: 22798
  peptide (1)..(301): Ceres Seq. ID no. 13617321
  misc_feature (223)..(292): Pfam Name: ACT domain Pfam Description: ACT domain
  misc_feature (1)..(301): Homolog of NCBI NO: 15238305 NR Description: ACT domain-containing protein [Arabidopsis
  misc_feature (1)..(301): Homolog of NCBI NO: 21592963 NR Description: unknown [Arabidopsis thaliana]
  misc_feature (85)..(301): Homolog of NCBI NO: 18394414 NR Description: expressed protein [Arabidopsis thaliana]
  misc_feature (87)..(269): Homolog of NCBI NO: 6091737 NR Description: unknown protein [Arabidopsis thaliana]

SEQ ID NO: 105468 - protein, 246 aa, Arabidopsis thaliana; identical to SEQ ID NO: 22799
  peptide (1)..(246): Ceres Seq. ID no. 13617322
  misc_feature (168)..(237): Pfam Name: ACT domain Pfam Description: ACT domain
  misc_feature (1)..(246): Homolog of NCBI NO: 15238305 NR Description: ACT domain-containing protein [Arabidopsis
  misc_feature (1)..(246): Homolog of NCBI NO: 21592963 NR Description: unknown [Arabidopsis thaliana]
  misc_feature (30)..(246): Homolog of NCBI NO: 18394414 NR Description: expressed protein [Arabidopsis thaliana]
  misc_feature (32)..(214): Homolog of NCBI NO: 6091737 NR Description: unknown protein [Arabidopsis thaliana]

SEQ ID NO: 105469 - protein, 208 aa, Arabidopsis thaliana; identical to SEQ ID NO: 22800
  peptide (1)..(208): Ceres Seq. ID no. 13617323
  misc_feature (130)..(199): Pfam Name: ACT domain Pfam Description: ACT domain
  misc_feature (1)..(208): Homolog of NCBI NO: 15238305 NR Description: ACT domain-containing protein [Arabidopsis
  misc_feature (1)..(208): Homolog of NCBI NO: 21592963 NR Description: unknown [Arabidopsis thaliana]
  misc_feature (1)..(208): Homolog of NCBI NO: 18394414 NR Description: expressed protein [Arabidopsis thaliana]
  misc_feature (1)..(176): Homolog of NCBI NO: 6091737 NR Description: unknown protein [Arabidopsis thaliana]

SEQ ID NO: 105470 - DNA, 676 bp, Arabidopsis thaliana
  misc_feature (1)..(676): Ceres Seq. ID no. 13617328
  misc_feature: MA Experiment ID: 108434 Result: Down-regulated in Transcription
  misc_feature: MA Experiment 108434 PARAMETER Experiment Name: At_Root_Tips_cDNA_P Parameter: Tissue Value: Root Tips
  misc_feature: MA Experiment ID: 108462 Result: Up-regulated in Transcription
  misc_feature: MA Experiment 108462 PARAMETER Experiment Name: At_Germinating_Seeds_cDNA_P Parameter: Age (day) Value: 2 vs. 0
  misc_feature: MA Experiment 108462 PARAMETER Experiment Name: At_Germinating_Seeds_cDNA_P Parameter: Tissue Value: Germinating Seeds
  misc_feature: MA Experiment ID: 108464 Result: Up-regulated in Transcription
  misc_feature: MA Experiment 108464 PARAMETER Experiment Name: At_Germinating_Seeds_cDNA_P Parameter: Age (day) Value: 4 vs. 0
  misc_feature: MA Experiment 108464 PARAMETER Experiment Name: At_Germinating_Seeds_cDNA_P Parameter: Tissue Value: Germinating Seeds
  misc_feature: MA Experiment ID: 108605 Result: Up-regulated in Transcription
  misc_feature: MA Experiment 108605 PARAMETER Experiment Name: At_100uM_ABA_cDNA_P Parameter: Timepoint (hr) Value: 6
  misc_feature: MA Experiment 108605 PARAMETER Experiment Name: At_100uM_ABA_cDNA_P Parameter: Tissue Value: Aerial
  misc_feature: MA Experiment 108605 PARAMETER Experiment Name: At_100uM_ABA_cDNA_P Parameter: Treatment Value: 100uM ABA vs. No Treatment
  misc_feature: MA Experiment ID: 108607 Result: Up-regulated in Transcription
  misc_feature: MA Experiment 108607 PARAMETER Experiment Name: At_100uM_ABA_cDNA_P Parameter: Timepoint (hr) Value: 4
  misc_feature: MA Experiment 108607 PARAMETER Experiment Name: At_100uM_ABA_cDNA_P Parameter: Tissue Value: Aerial
  misc_feature: MA Experiment 108607 PARAMETER Experiment Name: At_100uM_ABA_cDNA_P Parameter: Treatment Value: 100uM ABA vs. No Treatment
  misc_feature: MA Experiment ID: 108608 Result: Up-regulated in Transcription
  misc_feature: MA Experiment 108608 PARAMETER Experiment Name: At_100uM_ABA_cDNA_P Parameter: Timepoint (hr) Value: 1
  misc_feature: MA Experiment 108608 PARAMETER Experiment Name: At_100uM_ABA_cDNA_P Parameter: Tissue Value: Aerial
  misc_feature: MA Experiment 108608 PARAMETER Experiment Name: At_100uM_ABA_cDNA_P Parameter: Treatment Value: 100uM ABA vs. No Treatment
  misc_feature: MA Experiment ID: 108609 Result: Up-regulated in Transcription
  misc_feature: MA Experiment 108609 PARAMETER Experiment Name: At_100uM_ABA_cDNA_P Parameter: Timepoint (hr) Value: 24
  misc_feature: MA Experiment 108609 PARAMETER Experiment Name: At_100uM_ABA_cDNA_P Parameter: Tissue Value: Aerial
  misc_feature: MA Experiment 108609 PARAMETER Experiment Name: At_100uM_ABA_cDNA_P Parameter: Treatment Value: 100uM ABA vs. No Treatment
  misc_feature: MA Experiment ID: 20000069 Result: Up-regulated in Transcription
  misc_feature: MA Experiment 20000069 PARAMETER Experiment Name: At_100uM_ABA_Mutants_cDNA_P Parameter: Plant Line Value: CS23
  misc_feature: MA Experiment 20000069 PARAMETER Experiment Name: At_100uM_ABA_Mutants_cDNA_P Parameter: Timepoint (hr) Value: 6
  misc_feature: MA Experiment 20000069 PARAMETER Experiment Name: At_100uM_ABA_Mutants_cDNA_P Parameter: Tissue Value: Aerial
  misc_feature: MA Experiment 20000069 PARAMETER Experiment Name: At_100uM_ABA_Mutants_cDNA_P Parameter: Treatment Value: 100uM ABA vs. No Treatment
  misc_feature: MA Experiment ID: 20000070 Result: Up-regulated in Transcription
  misc_feature: MA Experiment 20000070 PARAMETER Experiment Name: At_100uM_ABA_Mutants_cDNA_P Parameter: Plant Line Value: CS24
  misc_feature: MA Experiment 20000070 PARAMETER Experiment Name: At_100uM_ABA_Mutants_cDNA_P Parameter: Timepoint (hr) Value: 6
  misc_feature: MA Experiment 20000070 PARAMETER Experiment Name: At_100uM_ABA_Mutants_cDNA_P Parameter: Tissue Value: Aerial
  misc_feature: MA Experiment 20000070 PARAMETER Experiment Name: At_100uM_ABA_Mutants_cDNA_P Parameter: Treatment Value: 100uM ABA vs. No Treatment
  misc_feature: MA Experiment ID: 20000071 Result: Up-regulated in Transcription
  misc_feature: MA Experiment 20000071 PARAMETER Experiment Name: At_100uM_ABA_Mutants_cDNA_P Parameter: Plant Line Value: CS8104
  misc_feature: MA Experiment 20000071 PARAMETER Experiment Name: At_100uM_ABA_Mutants_cDNA_P Parameter: Timepoint (hr) Value: 6
  misc_feature: MA Experiment 20000071 PARAMETER Experiment Name: At_100uM_ABA_Mutants_cDNA_P Parameter: Tissue Value: Aerial
  misc_feature: MA Experiment 20000071 PARAMETER Experiment Name: At_100uM_ABA_Mutants_cDNA_P Parameter: Treatment Value: 100uM ABA vs. No Treatment
  misc_feature: MA Experiment ID: 20000072 Result: Up-regulated in Transcription
  misc_feature: MA Experiment 20000072 PARAMETER Experiment Name: At_100uM_ABA_Mutants_cDNA_P Parameter: Plant Line Value: CS8105
  misc_feature: MA Experiment 20000072 PARAMETER Experiment Name: At_100uM_ABA_Mutants_cDNA_P Parameter: Timepoint (hr) Value: 6
  misc_feature: MA Experiment 20000072 PARAMETER Experiment Name: At_100uM_ABA_Mutants_cDNA_P Parameter: Tissue Value: Aerial
  misc_feature: MA Experiment 20000072 PARAMETER Experiment Name: At_100uM_ABA_Mutants_cDNA_P Parameter: Treatment Value: 100uM ABA vs. No Treatment
  misc_feature: MA Experiment ID: 20000086 Result: Up-regulated in Transcription
  misc_feature: MA Experiment 20000086 PARAMETER Experiment Name: At_100uM_ABA_Mutants_cDNA_P Parameter: Plant Line Value: CS22
  misc_feature: MA Experiment 20000086 PARAMETER Experiment Name: At_100uM_ABA_Mutants_cDNA_P Parameter: Timepoint (hr) Value: 6
  misc_feature: MA Experiment 20000086 PARAMETER Experiment Name: At_100uM_ABA_Mutants_cDNA_P Parameter: Tissue Value: Aerial
  misc_feature: MA Experiment 20000086 PARAMETER Experiment Name: At_100uM_ABA_Mutants_cDNA_P Parameter: Treatment Value: 100uM ABA vs. No Treatment
  misc_feature: MA Experiment ID: 20000087 Result: Up-regulated in Transcription
  misc_feature: MA Experiment 20000087 PARAMETER Experiment Name: At_100uM_ABA_Mutants_cDNA_P Parameter: Plant Line Value: WS
  misc_feature: MA Experiment 20000087 PARAMETER Experiment Name: At_100uM_ABA_Mutants_cDNA_P Parameter: Timepoint (hr) Value: 6
  misc_feature: MA Experiment 20000087 PARAMETER Experiment Name: At_100uM_ABA_Mutants_cDNA_P Parameter: Tissue Value: Aerial
  misc_feature: MA Experiment 20000087 PARAMETER Experiment Name: At_100uM_ABA_Mutants_cDNA_P Parameter: Treatment Value: 100uM ABA vs. No Treatment
  misc_feature: MA Experiment ID: 20000088 Result: Up-regulated in Transcription
  misc_feature: MA Experiment 20000088 PARAMETER Experiment Name: At_100uM_ABA_Mutants_cDNA_P Parameter: Plant Line Value: Landsberg
  misc_feature: MA Experiment 20000088 PARAMETER Experiment Name: At_100uM_ABA_Mutants_cDNA_P Parameter: Timepoint (hr) Value: 6
  misc_feature: MA Experiment 20000088 PARAMETER Experiment Name: At_100uM_ABA_Mutants_cDNA_P Parameter: Tissue Value: Aerial
  misc_feature: MA Experiment 20000088 PARAMETER Experiment Name: At_100uM_ABA_Mutants_cDNA_P Parameter: Treatment Value: 100uM ABA vs. No Treatment
  misc_feature: MA Experiment ID: 20000093 Result: Down-regulated in Transcription
  misc_feature: MA Experiment 20000093 PARAMETER Experiment Name: At_42deg_Heat_cDNA_P Parameter: Temperature (deg C) Value: 42 vs. 22
  misc_feature: MA Experiment 20000093 PARAMETER Experiment Name: At_42deg_Heat_cDNA_P Parameter: Timepoint (hr) Value: 0.5
  misc_feature: MA Experiment 20000093 PARAMETER Experiment Name: At_42deg_Heat_cDNA_P Parameter: Tissue Value: Aerial
  misc_feature: MA Experiment ID: 20000111 Result: Down-regulated in Transcription
  misc_feature: MA Experiment 20000111 PARAMETER Experiment Name: At_42deg_Heat_cDNA_P Parameter: Temperature (deg C) Value: 42 vs. 22
  misc_feature: MA Experiment 20000111 PARAMETER Experiment Name: At_42deg_Heat_cDNA_P Parameter: Timepoint (hr) Value: 6
  misc_feature: MA Experiment 20000111 PARAMETER Experiment Name: At_42deg_Heat_cDNA_P Parameter: Tissue Value: Aerial
  misc_feature: MA Experiment ID: 20000112 Result: Down-regulated in Transcription
  misc_feature: MA Experiment 20000112 PARAMETER Experiment Name: At_42deg_Heat_cDNA_P Parameter: Temperature (deg C) Value: 42 vs. 22
  misc_feature: MA Experiment 20000112 PARAMETER Experiment Name: At_42deg_Heat_cDNA_P Parameter: Timepoint (hr) Value: 2
  misc_feature: MA Experiment 20000112 PARAMETER Experiment Name: At_42deg_Heat_cDNA_P Parameter: Tissue Value: Aerial
  misc_feature: MA Experiment ID: 20000113 Result: Down-regulated in Transcription
  misc_feature: MA Experiment 20000113 PARAMETER Experiment Name: At_42deg_Heat_cDNA_P Parameter: Temperature (deg C) Value: 42 vs. 22
  misc_feature: MA Experiment 20000113 PARAMETER Experiment Name: At_42deg_Heat_cDNA_P Parameter: Timepoint (hr) Value: 8
  misc_feature: MA Experiment 20000113 PARAMETER Experiment Name: At_42deg_Heat_cDNA_P Parameter: Tissue Value: Aerial
  misc_feature: MA Experiment ID: 20000117 Result: Up-regulated in Transcription
  misc_feature: MA Experiment 20000117 PARAMETER Experiment Name: At_100uM_ABA_Mutants_cDNA_P Parameter: Plant Line Value: Columbia
  misc_feature: MA Experiment 20000117 PARAMETER Experiment Name: At_100uM_ABA_Mutants_cDNA_P Parameter: Timepoint (hr) Value: 6
  misc_feature: MA Experiment 20000117 PARAMETER Experiment Name: At_100uM_ABA_Mutants_cDNA_P Parameter: Tissue Value: Aerial
  misc_feature: MA Experiment 20000117 PARAMETER Experiment Name: At_100uM_ABA_Mutants_cDNA_P Parameter: Treatment Value: 100uM ABA vs. No Treatment
  misc_feature: MA Experiment ID: 20000144 Result: Down-regulated in Transcription
  misc_feature: MA Experiment 20000144 PARAMETER Experiment Name: At_42deg_Heat_cDNA_P Parameter: Temperature (deg C) Value: 42 vs. 22
  misc_feature: MA Experiment 20000144 PARAMETER Experiment Name: At_42deg_Heat_cDNA_P Parameter: Timepoint (hr) Value: 1
  misc_feature: MA Experiment 20000144 PARAMETER Experiment Name: At_42deg_Heat_cDNA_P Parameter: Tissue Value: Aerial
  misc_feature: MA Experiment ID: 20000184 Result: Up-regulated in Transcription
  misc_feature: MA Experiment 20000184 PARAMETER Experiment Name: At_Shoots__P Parameter: Age (day) Value: 7
  misc_feature: MA Experiment 20000184 PARAMETER Experiment Name: At_Shoots__P Parameter: Tissue Value: Shoots vs. Whole Plant
  misc_feature: MA Experiment ID: 20000185 Result: Up-regulated in Transcription
  misc_feature: MA Experiment 20000185 PARAMETER Experiment Name: At_Roots__P Parameter: Age (day) Value: 7 vs. 21
  misc_feature: MA Experiment 20000185 PARAMETER Experiment Name: At_Roots__P Parameter: Organism Value: A. thaliana
  misc_feature: MA Experiment 20000185 PARAMETER Experiment Name: At_Roots__P Parameter: Tissue Value: Roots vs. Whole Plant
  misc_feature: MA Experiment ID: 20000267 Result: Up-regulated in Transcription
  misc_feature: MA Experiment 20000267 PARAMETER Experiment Name: At_Drought_P Parameter: Age (day) Value: 7
  misc_feature: MA Experiment 20000267 PARAMETER Experiment Name: At_Drought_P Parameter: Organism Value: A. thaliana
  misc_feature: MA Experiment 20000267 PARAMETER Experiment Name: At_Drought_P Parameter: Plant Line Value: WS
  misc_feature: MA Experiment 20000267 PARAMETER Experiment Name: At_Drought_P Parameter: Timepoint (hr) Value: 6
  misc_feature: MA Experiment 20000267 PARAMETER Experiment Name: At_Drought_P Parameter: Tissue Value: Whole Plant
  misc_feature: MA Experiment 20000267 PARAMETER Experiment Name: At_Drought_P Parameter: Treatment Value: Drought vs. No Drought
  misc_feature: MA Experiment ID: 20000268 Result: Up-regulated in Transcription
  misc_feature: MA Experiment 20000268 PARAMETER Experiment Name: At_100mM_NaCl__P Parameter: Age (day) Value: 14
  misc_feature: MA Experiment 20000268 PARAMETER Experiment Name: At_100mM_NaCl__P Parameter: Organism Value: A. thaliana
  misc_feature: MA Experiment 20000268 PARAMETER Experiment Name: At_100mM_NaCl__P Parameter: Plant Line Value: WS
  misc_feature: MA Experiment 20000268 PARAMETER Experiment Name: At_100mM_NaCl__P Parameter: Timepoint (hr) Value: 6
  misc_feature: MA Experiment 20000268 PARAMETER Experiment Name: At_100mM_NaCl__P Parameter: Tissue Value: Whole Plant
  misc_feature: MA Experiment 20000268 PARAMETER Experiment Name: At_100mM_NaCl__P Parameter: Treatment Value: 100mM NaCl vs. No Treatment
  misc_feature: MA Experiment ID: 20000436 Result: Up-regulated in Transcription
  misc_feature: MA Experiment 20000436 PARAMETER Experiment Name: At_Drought_P Parameter: Age (day) Value: 7
  misc_feature: MA Experiment 20000436 PARAMETER Experiment Name: At_Drought_P Parameter: Organism Value: A. thaliana
  misc_feature: MA Experiment 20000436 PARAMETER Experiment Name: At_Drought_P Parameter: Plant Line Value: WS
  misc_feature: MA Experiment 20000436 PARAMETER Experiment Name: At_Drought_P Parameter: Timepoint (hr) Value: 12
  misc_feature: MA Experiment 20000436 PARAMETER Experiment Name: At_Drought_P Parameter: Tissue Value: Whole Plant
  misc_feature: MA Experiment 20000436 PARAMETER Experiment Name: At_Drought_P Parameter: Treatment Value: Drought vs. No Drought
  misc_feature: MA Experiment ID: 20000437 Result: Up-regulated in Transcription
  misc_feature: MA Experiment 20000437 PARAMETER Experiment Name: At_Drought_P Parameter: Age (day) Value: 8
  misc_feature: MA Experiment 20000437 PARAMETER Experiment Name: At_Drought_P Parameter: Organism Value: A. thaliana
  misc_feature: MA Experiment 20000437 PARAMETER Experiment Name: At_Drought_P Parameter: Plant Line Value: WS
  misc_feature: MA Experiment 20000437 PARAMETER Experiment Name: At_Drought_P Parameter: Timepoint (hr) Value: 24
  misc_feature: MA Experiment 20000437 PARAMETER Experiment Name: At_Drought_P Parameter: Tissue Value: Whole Plant
  misc_feature: MA Experiment 20000437 PARAMETER Experiment Name: At_Drought_P Parameter: Treatment Value: Drought vs. No Drought
  misc_feature: MA Experiment ID: 20000438 Result: Up-regulated in Transcription
  misc_feature: MA Experiment 20000438 PARAMETER Experiment Name: At_Shoots__P Parameter: Age (day) Value: 14
  misc_feature: MA Experiment 20000438 PARAMETER Experiment Name: At_Shoots__P Parameter: Tissue Value: Shoots vs. Whole Plant
  misc_feature: MA Experiment ID: 20000439 Result: Up-regulated in Transcription
  misc_feature: MA Experiment 20000439 PARAMETER Experiment Name: At_Roots__P Parameter: Age (day) Value: 14 vs. 21
  misc_feature: MA Experiment 20000439 PARAMETER Experiment Name: At_Roots__P Parameter: Organism Value: A. thaliana
  misc_feature: MA Experiment 20000439 PARAMETER Experiment Name: At_Roots__P Parameter: Tissue Value: Roots vs. Whole Plant
  misc_feature: MA Experiment ID: 20000453 Result: Up-regulated in Transcription
  misc_feature: MA Experiment 20000453 PARAMETER Experiment Name: At_100uM_ABA_P Parameter: Age (day) Value: 15
  misc_feature: MA Experiment 20000453 PARAMETER Experiment Name: At_100uM_ABA_P Parameter: Organism Value: A. thaliana
  misc_feature: MA Experiment 20000453 PARAMETER Experiment Name: At_100uM_ABA_P Parameter: Plant Line Value: WS
  misc_feature: MA Experiment 20000453 PARAMETER Experiment Name: At_100uM_ABA_P Parameter: Timepoint (hr) Value: 24
  misc_feature: MA Experiment 20000453 PARAMETER Experiment Name: At_100uM_ABA_P Parameter: Tissue Value: Aerial
  misc_feature: MA Experiment 20000453 PARAMETER Experiment Name: At_100uM_ABA_P Parameter: Treatment Value: 100uM ABA vs. No Treatment
  misc_feature: MA Experiment ID: 20001248 Result: Down-regulated in Transcription
  misc_feature: MA Experiment 20001248 PARAMETER Experiment Name: At_Far-red-induction_P Parameter: Age (day) Value: 7
  misc_feature: MA Experiment 20001248 PARAMETER Experiment Name: At_Far-red-induction_P Parameter: Light Value: Far-red vs. White
  misc_feature: MA Experiment 20001248 PARAMETER Experiment Name: At_Far-red-induction_P Parameter: Organism Value: A. thaliana
  misc_feature: MA Experiment 20001248 PARAMETER Experiment Name: At_Far-red-induction_P Parameter: Plant Line Value: Columbia
  misc_feature: MA Experiment 20001248 PARAMETER Experiment Name: At_Far-red-induction_P Parameter: Timepoint (hr) Value: 4
  misc_feature: MA Experiment 20001248 PARAMETER Experiment Name: At_Far-red-induction_P Parameter: Tissue Value: Whole Plant
  misc_feature: MA Experiment ID: 20001450 Result: Down-regulated in Transcription
  misc_feature: MA Experiment 20001450 PARAMETER Experiment Name: At_Far-red-induction_P Parameter: Age (day) Value: 7
  misc_feature: MA Experiment 20001450 PARAMETER Experiment Name: At_Far-red-induction_P Parameter: Light Value: Far-red vs. White
  misc_feature: MA Experiment 20001450 PARAMETER Experiment Name: At_Far-red-induction_P Parameter: Organism Value: A. thaliana
  misc_feature: MA Experiment 20001450 PARAMETER Experiment Name: At_Far-red-induction_P Parameter: Plant Line Value: Columbia
  misc_feature: MA Experiment 20001450 PARAMETER Experiment Name: At_Far-red-induction_P Parameter: Timepoint (hr) Value: 8
  misc_feature: MA Experiment 20001450 PARAMETER Experiment Name: At_Far-red-induction_P Parameter: Tissue Value: Whole Plant
  misc_feature: MA Experiment ID: 20001451 Result: Down-regulated in Transcription
  misc_feature: MA Experiment 20001451 PARAMETER Experiment Name: At_Far-red-induction_P Parameter: Age (day) Value: 7
  misc_feature: MA Experiment 20001451 PARAMETER Experiment Name: At_Far-red-induction_P Parameter: Light Value: Far-red vs. White
  misc_feature: MA Experiment 20001451 PARAMETER Experiment Name: At_Far-red-induction_P Parameter: Organism Value: A. thaliana
  misc_feature: MA Experiment 20001451 PARAMETER Experiment Name: At_Far-red-induction_P Parameter: Plant Line Value: Columbia
  misc_feature: MA Experiment 20001451 PARAMETER Experiment Name: At_Far-red-induction_P Parameter: Timepoint (hr) Value: 24
  misc_feature: MA Experiment 20001451 PARAMETER Experiment Name: At_Far-red-induction_P Parameter: Tissue Value: Whole Plant
  misc_feature: MA Experiment ID: 20001554 Result: Up-regulated in Transcription
  misc_feature: MA Experiment 20001554 PARAMETER Experiment Name: At_Drought_Soil_Dry_P Parameter: Age (day) Value: 21
  misc_feature: MA Experiment 20001554 PARAMETER Experiment Name: At_Drought_Soil_Dry_P Parameter: Organism Value: A. thaliana
  misc_feature: MA Experiment 20001554 PARAMETER Experiment Name: At_Drought_Soil_Dry_P Parameter: Plant Line Value: WS
  misc_feature: MA Experiment 20001554 PARAMETER Experiment Name: At_Drought_Soil_Dry_P Parameter: Post Timepoint (hr) Value: None
  misc_feature: MA Experiment 20001554 PARAMETER Experiment Name: At_Drought_Soil_Dry_P Parameter: Post-Treatment Value: None
  misc_feature: MA Experiment 20001554 PARAMETER Experiment Name: At_Drought_Soil_Dry_P Parameter: Timepoint (day) Value: 7
  misc_feature: MA Experiment 20001554 PARAMETER Experiment Name: At_Drought_Soil_Dry_P Parameter: Treatment Value: Drought vs. No Drought
  misc_feature: MA Experiment ID: 20001556 Result: Up-regulated in Transcription
  misc_feature: MA Experiment 20001556 PARAMETER Experiment Name: At_Drought_Soil_Dry_P Parameter: Age (day) Value: 26
  misc_feature: MA Experiment 20001556 PARAMETER Experiment Name: At_Drought_Soil_Dry_P Parameter: Organism Value: A. thaliana
  misc_feature: MA Experiment 20001556 PARAMETER Experiment Name: At_Drought_Soil_Dry_P Parameter: Plant Line Value: WS
  misc_feature: MA Experiment 20001556 PARAMETER Experiment Name: At_Drought_Soil_Dry_P Parameter: Post Timepoint (hr) Value: None
  misc_feature: MA Experiment 20001556 PARAMETER Experiment Name: At_Drought_Soil_Dry_P Parameter: Post-Treatment Value: None
  misc_feature: MA Experiment 20001556 PARAMETER Experiment Name: At_Drought_Soil_Dry_P Parameter: Timepoint (day) Value: 12
  misc_feature: MA Experiment 20001556 PARAMETER Experiment Name: At_Drought_Soil_Dry_P Parameter: Treatment Value: Drought vs. No Drought
  misc_feature: MA Experiment ID: 20001559 Result: Up-regulated in Transcription
  misc_feature: MA Experiment 20001559 PARAMETER Experiment Name: At_Drought_Soil_Dry_P Parameter: Age (day) Value: 28
  misc_feature: MA Experiment 20001559 PARAMETER Experiment Name: At_Drought_Soil_Dry_P Parameter: Organism Value: A. thaliana
  misc_feature: MA Experiment 20001559 PARAMETER Experiment Name: At_Drought_Soil_Dry_P Parameter: Plant Line Value: WS
  misc_feature: MA Experiment 20001559 PARAMETER Experiment Name: At_Drought_Soil_Dry_P Parameter: Post Timepoint (hr) Value: 29
  misc_feature: MA Experiment 20001559 PARAMETER Experiment Name: At_Drought_Soil_Dry_P Parameter: Post-Treatment Value: Re-Water vs. No Drought
  misc_feature: MA Experiment 20001559 PARAMETER Experiment Name: At_Drought_Soil_Dry_P Parameter: Timepoint (day) Value: 14
  misc_feature: MA Experiment 20001559 PARAMETER Experiment Name: At_Drought_Soil_Dry_P Parameter: Treatment Value: Drought vs. No Drought
  misc_feature: MA Experiment ID: 20001911 Result: Up-regulated in Transcription
  misc_feature: MA Experiment 20001911 PARAMETER Experiment Name: At_Drought_Reproduction_P Parameter: Age (day) Value: 40
  misc_feature: MA Experiment 20001911 PARAMETER Experiment Name: At_Drought_Reproduction_P Parameter: Organism Value: A. thaliana
  misc_feature: MA Experiment 20001911 PARAMETER Experiment Name: At_Drought_Reproduction_P Parameter: Plant Line Value: WS
  misc_feature: MA Experiment 20001911 PARAMETER Experiment Name: At_Drought_Reproduction_P Parameter: Timepoint (day) Value: 10
  misc_feature: MA Experiment 20001911 PARAMETER Experiment Name: At_Drought_Reproduction_P Parameter: Tissue Value: Flowers
  misc_feature: MA Experiment 20001911 PARAMETER Experiment Name: At_Drought_Reproduction_P Parameter: Treatment Value: Drought vs. No Drought
agagaaaaaatacaaatcgttcaccggaaaaaaacaaaatggctcgtcgcgatgttctcctccctttcctcctccttctcgccaccgtctccgccgtagctttcgccgaagatgatccagactgtgtatacacattctacctcagaaccggatcgatctggaaagccggaaccgattcgatcatcagcgcaagaatctacgataaggacggtgactacatcggaatcaaaaaccttcaagcttgggctggattaatgggacctgattacaattacttcgagaggggtaatctcgacattttcagtggaagagcaccgtgtttacctagtccgatctgtgccttaaacctaacctccgatggctccggcgatcaccatggttggtacgttaattacgttgagatcacgacggctggtgttcacgcacagtgctcgacgcaggattttgagattgagcaatggctcgctactgatacttctccttatgagctcaccgccgtacggaacaattgtccggtcaagcttagggatagtgttagtcgggtcgggtctgagattcggaaaaagctttcttgggtcgtttaagtgatgtgttgtgattcgtgagacttgtctgtattgtttgtattctcgttgttcttgtgagtgtaatgtggcgttaatgaaatatgattcaa

SEQ ID NO: 105471 - protein, 193 aa, Arabidopsis thaliana
  peptide (1)..(193): Ceres Seq. ID no. 13617329
  misc_feature (41)..(165): Pfam Name: PLAT/LH2 domain Pfam Description: PLAT/LH2 domain
  misc_feature (13)..(193): Homolog of NCBI NO: 15236014 NR Description: expressed protein [Arabidopsis thaliana]
  misc_feature (13)..(193): Homolog of NCBI NO: 12667247 NR Description: dehydration stress-induced protein [Brassica
  misc_feature (13)..(193): Homolog of NCBI NO: 21553555 NR Description: dehydration stress-induced protein [Arabidopsis
  misc_feature (13)..(193): Homolog of NCBI NO: 18399899 NR Description: expressed protein [Arabidopsis thaliana]
  misc_feature (13)..(182): Homolog of NCBI NO: 15982879 NR Description: AT4g39730/T19P19_120 [Arabidopsis thaliana]
  misc_feature (32)..(186): Homolog of NCBI NO: 32492140 NR Description: OSJNBa0036B21.4 [Oryza sativa (japonica
  misc_feature (32)..(170): Homolog of NCBI NO: 32492139 NR Description: OSJNBa0036B21.2 [Oryza sativa (japonica
  misc_feature (20)..(170): Homolog of NCBI NO: 10241929 NR Description: elicitor inducible protein [Nicotiana tabacum]
  misc_feature (13)..(170): Homolog of NCBI NO: 21740887 NR Description: OSJNBa0036B21.1 [Oryza sativa (japonica
  misc_feature (24)..(179): Homolog of NCBI NO: 7542598 NR Description: TMV-induced protein I [Capsicum annuum]
RKNTNRSPEKNKMARRDVLLPFLLLLATVSAVAFAEDDPDCVYTFYLRTGSIWKAGTDSIISARIYDKDGDYIGIKNLQAWAGLMGPDYNYFERGNLDIFSGRAPCLPSPICALNLTSDGSGDHHGWYVNYVEITTAGVHAQCSTQDFEIEQWLATDTSPYELTAVRNNCPVKLRDSVSRVGSEIRKKLSWVV

SEQ ID NO: 105472 - protein, 181 aa, Arabidopsis thaliana; identical to SEQ ID NO: 27247
  peptide (1)..(181): Ceres Seq. ID no. 13617330
  misc_feature (29)..(153): Pfam Name: PLAT/LH2 domain Pfam Description: PLAT/LH2 domain
  misc_feature (1)..(181): Homolog of NCBI NO: 15236014 NR Description: expressed protein [Arabidopsis thaliana]
  misc_feature (1)..(181): Homolog of NCBI NO: 12667247 NR Description: dehydration stress-induced protein [Brassica
  misc_feature (1)..(181): Homolog of NCBI NO: 21553555 NR Description: dehydration stress-induced protein [Arabidopsis
  misc_feature (1)..(181): Homolog of NCBI NO: 18399899 NR Description: expressed protein [Arabidopsis thaliana]
  misc_feature (1)..(170): Homolog of NCBI NO: 15982879 NR Description: AT4g39730/T19P19_120 [Arabidopsis thaliana]
  misc_feature (20)..(174): Homolog of NCBI NO: 32492140 NR Description: OSJNBa0036B21.4 [Oryza sativa (japonica
  misc_feature (20)..(158): Homolog of NCBI NO: 32492139 NR Description: OSJNBa0036B21.2 [Oryza sativa (japonica
  misc_feature (8)..(158): Homolog of NCBI NO: 10241929 NR Description: elicitor inducible protein [Nicotiana tabacum]
  misc_feature (1)..(158): Homolog of NCBI NO: 21740887 NR Description: OSJNBa0036B21.1 [Oryza sativa (japonica
  misc_feature (12)..(167): Homolog of NCBI NO: 7542598 NR Description: TMV-induced protein I [Capsicum annuum]

SEQ ID NO: 105473 - protein, 109 aa, Arabidopsis thaliana; identical to SEQ ID NO: 27248
  peptide (1)..(109): Ceres Seq. ID no. 13617331
  misc_feature (1)..(81): Pfam Name: PLAT/LH2 domain Pfam Description: PLAT/LH2 domain
  misc_feature (1)..(109): Homolog of NCBI NO: 15236014 NR Description: expressed protein [Arabidopsis thaliana]
  misc_feature (1)..(109): Homolog of NCBI NO: 12667247 NR Description: dehydration stress-induced protein [Brassica
  misc_feature (1)..(109): Homolog of NCBI NO: 21553555 NR Description: dehydration stress-induced protein [Arabidopsis
  misc_feature (1)..(109): Homolog of NCBI NO: 18399899 NR Description: expressed protein [Arabidopsis thaliana]
  misc_feature (1)..(98): Homolog of NCBI NO: 15982879 NR Description: AT4g39730/T19P19_120 [Arabidopsis thaliana]
  misc_feature (1)..(102): Homolog of NCBI NO: 32492140 NR Description: OSJNBa0036B21.4 [Oryza sativa (japonica
  misc_feature (1)..(86): Homolog of NCBI NO: 32492139 NR Description: OSJNBa0036B21.2 [Oryza sativa (japonica
  misc_feature (1)..(86): Homolog of NCBI NO: 10241929 NR Description: elicitor inducible protein [Nicotiana tabacum]
  misc_feature (1)..(86): Homolog of NCBI NO: 21740887 NR Description: OSJNBa0036B21.1 [Oryza sativa (japonica
  misc_feature (1)..(95): Homolog of NCBI NO: 7542598 NR Description: TMV-induced protein I [Capsicum annuum]

SEQ ID NO: 105474 - DNA, 1150 bp, Arabidopsis thaliana
  misc_feature (1)..(1150): Ceres Seq. ID no. 13617332
  misc_feature: MA Experiment ID: 108434 Result: Up-regulated in Transcription
  misc_feature: MA Experiment 108434 PARAMETER Experiment Name: At_Root_Tips_cDNA_P Parameter: Tissue Value: Root Tips
  misc_feature: MA Experiment ID: 108461 Result: Down-regulated in Transcription
  misc_feature: MA Experiment 108461 PARAMETER Experiment Name: At_Germinating_Seeds_cDNA_P Parameter: Age (day) Value: 1 vs. 0
  misc_feature: MA Experiment 108461 PARAMETER Experiment Name: At_Germinating_Seeds_cDNA_P Parameter: Tissue Value: Germinating Seeds
  misc_feature: MA Experiment ID: 108462 Result: Down-regulated in Transcription
  misc_feature: MA Experiment 108462 PARAMETER Experiment Name: At_Germinating_Seeds_cDNA_P Parameter: Age (day) Value: 2 vs. 0
  misc_feature: MA Experiment 108462 PARAMETER Experiment Name: At_Germinating_Seeds_cDNA_P Parameter: Tissue Value: Germinating Seeds
  misc_feature: MA Experiment ID: 108463 Result: Down-regulated in Transcription
  misc_feature: MA Experiment 108463 PARAMETER Experiment Name: At_Germinating_Seeds_cDNA_P Parameter: Age (day) Value: 3 vs. 0
  misc_feature: MA Experiment 108463 PARAMETER Experiment Name: At_Germinating_Seeds_cDNA_P Parameter: Tissue Value: Germinating Seeds
  misc_feature: MA Experiment ID: 108464 Result: Down-regulated in Transcription
  misc_feature: MA Experiment 108464 PARAMETER Experiment Name: At_Germinating_Seeds_cDNA_P Parameter: Age (day) Value: 4 vs. 0
  misc_feature: MA Experiment 108464 PARAMETER Experiment Name: At_Germinating_Seeds_cDNA_P Parameter: Tissue Value: Germinating Seeds
  misc_feature: MA Experiment ID: 108572 Result: Down-regulated in Transcription
  misc_feature: MA Experiment 108572 PARAMETER Experiment Name: At_Drought_cDNA_P Parameter: Timepoint (hr) Value: 1
  misc_feature: MA Experiment 108572 PARAMETER Experiment Name: At_Drought_cDNA_P Parameter: Tissue Value: Aerial
  misc_feature: MA Experiment 108572 PARAMETER Experiment Name: At_Drought_cDNA_P Parameter: Treatment Value: Drought vs. No Drought
  misc_feature: MA Experiment ID: 108576 Result: Down-regulated in Transcription
  misc_feature: MA Experiment 108576 PARAMETER Experiment Name: At_42deg_Heat_cDNA_P Parameter: Temperature (deg C) Value: 42 vs. 22
  misc_feature: MA Experiment 108576 PARAMETER Experiment Name: At_42deg_Heat_cDNA_P Parameter: Timepoint (hr) Value: 1
  misc_feature: MA Experiment 108576 PARAMETER Experiment Name: At_42deg_Heat_cDNA_P Parameter: Tissue Value: Aerial
  misc_feature: MA Experiment ID: 20000072 Result: Up-regulated in Transcription
  misc_feature: MA Experiment 20000072 PARAMETER Experiment Name: At_100uM_ABA_Mutants_cDNA_P Parameter: Plant Line Value: CS8105
  misc_feature: MA Experiment 20000072 PARAMETER Experiment Name: At_100uM_ABA_Mutants_cDNA_P Parameter: Timepoint (hr) Value: 6
  misc_feature: MA Experiment 20000072 PARAMETER Experiment Name: At_100uM_ABA_Mutants_cDNA_P Parameter: Tissue Value: Aerial
  misc_feature: MA Experiment 20000072 PARAMETER Experiment Name: At_100uM_ABA_Mutants_cDNA_P Parameter: Treatment Value: 100uM ABA vs. No Treatment
  misc_feature: MA Experiment ID: 20000111 Result: Down-regulated in Transcription
  misc_feature: MA Experiment 20000111 PARAMETER Experiment Name: At_42deg_Heat_cDNA_P Parameter: Temperature (deg C) Value: 42 vs. 22
  misc_feature: MA Experiment 20000111 PARAMETER Experiment Name: At_42deg_Heat_cDNA_P Parameter: Timepoint (hr) Value: 6
  misc_feature: MA Experiment 20000111 PARAMETER Experiment Name: At_42deg_Heat_cDNA_P Parameter: Tissue Value: Aerial
  misc_feature: MA Experiment ID: 20000113 Result: Down-regulated in Transcription
  misc_feature: MA Experiment 20000113 PARAMETER Experiment Name: At_42deg_Heat_cDNA_P Parameter: Temperature (deg C) Value: 42 vs. 22
  misc_feature: MA Experiment 20000113 PARAMETER Experiment Name: At_42deg_Heat_cDNA_P Parameter: Timepoint (hr) Value: 8
  misc_feature: MA Experiment 20000113 PARAMETER Experiment Name: At_42deg_Heat_cDNA_P Parameter: Tissue Value: Aerial
  misc_feature: MA Experiment ID: 20000144 Result: Down-regulated in Transcription
  misc_feature: MA Experiment 20000144 PARAMETER Experiment Name: At_42deg_Heat_cDNA_P Parameter: Temperature (deg C) Value: 42 vs. 22
  misc_feature: MA Experiment 20000144 PARAMETER Experiment Name: At_42deg_Heat_cDNA_P Parameter: Timepoint (hr) Value: 1
  misc_feature: MA Experiment 20000144 PARAMETER Experiment Name: At_42deg_Heat_cDNA_P Parameter: Tissue Value: Aerial
  misc_feature: MA Experiment ID: 20000173 Result: Down-regulated in Transcription
  misc_feature: MA Experiment 20000173 PARAMETER Experiment Name: At_42deg_Heat_P Parameter: Age (day) Value: 14
  misc_feature: MA Experiment 20000173 PARAMETER Experiment Name: At_42deg_Heat_P Parameter: Organism Value: A. thaliana
  misc_feature: MA Experiment 20000173 PARAMETER Experiment Name: At_42deg_Heat_P Parameter: Plant Line Value: WS
  misc_feature: MA Experiment 20000173 PARAMETER Experiment Name: At_42deg_Heat_P Parameter: Temperature (deg C) Value: 42 vs. 22
  misc_feature: MA Experiment 20000173 PARAMETER Experiment Name: At_42deg_Heat_P Parameter: Timepoint (hr) Value: 6
  misc_feature: MA Experiment 20000173 PARAMETER Experiment Name: At_42deg_Heat_P Parameter: Tissue Value: Aerial
  misc_feature: MA Experiment ID: 20000179 Result: Down-regulated in Transcription
  misc_feature: MA Experiment 20000179 PARAMETER Experiment Name: At_Germinating_Seeds_P Parameter: Age (hr) Value: 6 vs. 0
  misc_feature: MA Experiment 20000179 PARAMETER Experiment Name: At_Germinating_Seeds_P Parameter: Tissue Value: Germinating Seeds
  misc_feature: MA Experiment ID: 20000180 Result: Down-regulated in Transcription
  misc_feature: MA Experiment 20000180 PARAMETER Experiment Name: At_Germinating_Seeds_P Parameter: Age (hr) Value: 24 vs. 0
  misc_feature: MA Experiment 20000180 PARAMETER Experiment Name: At_Germinating_Seeds_P Parameter: Tissue Value: Germinating Seeds
  misc_feature: MA Experiment ID: 20000184 Result: Down-regulated in Transcription
  misc_feature: MA Experiment 20000184 PARAMETER Experiment Name: At_Shoots__P Parameter: Age (day) Value: 7
  misc_feature: MA Experiment 20000184 PARAMETER Experiment Name: At_Shoots__P Parameter: Tissue Value: Shoots vs. Whole Plant
  misc_feature: MA Experiment ID: 20001905 Result: Down-regulated in Transcription
  misc_feature: MA Experiment 20001905 PARAMETER Experiment Name: At_Drought_Reproduction_P Parameter: Age (day) Value: 40
  misc_feature: MA Experiment 20001905 PARAMETER Experiment Name: At_Drought_Reproduction_P Parameter: Organism Value: A. thaliana
  misc_feature: MA Experiment 20001905 PARAMETER Experiment Name: At_Drought_Reproduction_P Parameter: Plant Line Value: WS
  misc_feature: MA Experiment 20001905 PARAMETER Experiment Name: At_Drought_Reproduction_P Parameter: Timepoint (day) Value: 10
  misc_feature: MA Experiment 20001905 PARAMETER Experiment Name: At_Drought_Reproduction_P Parameter: Tissue Value: Rosettes
  misc_feature: MA Experiment 20001905 PARAMETER Experiment Name: At_Drought_Reproduction_P Parameter: Treatment Value: Drought vs. No Drought
aaataaacagagaagaagaaccaaattcaatgcttccttgtcgccgtcttgttctgtcctgcaagaatcaagctgccagttttctccgaaggtgtggaccatcgaaacgaattcaatcagtcaattactgtaaatcaacaagacagggccatgaaattccagatgtgaaacctctttttcccacaggaggaggaactcaagctccttctcgttctcgtgctcgttatgctgttcctgcgattctacttggttttgccggattcgtcggctttcttcattacaacgacgaaaggagagcagttcctagaggtcaagcaagcagcaatagcggttgtggctgcggttctaatacaactgtcaaaggtccgattatcggaggtccgtttacgcttgtgagcacagaaaacaagatagtcacagagaatgacttttgtggtaaatgggttctactctactttggatactctttttccccggatgttggacctgagcaactaaagatgatgtccaaagctgttgataaactagagtctaaacataacgagaagattctgcctgtctttgtcactcttgaccctcaacgagacacaccttctcatctccacgcatacttgaaagagtttgatagtagaatactaggactaaccgggactgcaagtgcaatgaggcaaatggcacaagagtatcgtgtctacttcaagaaggttcaagaggacggagaagattatctcgttgatacttctcacaacatgtacttgataaatccgaagatggagattgtgaggtgctttggggttgagtataatccagacgagctctcacaagagcttcttaaagaagttgcttctgtttcacagtgacccattttgaccaaacactaaagagagaaacactaggatgctctttgattgttttcttcaattcgtgatttttttaaagacgattttgttaatccgtctcttattcttgaaaaaatgaaaattagatggtagatcctgcaaagtcgaaaaaatccaaaatttcccatatagtaatattttattcttcaatgttatttttgttgttagagttgtttcttttacttatttacaaattttctttcaacgtttgtaacataatcatcagttttcagttattaaataattctctg

SEQ ID NO: 105475 - protein, 285 aa, Arabidopsis thaliana
  peptide (1)..(285): Ceres Seq. ID no. 13617333
  misc_feature (79)..(268): Pfam Name: SCO1/SenC Pfam Description: SCO1/SenC
  misc_feature (10)..(285): Homolog of NCBI NO: 18420515 NR Description: expressed protein [Arabidopsis thaliana]
  misc_feature (21)..(285): Homolog of NCBI NO: 7487210 NR Description: hypothetical protein T19P19.130 - Arabidopsis >gi|3080443|emb|CAA18760.1| putative protein [Arabidopsis >gi|7270958|emb|CAB80637.1| putative protein [Arabidopsis
  misc_feature (10)..(175): Homolog of NCBI NO: 26450269 NR Description: unknown protein [Arabidopsis thaliana]
  misc_feature (79)..(280): Homolog of NCBI NO: 6403490 NR Description: putative SCO1 protein [Arabidopsis thaliana]
  misc_feature (79)..(280): Homolog of NCBI NO: 18398306 NR Description: SCO1 protein -related [Arabidopsis thaliana] putative SCO1 protein [Arabidopsis thaliana] putative SCO1 protein [Arabidopsis thaliana]
  misc_feature (80)..(277): Homolog of NCBI NO: 32420339 NR Description: hypothetical protein [Neurospora crassa]
  misc_feature (16)..(280): Homolog of NCBI NO: 40740887 NR Description: hypothetical protein AN4842.2 [Aspergillus
  misc_feature (61)..(276): Homolog of NCBI NO: 19112079 NR Description: putative cytochrome C oxidase assembly protein
  misc_feature (124)..(281): Homolog of NCBI NO: 19920710 NR Description: CG8885-PA [Drosophila melanogaster]
  misc_feature (122)..(276): Homolog of NCBI NO: 4406651 NR Description: h-sco1 [Homo sapiens]
INREEEPNSMLPCRRLVLSCKNQAASFLRRCGPSKRIQSVNYCKSTRQGHEIPDVKPLFPTGGGTQAPSRSRARYAVPAILLGFAGFVGFLHYNDERRAVPRGQASSNSGCGCGSNTTVKGPIIGGPFTLVSTENKIVTENDFCGKWVLLYFGYSFSPDVGPEQLKMMSKAVDKLESKHNEKILPVFVTLDPQRDTPSHLHAYLKEFDSRILGLTGTASAMRQMAQEYRVYFKKVQEDGEDYLVDTSHNMYLINPKMEIVRCFGVEYNPDELSQELLKEVASVSQ

SEQ ID NO: 105476 - protein, 276 aa, Arabidopsis thaliana; identical to SEQ ID NO: 24352
  peptide (1)..(276): Ceres Seq. ID no. 13617334
  misc_feature (70)..(259): Pfam Name: SCO1/SenC Pfam Description: SCO1/SenC
  misc_feature (1)..(276): Homolog of NCBI NO: 18420515 NR Description: expressed protein [Arabidopsis thaliana]
  misc_feature (12)..(276): Homolog of NCBI NO: 7487210 NR Description: hypothetical protein T19P19.130 - Arabidopsis >gi|3080443|emb|CAA18760.1| putative protein [Arabidopsis >gi|7270958|emb|CAB80637.1| putative protein [Arabidopsis
  misc_feature (1)..(166): Homolog of NCBI NO: 26450269 NR Description: unknown protein [Arabidopsis thaliana]
  misc_feature (70)..(271): Homolog of NCBI NO: 6403490 NR Description: putative SCO1 protein [Arabidopsis thaliana]
  misc_feature (70)..(271): Homolog of NCBI NO: 18398306 NR Description: SCO1 protein -related [Arabidopsis thaliana] putative SCO1 protein [Arabidopsis thaliana] putative SCO1 protein [Arabidopsis thaliana]
  misc_feature (71)..(268): Homolog of NCBI NO: 32420339 NR Description: hypothetical protein [Neurospora crassa]
  misc_feature (7)..(271): Homolog of NCBI NO: 40740887 NR Description: hypothetical protein AN4842.2 [Aspergillus
  misc_feature (52)..(267): Homolog of NCBI NO: 19112079 NR Description: putative cytochrome C oxidase assembly protein
  misc_feature (115)..(272): Homolog of NCBI NO: 19920710 NR Description: CG8885-PA [Drosophila melanogaster]
  misc_feature (113)..(267): Homolog of NCBI NO: 4406651 NR Description: h-sco1 [Homo sapiens]

SEQ ID NO: 105477 - DNA, 1654 bp, Arabidopsis thaliana
  misc_feature (1)..(1654): Ceres Seq. ID no. 13617335
  misc_feature: MA Experiment ID: 20000234 Result: Up-regulated in Transcription
  misc_feature: MA Experiment 20000234 PARAMETER Experiment Name: At_Siliques_P Parameter: Age (day) Value: 21
  misc_feature: MA Experiment 20000234 PARAMETER Experiment Name: At_Siliques_P Parameter: Organism Value: A. thaliana
  misc_feature: MA Experiment 20000234 PARAMETER Experiment Name: At_Siliques_P Parameter: Plant Line Value: WS
  misc_feature: MA Experiment 20000234 PARAMETER Experiment Name: At_Siliques_P Parameter: Tissue Value: Less Than 5mm Siliques vs. Whole Plant
  misc_feature: MA Experiment ID: 20000235 Result: Up-regulated in Transcription
  misc_feature: MA Experiment 20000235 PARAMETER Experiment Name: At_Siliques_P Parameter: Age (day) Value: 21
  misc_feature: MA Experiment 20000235 PARAMETER Experiment Name: At_Siliques_P Parameter: Organism Value: A. thaliana
  misc_feature: MA Experiment 20000235 PARAMETER Experiment Name: At_Siliques_P Parameter: Plant Line Value: WS
  misc_feature: MA Experiment 20000235 PARAMETER Experiment Name: At_Siliques_P Parameter: Tissue Value: 5-10mm Siliques vs. Whole Plant
  misc_feature: MA Experiment ID: 20000437 Result: Down-regulated in Transcription
  misc_feature: MA Experiment 20000437 PARAMETER Experiment Name: At_Drought_P Parameter: Age (day) Value: 8
  misc_feature: MA Experiment 20000437 PARAMETER Experiment Name: At_Drought_P Parameter: Organism Value: A. thaliana
  misc_feature: MA Experiment 20000437 PARAMETER Experiment Name: At_Drought_P Parameter: Plant Line Value: WS
  misc_feature: MA Experiment 20000437 PARAMETER Experiment Name: At_Drought_P Parameter: Timepoint (hr) Value: 24
  misc_feature: MA Experiment 20000437 PARAMETER Experiment Name: At_Drought_P Parameter: Tissue Value: Whole Plant
  misc_feature: MA Experiment 20000437 PARAMETER Experiment Name: At_Drought_P Parameter: Treatment Value: Drought vs. No Drought
  misc_feature: MA Experiment ID: 20001557 Result: Up-regulated in Transcription
  misc_feature: MA Experiment 20001557 PARAMETER Experiment Name: At_Drought_Soil_Dry_P Parameter: Age (day) Value: 27
  misc_feature: MA Experiment 20001557 PARAMETER Experiment Name: At_Drought_Soil_Dry_P Parameter: Organism Value: A. thaliana
  misc_feature: MA Experiment 20001557 PARAMETER Experiment Name: At_Drought_Soil_Dry_P Parameter: Plant Line Value: WS
  misc_feature: MA Experiment 20001557 PARAMETER Experiment Name: At_Drought_Soil_Dry_P Parameter: Post Timepoint (hr) Value: 3
  misc_feature: MA Experiment 20001557 PARAMETER Experiment Name: At_Drought_Soil_Dry_P Parameter: Post-Treatment Value: Re-Water vs. No Drought
  misc_feature: MA Experiment 20001557 PARAMETER Experiment Name: At_Drought_Soil_Dry_P Parameter: Timepoint (day) Value: 13
  misc_feature: MA Experiment 20001557 PARAMETER Experiment Name: At_Drought_Soil_Dry_P Parameter: Treatment Value: Drought vs. No Drought
  misc_feature: MA Experiment ID: 20001558 Result: Up-regulated in Transcription
  misc_feature: MA Experiment 20001558 PARAMETER Experiment Name: At_Drought_Soil_Dry_P Parameter: Age (day) Value: 27
  misc_feature: MA Experiment 20001558 PARAMETER Experiment Name: At_Drought_Soil_Dry_P Parameter: Organism Value: A. thaliana
  misc_feature: MA Experiment 20001558 PARAMETER Experiment Name: At_Drought_Soil_Dry_P Parameter: Plant Line Value: WS
  misc_feature: MA Experiment 20001558 PARAMETER Experiment Name: At_Drought_Soil_Dry_P Parameter: Post Timepoint (hr) Value: 6
  misc_feature: MA Experiment 20001558 PARAMETER Experiment Name: At_Drought_Soil_Dry_P Parameter: Post-Treatment Value: Re-Water vs. No Drought
  misc_feature: MA Experiment 20001558 PARAMETER Experiment Name: At_Drought_Soil_Dry_P Parameter: Timepoint (day) Value: 13
  misc_feature: MA Experiment 20001558 PARAMETER Experiment Name: At_Drought_Soil_Dry_P Parameter: Treatment Value: Drought vs. No Drought
  misc_feature: MA Experiment ID: 20001560 Result: Up-regulated in Transcription
  misc_feature: MA Experiment 20001560 PARAMETER Experiment Name: At_Drought_Soil_Dry_P Parameter: Age (day) Value: 28
  misc_feature: MA Experiment 20001560 PARAMETER Experiment Name: At_Drought_Soil_Dry_P Parameter: Organism Value: A. thaliana
  misc_feature: MA Experiment 20001560 PARAMETER Experiment Name: At_Drought_Soil_Dry_P Parameter: Plant Line Value: WS
  misc_feature: MA Experiment 20001560 PARAMETER Experiment Name: At_Drought_Soil_Dry_P Parameter: Post Timepoint (hr) Value: None
  misc_feature: MA Experiment 20001560 PARAMETER Experiment Name: At_Drought_Soil_Dry_P Parameter: Post-Treatment Value: None
  misc_feature: MA Experiment 20001560 PARAMETER Experiment Name: At_Drought_Soil_Dry_P Parameter: Timepoint (day) Value: 14
  misc_feature: MA Experiment 20001560 PARAMETER Experiment Name: At_Drought_Soil_Dry_P Parameter: Treatment Value: Drought vs. No Drought
gcttctctctctctctctttctcttttcctatatattgacaagcttgcgatctctgttcgctagatctgtctgaaacagtgaggggattcctaggtttcagagcaaagtaatgtctccactcaagtacttgtgttttagaaaggtactcttgttgttgctctattccagtctcttcctattctcttcttcttctttctttgcctcatcagttgatgatcatgagctacaacgaatagatcctcatttccgagtgagaagattgttggtgaaagatctggattcaactggtgatgatgatgaaaccaatcttcctcctcctcctaagaagaagaagcttcttactgattctgtttcatcatcatcatcatcatctggtactaagaagaatcaaaccaagctccttaaacccatctcttcttcttcttccaccaagaaccaaactaaactcgccaagaccaccaccatgggtacgtctcacaaacttaactccacaaaatcttcttctaacacaaccaagaccagctctgagctcaagaagctcaattccggaacaaaatccacaaattctacttcttcgatcaagaaatcagcagatctgtccaaatcaagctcatccaaaaacaaaaccaccataaaacccccaagttccaaactttcttcacctccatcagagaagaaatcacaaccctcctcaaaaccagtgaccaaatcgaaacaatccgagaaagaaatcaaaccattctggctagacgacgaagaagacgaagatttcgtaagcgaattcagagatctaccaacaagattccaaagatccctaatcccagacctagagcgaatctcaacaacatccaaaaactacatcaacaaagccaacaaacagatcaccaaaaacttcaaaccctatttcggcaacaaatacgcaccaaccatagcttccgtagtctctttcgtcttcatcctcgtccctctactcttagtctcactcattttcaacagattcaaagcttatttctcactccagaagatcctaatcttcatccaaatctacctctcgatctacttctcaatcctatgcctctcatcgctcgtcaccggaatcgaaccactcaagtttctctacgcaacatcgagctcaacatacgtttgcttgcagatcctgcaaaccctaggctacgtcttctacctcttgcttcttctcatgtacctcgttctcgtcttctccacggattgtggtttgggccttaaggtattgggcttggcgcagacctttgtgggctttgctgtaggtctgcattattacgtggcggtgtttcatagggtggtgcttcgtcagcctccgaagacgaactggaagatacacggtgtgtatgccacgtgtttccttttgatttgtctgttatctaatgctgagaggaggaagaaagagtacttggaagaaggcggtgacgaagggaagaaaaattgaaattttctttattttattcttctctatctttgtatttttatattttaaattttgaaaaattcggcaaaattttagctgagaaatgcaatagaaagaacaattactggtggatggttggaaactttttttaaaaacttcaattgtatttataataaatcgataaatgtggaataaaatttcataatctc

SEQ ID NO: 105478 - protein, 451 aa, Arabidopsis thaliana
  peptide (1)..(451): Ceres Seq. ID no. 13617336
  misc_feature (1)..(451): Homolog of NCBI NO: 15236054 NR Description: expressed protein [Arabidopsis thaliana]
  misc_feature (78)..(204): Homolog of NCBI NO: 28828184 NR Description: similar to Leishmania major. Ppg3 [Dictyostelium
  misc_feature (77)..(204): Homolog of NCBI NO: 28828184 NR Description: similar to Leishmania major. Ppg3 [Dictyostelium
  misc_feature (78)..(204): Homolog of NCBI NO: 28828184 NR Description: similar to Leishmania major. Ppg3 [Dictyostelium
  misc_feature (78)..(204): Homolog of NCBI NO: 28828184 NR Description: similar to Leishmania major. Ppg3 [Dictyostelium
  misc_feature (78)..(204): Homolog of NCBI NO: 28828184 NR Description: similar to Leishmania major. Ppg3 [Dictyostelium
  misc_feature (78)..(204): Homolog of NCBI NO: 28828184 NR Description: similar to Leishmania major. Ppg3 [Dictyostelium
  misc_feature (78)..(204): Homolog of NCBI NO: 28828184 NR Description: similar to Leishmania major. Ppg3 [Dictyostelium
  misc_feature (78)..(204): Homolog of NCBI NO: 28828184 NR Description: similar to Leishmania major. Ppg3 [Dictyostelium
  misc_feature (78)..(204): Homolog of NCBI NO: 28828184 NR Description: similar to Leishmania major. Ppg3 [Dictyostelium
MSPLKYLCFRKVLLLLLYSSLFLFSSSSFFASSVDDHELQRIDPHFRVRRLLVKDLDSTGDDDETNLPPPPKKKKLLTDSVSSSSSSSGTKKNQTKLLKPISSSSSTKNQTKLAKTTTMGTSHKLNSTKSSSNTTKTSSELKKLNSGTKSTNSTSSIKKSADLSKSSSSKNKTTIKPPSSKLSSPPSEKKSQPSSKPVTKSKQSEKEIKPFWLDDEEDEDFVSEFRDLPTRFQRSLIPDLERISTTSKNYINKANKQITKNFKPYFGNKYAPTIASVVSFVFILVPLLLVSLIFNRFKAYFSLQKILIFIQIYLSIYFSILCLSSLVTGIEPLKFLYATSSSTYVCLQILQTLGYVFYLLLLLMYLVLVFSTDCGLGLKVLGLAQTFVGFAVGLHYYVAVFHRVVLRQPPKTNWKIHGVYATCFLLICLLSNAERRKKEYLEEGGDEGKKN

SEQ ID NO: 105479 - protein, 333 aa, Arabidopsis thaliana
  peptide (1)..(333): Ceres Seq. ID no. 13617337
  misc_feature (1)..(333): Homolog of NCBI NO: 15236054 NR Description: expressed protein [Arabidopsis thaliana]
  misc_feature (1)..(86): Homolog of NCBI NO: 28828184 NR Description: similar to Leishmania major. Ppg3 [Dictyostelium
  misc_feature (1)..(86): Homolog of NCBI NO: 28828184 NR Description: similar to Leishmania major. Ppg3 [Dictyostelium
  misc_feature (1)..(86): Homolog of NCBI NO: 28828184 NR Description: similar to Leishmania major. Ppg3 [Dictyostelium
  misc_feature (1)..(86): Homolog of NCBI NO: 28828184 NR Description: similar to Leishmania major. Ppg3 [Dictyostelium
  misc_feature (1)..(86): Homolog of NCBI NO: 28828184 NR Description: similar to Leishmania major. Ppg3 [Dictyostelium
  misc_feature (1)..(86): Homolog of NCBI NO: 28828184 NR Description: similar to Leishmania major. Ppg3 [Dictyostelium
  misc_feature (1)..(86): Homolog of NCBI NO: 28828184 NR Description: similar to Leishmania major. Ppg3 [Dictyostelium
  misc_feature (1)..(86): Homolog of NCBI NO: 28828184 NR Description: similar to Leishmania major. Ppg3 [Dictyostelium
  misc_feature (1)..(86): Homolog of NCBI NO: 28828184 NR Description: similar to Leishmania major. Ppg3 [Dictyostelium
MGTSHKLNSTKSSSNTTKTSSELKKLNSGTKSTNSTSSIKKSADLSKSSSSKNKTTIKPPSSKLSSPPSEKKSQPSSKPVTKSKQSEKEIKPFWLDDEEDEDFVSEFRDLPTRFQRSLIPDLERISTTSKNYINKANKQITKNFKPYFGNKYAPTIASVVSFVFILVPLLLVSLIFNRFKAYFSLQKILIFIQIYLSIYFSILCLSSLVTGIEPLKFLYATSSSTYVCLQILQTLGYVFYLLLLLMYLVLVFSTDCGLGLKVLGLAQTFVGFAVGLHYYVAVFHRVVLRQPPKTNWKIHGVYATCFLLICLLSNAERRKKEYLEEGGDEGKKN

SEQ ID NO: 105480 - DNA, 4715 bp, Arabidopsis thaliana
  misc_feature (1)..(4715): Ceres Seq. ID no. 13617338
  misc_feature: MA Experiment ID: 108462 Result: Down-regulated in Transcription
  misc_feature: MA Experiment 108462 PARAMETER Experiment Name: At_Germinating_Seeds_cDNA_P Parameter: Age (day) Value: 2 vs. 0
  misc_feature: MA Experiment 108462 PARAMETER Experiment Name: At_Germinating_Seeds_cDNA_P Parameter: Tissue Value: Germinating Seeds
  misc_feature: MA Experiment ID: 20000264 Result: Up-regulated in Transcription
  misc_feature: MA Experiment 20000264 PARAMETER Experiment Name: At_Open_Flower_P Parameter: Age (day) Value: 21
  misc_feature: MA Experiment 20000264 PARAMETER Experiment Name: At_Open_Flower_P Parameter: Plant Line Value: WS
  misc_feature: MA Experiment 20000264 PARAMETER Experiment Name: At_Open_Flower_P Parameter: Tissue Value: Open Flower vs. Whole Plant
  misc_feature: MA Experiment ID: 20000495 Result: Up-regulated in Transcription
  misc_feature: MA Experiment 20000495 PARAMETER Experiment Name: At_Guard_Cells_P Parameter: Harvest Date Value: 8/2/2002
  misc_feature: MA Experiment 20000495 PARAMETER Experiment Name: At_Guard_Cells_P Parameter: Organism Value: A. thaliana
  misc_feature: MA Experiment 20000495 PARAMETER Experiment Name: At_Guard_Cells_P Parameter: Tissue Value: Guard Cells vs. Leaves
  misc_feature: MA Experiment ID: 20000794 Result: Up-regulated in Transcription
  misc_feature: MA Experiment 20000794 PARAMETER Experiment Name: At_Petals_P Parameter: Age (day) Value: 23-25 days
  misc_feature: MA Experiment 20000794 PARAMETER Experiment Name: At_Petals_P Parameter: Plant Line Value: WS
  misc_feature: MA Experiment 20000794 PARAMETER Experiment Name: At_Petals_P Parameter: Tissue Value: Petals vs. Whole plant
  misc_feature: MA Experiment ID: 20001757 Result: Down-regulated in Transcription
  misc_feature: MA Experiment 20001757 PARAMETER Experiment Name: At_50mM_NH4NO3_L-to-H_P Parameter: Timepoint (hr) Value: 6
  misc_feature: MA Experiment 20001757 PARAMETER Experiment Name: At_50mM_NH4NO3_L-to-H_P Parameter: Tissue Value: Leaf
  misc_feature: MA Experiment 20001757 PARAMETER Experiment Name: At_50mM_NH4NO3_L-to-H_P Parameter: Treatment Value: 50mM NH4NO3 vs 100mM Mannitol
  misc_feature: MA Experiment ID: 20001905 Result: Up-regulated in Transcription
  misc_feature: MA Experiment 20001905 PARAMETER Experiment Name: At_Drought_Reproduction_P Parameter: Age (day) Value: 40
  misc_feature: MA Experiment 20001905 PARAMETER Experiment Name: At_Drought_Reproduction_P Parameter: Organism Value: A. thaliana
  misc_feature: MA Experiment 20001905 PARAMETER Experiment Name: At_Drought_Reproduction_P Parameter: Plant Line Value: WS
  misc_feature: MA Experiment 20001905 PARAMETER Experiment Name: At_Drought_Reproduction_P Parameter: Timepoint (day) Value: 10
  misc_feature: MA Experiment 20001905 PARAMETER Experiment Name: At_Drought_Reproduction_P Parameter: Tissue Value: Rosettes
  misc_feature: MA Experiment 20001905 PARAMETER Experiment Name: At_Drought_Reproduction_P Parameter: Treatment Value: Drought vs. No Drought
ctctctctctctctatctctatctctcgatttgggggagttccgtcacggtggactagtacgtctcgttgccgttggtggcgtagtcggaattaatttcctcggcgttgagattcacatggtctagaattctagctaagtggttgttgttgttgttacgatttccgatttctcgagttttttttttatatttagcttctgtttcgtttatccctcccggagacactccttggtcgaatctctcatgctgaggtgttttggacacttgttgtcaagaagaaaccagttttggttctgattaatcgttggttggaaaatatactcaattccaggccatgccttcacttcaactattgcagttaactgagcggggtcggggtcttgtagcgtcaagacggaaatctatactgcttgcggctgggattgtagctgctggtggaactgctgtttacctgaaatcaagggtcgcttcccggaggcctgattcttcgcgtctttgcaatggtcagagtgatgatgatgagactttggaaaagctgactgcaactgatcaaaatgcaaagataaccacgaaaaagaagaaaggaggaggattgaagtctcttcaggttctgactgctattcttctctctcagatgggaaaaatgggtgccagggatcttttggcactagtcgccaccgtggttttcagaacagctttgagcaatagattggcaaaagtgcaaggtttccttttccgtgctgctttcttaaggcgtgcgccactgtttctacggctcatctccgagaatattatgttgtgtttcatgctatcaacattgcactctacttcaaagtacataactggggcattgagtttgcgattcagaaagatattgaccaagattatccattcacactattttgagaatatggtatattacaaaatatcacacgtggatggtcggattacgcaccctgaacaaagaattgccagcgatgtaccaagattctcctcagagttgagcgatcttatactggatgatttgacggcggttactgatggaattttgtatgcatggcgcctgtgttcatatgctagtccaaaatacatcttctggatactggcctatgtactgggggctgggacggcgataagaaacttttctccttcttttgggaaattgatgtccaaggaacagcagttagaaggagagtaccggcaacttcattcacgcttaaggactcattcggaaagcatagcattctatggtggggaaaccagggaagaatctcatatacaacaaaagttcaagaatcttgttagccatatgagtcacgtgcttcatgatcactggtggtttggtatgatccaagattttctgctgaagtatcttggggccacagttgcagttattctgattatcgaaccattcttctctgggcatctaagacctgacgactcgaccttaggaagagctgagatgcttagcaatataagatatcacactagtgtcattatatctctctttcaggcgttgggaacactttctataagttccaggcggctcaaccgactcagtggttatgctgaccgaatccatgagttgatggctgtctcaagagaactcagtggtgatgataaatcgtctttccagagaaatagaagcagaaattatctaagtgaagctaattatgtagagttttccgatgtcaaggttgttactccaaccggaaatgttttggtggaggatctcacccttcgagttgagcaagggtctaatcttctgattacaggtcctaatggaagtggcaagagttcccttttccgagtattaggaggtctatggcccctggtgtctggacatattgtgaagccaggagttggttctgatcttaacaaggagatcttctatgtgccgcaacggccttatatggcagtaggaacacttcgtgaccagttaatatatcctcttacttctggccaagagagtgaactgctcactgagattggaatggtggagctattgaaaaatgttgatctagaatatttattggatcgctaccaacctgaaaaagaggttaattggggtgatgaattatctcttggagagcaacagagattgggtatggccagactattctaccacaaacccaaatttgcaattctagatgaatgcacaagtgctgtcacaactgatatggaagaacgctttgccgctaaggttcgagctatgggaacttcttgcataacaatctcccatcgtccagcgcttgttgcattccatgatgttgttctgtcattagacggtgaaggaggatggagtgttcattacaagagggatgactctgcccttctgacggatgctgaaattgattcagtgaaaagttcagatacagatcggcaaaatgatgcgatggttgttcaacgagcgtttgctgcagctagaaaggaatctgctactaattcaaaggctcagtcgtaccagacacagttaattgcaagatcacctgttgtagataaaagtgtagtgttgcctcgttttcctcaacctcaaacatcccaaagggctttaccatcaagagtagctgcaatgttaaacgtgttgatacccactatatttgacaagcaaggagctcaactgcttgctgttgcttgccttgtcgtctcaagaacgctgatctctgaccgaatagcctctttgaatgggaccactgtgaagtatgtcttggagcaagataaggcagcctttgttcgtttgattggtttgagtgttctccaaagtggtgcatcttctataattgctccttcactaaggcatttaacgcaaaggctagcgttagggtggaggattcgtttgactcaacatctgctaaggaactatttgagaaataatgcgttttacaaggttttccacatgtcaggcaatagtattgatgcggaccagagactcactcgtgacctggaaaagttaaccgctgacttgtctggacttcttactggaatggtaaagccatcggttgacattctctggttcacctggaggatgaagttactgactggtcagaggggagttgccatactttacacatatatgttacttggtcttggttttctgagacgtgttgctcccgatttcggtgatctagccggtgaagaacagcagcttgaagggaagtttcggtttatgcacgagaggctgaacactcatgctgaatctattgcattctttggaggtggagctcgagaaaaggctatggttgacaaaaaattcagggccctactggatcattctctcatgctcttgaggaagaaatggttgtatggcatacttgatgattttgtgacaaagcaacttcccaataatgtgacgtggggattgagtttattgtatgccctagaacacaagggagacagagcacttgtctccactcaaggtgaattggcacatgcattgcggtatctagcttctgttgtctcccaaagctttatggcttttggcgatattcttgaactacacaagaagttcctggagctctctggtggtattaacagaatttttgagctcgatgagtttttggatgcttctcagtcaggtgttacctcagaaaatcaaacaagtcgtttggattctcaagatctactttccttttcggaggtggatatcattacccctgctcagaaattgatggctagcaagttgtcgtgtgaaatagtttcagggaaaagcctgctcgtcacaggtccaaatggtagtggaaagacttcagtatttagagtccttagagatatctggcccactgtatgtggaagacttaccaaaccatcattggatatcaaagaacttgggtcagggaatggcatgttttttgtcccgcagcgaccttatacatgtttagggacactgagagatcaaattatataccctctatctaaagaagaagcagagaaaagggcagcaaagttgtacaccagtggagagagctcaacagaagctggaagcattctggattctcatttgaaaaccattctggagaatgttcggttagtttatctcttggaaagagacgtaggtggttgggatgctactaccaattgggaagacatattatctcttggagagcaacagagattaggcatggcacgtttattctttcacaggccgaagtttggagtccttgatgaatgcacaaatgcgacgagtgttgatgttgaggaacagctctatagagttgcacgagacatgggagtcactttcataacctcatcacaacggccggctctgatcccattccattccttggagctaaggctgattgatggagaaggaaactgggagctccgttcgatcgaacagacaacagagtgaactcagcaaaacatttttagaaaggtctatatagttgttaaagaaaaaagtaataaagttaaagccattagacgatgcaagctatatggtatgtagtatatggattcttcctcgatcgcaaggagtggaagagaatgcgtcgatgctagtgcttttgttagaattggaggatttgatttgattctagatatatataaatgtaggcgattgaattggtggagcattttgagttctcctatggagtatggtcttagctttgaacaaacaaagaatatagtgatcactcaaataatgtacagttcgtttcaatttcctttgttgggattagtttttctatcttataattaaaagaatgaaattgaagtgg

SEQ ID NO: 105481 - protein, 1337 aa, Arabidopsis thaliana; identical to SEQ ID NO: 36916
  peptide (1)..(1337): Ceres Seq. ID no. 13617339
  misc_feature (1123)..(1311): Pfam Name: ABC transporter Pfam Description: ABC transporter
  misc_feature (639)..(785): Homolog of NCBI NO: 27368893 NR Description: peroxisomal membrane protein ABC transporter
  misc_feature (103)..(313): Homolog of NCBI NO: 7487703 NR Description: hypothetical protein T5J17.20 - Arabidopsis >gi|4490736|emb|CAB38898.1| putative protein [Arabidopsis >gi|7271040|emb|CAB80648.1| putative protein [Arabidopsis
  misc_feature (1225)..(1330): Homolog of NCBI NO: 28195114 NR Description: putative ABC transporter [Oryza sativa (indica
  misc_feature (66)..(656): Homolog of NCBI NO: 27882317 NR Description: Similar to ATP-binding cassette, sub-family D
  misc_feature (109)..(665): Homolog of NCBI NO: 6981450 NR Description: ATP-binding cassette, sub-family D (ALD), member Peroxisomal membrane protein 1 [Rattus norvegicus]
  misc_feature (116)..(656): Homolog of NCBI NO: 19577352 NR Description: probable adrenoleukodystrophy protein
  misc_feature (109)..(665): Homolog of NCBI NO: 14318642 NR Description: ATP-binding cassette, sub-family D (ALD), member
  misc_feature (109)..(665): Homolog of NCBI NO: 12835990 NR Description: unnamed protein product [Mus musculus]
  misc_feature (110)..(665): Homolog of NCBI NO: 4506341 NR Description: ATP-binding cassette, sub-family D, member 3;
  misc_feature (687)..(1198): Homolog of NCBI NO: 7487703 NR Description: hypothetical protein T5J17.20 - Arabidopsis >gi|4490736|emb|CAB38898.1| putative protein [Arabidopsis >gi|7271040|emb|CAB80648.1| putative protein [Arabidopsis

SEQ ID NO: 105482 - protein, 1237 aa, Arabidopsis thaliana; identical to SEQ ID NO: 36917
  peptide (1)..(1237): Ceres Seq. ID no. 13617340
  misc_feature (1023)..(1211): Pfam Name: ABC transporter Pfam Description: ABC transporter
  misc_feature (539)..(685): Homolog of NCBI NO: 27368893 NR Description: peroxisomal membrane protein ABC transporter
  misc_feature (3)..(213): Homolog of NCBI NO: 7487703 NR Description: hypothetical protein T5J17.20 - Arabidopsis >gi|4490736|emb|CAB38898.1| putative protein [Arabidopsis >gi|7271040|emb|CAB80648.1| putative protein [Arabidopsis
  misc_feature (1125)..(1230): Homolog of NCBI NO: 28195114 NR Description: putative ABC transporter [Oryza sativa (indica
  misc_feature (1)..(556): Homolog of NCBI NO: 27882317 NR Description: Similar to ATP-binding cassette, sub-family D
  misc_feature (9)..(565): Homolog of NCBI NO: 6981450 NR Description: ATP-binding cassette, sub-family D (ALD), member Peroxisomal membrane protein 1 [Rattus norvegicus]
  misc_feature (16)..(556): Homolog of NCBI NO: 19577352 NR Description: probable adrenoleukodystrophy protein
  misc_feature (9)..(565): Homolog of NCBI NO: 14318642 NR Description: ATP-binding cassette, sub-family D (ALD), member
  misc_feature (9)..(565): Homolog of NCBI NO: 12835990 NR Description: unnamed protein product [Mus musculus]
  misc_feature (10)..(565): Homolog of NCBI NO: 4506341 NR Description: ATP-binding cassette, sub-family D, member 3;
  misc_feature (587)..(1098): Homolog of NCBI NO: 7487703 NR Description: hypothetical protein T5J17.20 - Arabidopsis >gi|4490736|emb|CAB38898.1| putative protein [Arabidopsis >gi|7271040|emb|CAB80648.1| putative protein [Arabidopsis

SEQ ID NO: 105483 - protein, 1234 aa, Arabidopsis thaliana; identical to SEQ ID NO: 36918
  peptide (1)..(1234): Ceres Seq. ID no. 13617341
  misc_feature (1020)..(1208): Pfam Name: ABC transporter Pfam Description: ABC transporter
  misc_feature (536)..(682): Homolog of NCBI NO: 27368893 NR Description: peroxisomal membrane protein ABC transporter
  misc_feature (1)..(210): Homolog of NCBI NO: 7487703 NR Description: hypothetical protein T5J17.20 - Arabidopsis >gi|4490736|emb|CAB38898.1| putative protein [Arabidopsis >gi|7271040|emb|CAB80648.1| putative protein [Arabidopsis
  misc_feature (1122)..(1227): Homolog of NCBI NO: 28195114 NR Description: putative ABC transporter [Oryza sativa (indica
  misc_feature (1)..(553): Homolog of NCBI NO: 27882317 NR Description: Similar to ATP-binding cassette, sub-family D
  misc_feature (6)..(562): Homolog of NCBI NO: 6981450 NR Description: ATP-binding cassette, sub-family D (ALD), member Peroxisomal membrane protein 1 [Rattus norvegicus]
  misc_feature (13)..(553): Homolog of NCBI NO: 19577352 NR Description: probable adrenoleukodystrophy protein
  misc_feature (6)..(562): Homolog of NCBI NO: 14318642 NR Description: ATP-binding cassette, sub-family D (ALD), member
  misc_feature (6)..(562): Homolog of NCBI NO: 12835990 NR Description: unnamed protein product [Mus musculus]
  misc_feature (7)..(562): Homolog of NCBI NO: 4506341 NR Description: ATP-binding cassette, sub-family D, member 3;
  misc_feature (584)..(1095): Homolog of NCBI NO: 7487703 NR Description: hypothetical protein T5J17.20 - Arabidopsis >gi|4490736|emb|CAB38898.1| putative protein [Arabidopsis >gi|7271040|emb|CAB80648.1| putative protein [Arabidopsis

SEQ ID NO: 105484 - DNA, 761 bp, Arabidopsis thaliana
  misc_feature (1)..(761): Ceres Seq. ID no. 13617346
  misc_feature: MA Experiment ID: 20000227 Result: Up-regulated in Transcription
  misc_feature: MA Experiment 20000227 PARAMETER Experiment Name: At_Root-Tips-vs-Tops_P Parameter: Tissue Value: Root Tips vs. Root Tops
  misc_feature: MA Experiment ID: 20001560 Result: Up-regulated in Transcription
  misc_feature: MA Experiment 20001560 PARAMETER Experiment Name: At_Drought_Soil_Dry_P Parameter: Age (day) Value: 28
  misc_feature: MA Experiment 20001560 PARAMETER Experiment Name: At_Drought_Soil_Dry_P Parameter: Organism Value: A. thaliana
  misc_feature: MA Experiment 20001560 PARAMETER Experiment Name: At_Drought_Soil_Dry_P Parameter: Plant Line Value: WS
  misc_feature: MA Experiment 20001560 PARAMETER Experiment Name: At_Drought_Soil_Dry_P Parameter: Post Timepoint (hr) Value: None
  misc_feature: MA Experiment 20001560 PARAMETER Experiment Name: At_Drought_Soil_Dry_P Parameter: Post-Treatment Value: None
  misc_feature: MA Experiment 20001560 PARAMETER Experiment Name: At_Drought_Soil_Dry_P Parameter: Timepoint (day) Value: 14
  misc_feature: MA Experiment 20001560 PARAMETER Experiment Name: At_Drought_Soil_Dry_P Parameter: Treatment Value: Drought vs. No Drought
aaagaagaaaaacccttgctactgcttttcatttctgacctaaaagctcagctccgatttgaaaatggggagtagattgggaggacgagtggttcatttcgcgaatcttccgattaagcttctgatgcctgcgaagctgaccaacattcacgaattcgcgttgaaaacgattccttccgcgtccaagatcgagatcaagcgagtcctggagtcgctctacggattcgatgtggagaaggtgaatactttaaacatggatgggaagaagaagaagcgtggtggtttgttgatagcgaaagctgattacaagaaggcttacgtcacgctacgtagtccattgtcgatttctagggatttgtttccggtgaagtatatcgaggaagataggaagagtaaagtgaaaggatctagctttgttgaggaagaagatgataagaagagtcattggcttgatcgtaaggagaagagggagattggtggttatggtaaaggtaaaggtcgtcgaggtggtgaaagggctaactctccgacgagaggtggtgctgcggcggcggggacggccaagtttccatggagcaacatgagatttgttggtaagtagggtttatgagcagattatgatctggggtttgtgtttctttagctatcggattattgattttgttgtttctattacttgaggtttgtgtattgagaatctgaatcattgaagctctcagtgtttctgagatttggctaataaatctgaatcaagatgtttc

SEQ ID NO: 105485 - protein, 178 aa, Arabidopsis thaliana; identical to SEQ ID NO: 31095
  peptide (1)..(178): Ceres Seq. ID no. 13617347
  misc_feature (7)..(102): Pfam Name: Ribosomal protein L23 Pfam Description: Ribosomal protein L23
  misc_feature (1)..(178): Homolog of NCBI NO: 15236061 NR Description: expressed protein [Arabidopsis thaliana]
  misc_feature (1)..(178): Homolog of NCBI NO: 21554117 NR Description: unknown [Arabidopsis thaliana]
  misc_feature (1)..(174): Homolog of NCBI NO: 34394046 NR Description: unknown protein [Oryza sativa (japonica
  misc_feature (30)..(89): Homolog of NCBI NO: 15599457 NR Description: 50S ribosomal protein L23 [Pseudomonas aeruginosa
  misc_feature (23)..(89): Homolog of NCBI NO: 730543 NR Description: 50S RIBOSOMAL PROTEIN L23 ribosomal protein L23 >gi|510688|gb|AAA19776.1| ribosomal protein
  misc_feature (23)..(89): Homolog of NCBI NO: 16120549 NR Description: 50S ribosomal protein L23 [Yersinia pestis]
  misc_feature (37)..(88): Homolog of NCBI NO: 15896381 NR Description: Ribosomal protein L23 [Clostridium acetobutylicum]

SEQ ID NO: 105486 - protein, 158 aa, Arabidopsis thaliana; identical to SEQ ID NO: 31096
  peptide (1)..(158): Ceres Seq. ID no. 13617348
  misc_feature (1)..(82): Pfam Name: Ribosomal protein L23 Pfam Description: Ribosomal protein L23
  misc_feature (1)..(158): Homolog of NCBI NO: 15236061 NR Description: expressed protein [Arabidopsis thaliana]
  misc_feature (1)..(158): Homolog of NCBI NO: 21554117 NR Description: unknown [Arabidopsis thaliana]
  misc_feature (1)..(154): Homolog of NCBI NO: 34394046 NR Description: unknown protein [Oryza sativa (japonica
  misc_feature (10)..(69): Homolog of NCBI NO: 15599457 NR Description: 50S ribosomal protein L23 [Pseudomonas aeruginosa
  misc_feature (3)..(69): Homolog of NCBI NO: 730543 NR Description: 50S RIBOSOMAL PROTEIN L23 ribosomal protein L23 >gi|510688|gb|AAA19776.1| ribosomal protein
  misc_feature (3)..(69): Homolog of NCBI NO: 16120549 NR Description: 50S ribosomal protein L23 [Yersinia pestis]
  misc_feature (17)..(68): Homolog of NCBI NO: 15896381 NR Description: Ribosomal protein L23 [Clostridium acetobutylicum]

SEQ ID NO: 105487 - protein, 115 aa, Arabidopsis thaliana; identical to SEQ ID NO: 31097
  peptide (1)..(115): Ceres Seq. ID no. 13617349
  misc_feature (1)..(115): Homolog of NCBI NO: 15236061 NR Description: expressed protein [Arabidopsis thaliana]
  misc_feature (1)..(115): Homolog of NCBI NO: 21554117 NR Description: unknown [Arabidopsis thaliana]
  misc_feature (1)..(111): Homolog of NCBI NO: 34394046 NR Description: unknown protein [Oryza sativa (japonica
  misc_feature (1)..(26): Homolog of NCBI NO: 15599457 NR Description: 50S ribosomal protein L23 [Pseudomonas aeruginosa
  misc_feature (1)..(26): Homolog of NCBI NO: 730543 NR Description: 50S RIBOSOMAL PROTEIN L23 ribosomal protein L23 >gi|510688|gb|AAA19776.1| ribosomal protein
  misc_feature (1)..(26): Homolog of NCBI NO: 16120549 NR Description: 50S ribosomal protein L23 [Yersinia pestis]
  misc_feature (1)..(25): Homolog of NCBI NO: 15896381 NR Description: Ribosomal protein L23 [Clostridium acetobutylicum]

SEQ ID NO: 105488 - DNA, 1171 bp, Arabidopsis thaliana
  misc_feature (1)..(1171): Ceres Seq. ID no. 13617350
  misc_feature: MA Experiment ID: 108461 Result: Up-regulated in Transcription
  misc_feature: MA Experiment 108461 PARAMETER Experiment Name: At_Germinating_Seeds_cDNA_P Parameter: Age (day) Value: 1 vs. 0
  misc_feature: MA Experiment 108461 PARAMETER Experiment Name: At_Germinating_Seeds_cDNA_P Parameter: Tissue Value: Germinating Seeds
  misc_feature: MA Experiment ID: 108462 Result: Up-regulated in Transcription
  misc_feature: MA Experiment 108462 PARAMETER Experiment Name: At_Germinating_Seeds_cDNA_P Parameter: Age (day) Value: 2 vs. 0
  misc_feature: MA Experiment 108462 PARAMETER Experiment Name: At_Germinating_Seeds_cDNA_P Parameter: Tissue Value: Germinating Seeds
  misc_feature: MA Experiment ID: 108464 Result: Up-regulated in Transcription
  misc_feature: MA Experiment 108464 PARAMETER Experiment Name: At_Germinating_Seeds_cDNA_P Parameter: Age (day) Value: 4 vs. 0
  misc_feature: MA Experiment 108464 PARAMETER Experiment Name: At_Germinating_Seeds_cDNA_P Parameter: Tissue Value: Germinating Seeds
  misc_feature: MA Experiment ID: 108573 Result: Up-regulated in Transcription
  misc_feature: MA Experiment 108573 PARAMETER Experiment Name: At_Drought_cDNA_P Parameter: Timepoint (hr) Value: 6
  misc_feature: MA Experiment 108573 PARAMETER Experiment Name: At_Drought_cDNA_P Parameter: Tissue Value: Aerial
  misc_feature: MA Experiment 108573 PARAMETER Experiment Name: At_Drought_cDNA_P Parameter: Treatment Value: Drought vs. No Drought
  misc_feature: MA Experiment ID: 108595 Result: Up-regulated in Transcription
  misc_feature: MA Experiment 108595 PARAMETER Experiment Name: At_Ler-pi_Ovule_cDNA_P Parameter: Plant Line Value: null
  misc_feature: MA Experiment ID: 20000069 Result: Up-regulated in Transcription
  misc_feature: MA Experiment 20000069 PARAMETER Experiment Name: At_100uM_ABA_Mutants_cDNA_P Parameter: Plant Line Value: CS23
  misc_feature: MA Experiment 20000069 PARAMETER Experiment Name: At_100uM_ABA_Mutants_cDNA_P Parameter: Timepoint (hr) Value: 6
  misc_feature: MA Experiment 20000069 PARAMETER Experiment Name: At_100uM_ABA_Mutants_cDNA_P Parameter: Tissue Value: Aerial
  misc_feature: MA Experiment 20000069 PARAMETER Experiment Name: At_100uM_ABA_Mutants_cDNA_P Parameter: Treatment Value: 100uM ABA vs. No Treatment
  misc_feature: MA Experiment ID: 20000070 Result: Up-regulated in Transcription
  misc_feature: MA Experiment 20000070 PARAMETER Experiment Name: At_100uM_ABA_Mutants_cDNA_P Parameter: Plant Line Value: CS24
  misc_feature: MA Experiment 20000070 PARAMETER Experiment Name: At_100uM_ABA_Mutants_cDNA_P Parameter: Timepoint (hr) Value: 6
  misc_feature: MA Experiment 20000070 PARAMETER Experiment Name: At_100uM_ABA_Mutants_cDNA_P Parameter: Tissue Value: Aerial
  misc_feature: MA Experiment 20000070 PARAMETER Experiment Name: At_100uM_ABA_Mutants_cDNA_P Parameter: Treatment Value: 100uM ABA vs. No Treatment
  misc_feature: MA Experiment ID: 20000071 Result: Up-regulated in Transcription
  misc_feature: MA Experiment 20000071 PARAMETER Experiment Name: At_100uM_ABA_Mutants_cDNA_P Parameter: Plant Line Value: CS8104
  misc_feature: MA Experiment 20000071 PARAMETER Experiment Name: At_100uM_ABA_Mutants_cDNA_P Parameter: Timepoint (hr) Value: 6
  misc_feature: MA Experiment 20000071 PARAMETER Experiment Name: At_100uM_ABA_Mutants_cDNA_P Parameter: Tissue Value: Aerial
  misc_feature: MA Experiment 20000071 PARAMETER Experiment Name: At_100uM_ABA_Mutants_cDNA_P Parameter: Treatment Value: 100uM ABA vs. No Treatment
  misc_feature: MA Experiment ID: 20000087 Result: Up-regulated in Transcription
  misc_feature: MA Experiment 20000087 PARAMETER Experiment Name: At_100uM_ABA_Mutants_cDNA_P Parameter: Plant Line Value: WS
  misc_feature: MA Experiment 20000087 PARAMETER Experiment Name: At_100uM_ABA_Mutants_cDNA_P Parameter: Timepoint (hr) Value: 6
  misc_feature: MA Experiment 20000087 PARAMETER Experiment Name: At_100uM_ABA_Mutants_cDNA_P Parameter: Tissue Value: Aerial
  misc_feature: MA Experiment 20000087 PARAMETER Experiment Name: At_100uM_ABA_Mutants_cDNA_P Parameter: Treatment Value: 100uM ABA vs. No Treatment
  misc_feature: MA Experiment ID: 20000117 Result: Up-regulated in Transcription
  misc_feature: MA Experiment 20000117 PARAMETER Experiment Name: At_100uM_ABA_Mutants_cDNA_P Parameter: Plant Line Value: Columbia
  misc_feature: MA Experiment 20000117 PARAMETER Experiment Name: At_100uM_ABA_Mutants_cDNA_P Parameter: Timepoint (hr) Value: 6
  misc_feature: MA Experiment 20000117 PARAMETER Experiment Name: At_100uM_ABA_Mutants_cDNA_P Parameter: Tissue Value: Aerial
  misc_feature: MA Experiment 20000117 PARAMETER Experiment Name: At_100uM_ABA_Mutants_cDNA_P Parameter: Treatment Value: 100uM ABA vs. No Treatment
  misc_feature: MA Experiment ID: 20000171 Result: Up-regulated in Transcription
  misc_feature: MA Experiment 20000171 PARAMETER Experiment Name: At_42deg_Heat_P Parameter: Age (day) Value: 14
  misc_feature: MA Experiment 20000171 PARAMETER Experiment Name: At_42deg_Heat_P Parameter: Organism Value: A. thaliana
  misc_feature: MA Experiment 20000171 PARAMETER Experiment Name: At_42deg_Heat_P Parameter: Plant Line Value: WS
  misc_feature: MA Experiment 20000171 PARAMETER Experiment Name: At_42deg_Heat_P Parameter: Temperature (deg C) Value: 42 vs. 22
  misc_feature: MA Experiment 20000171 PARAMETER Experiment Name: At_42deg_Heat_P Parameter: Timepoint (hr) Value: 1
  misc_feature: MA Experiment 20000171 PARAMETER Experiment Name: At_42deg_Heat_P Parameter: Tissue Value: Aerial
  misc_feature: MA Experiment ID: 20000185 Result: Up-regulated in Transcription
  misc_feature: MA Experiment 20000185 PARAMETER Experiment Name: At_Roots__P Parameter: Age (day) Value: 7 vs. 21
  misc_feature: MA Experiment 20000185 PARAMETER Experiment Name: At_Roots__P Parameter: Organism Value: A. thaliana
  misc_feature: MA Experiment 20000185 PARAMETER Experiment Name: At_Roots__P Parameter: Tissue Value: Roots vs. Whole Plant
  misc_feature: MA Experiment ID: 20000438 Result: Down-regulated in Transcription
  misc_feature: MA Experiment 20000438 PARAMETER Experiment Name: At_Shoots__P Parameter: Age (day) Value: 14
  misc_feature: MA Experiment 20000438 PARAMETER Experiment Name: At_Shoots__P Parameter: Tissue Value: Shoots vs. Whole Plant
  misc_feature: MA Experiment ID: 20000439 Result: Up-regulated in Transcription
  misc_feature: MA Experiment 20000439 PARAMETER Experiment Name: At_Roots__P Parameter: Age (day) Value: 14 vs. 21
  misc_feature: MA Experiment 20000439 PARAMETER Experiment Name: At_Roots__P Parameter: Organism Value: A. thaliana
  misc_feature: MA Experiment 20000439 PARAMETER Experiment Name: At_Roots__P Parameter: Tissue Value: Roots vs. Whole Plant
  misc_feature: MA Experiment ID: 20000453 Result: Up-regulated in Transcription
  misc_feature: MA Experiment 20000453 PARAMETER Experiment Name: At_100uM_ABA_P Parameter: Age (day) Value: 15
  misc_feature: MA Experiment 20000453 PARAMETER Experiment Name: At_100uM_ABA_P Parameter: Organism Value: A. thaliana
  misc_feature: MA Experiment 20000453 PARAMETER Experiment Name: At_100uM_ABA_P Parameter: Plant Line Value: WS
  misc_feature: MA Experiment 20000453 PARAMETER Experiment Name: At_100uM_ABA_P Parameter: Timepoint (hr) Value: 24
  misc_feature: MA Experiment 20000453 PARAMETER Experiment Name: At_100uM_ABA_P Parameter: Tissue Value: Aerial
  misc_feature: MA Experiment 20000453 PARAMETER Experiment Name: At_100uM_ABA_P Parameter: Treatment Value: 100uM ABA vs. No Treatment
  misc_feature: MA Experiment ID: 20000573 Result: Down-regulated in Transcription
  misc_feature: MA Experiment 20000573 PARAMETER Experiment Name: At_100uM_ABA_Mutants__P Parameter: Organism Value: A. thaliana
  misc_feature: MA Experiment 20000573 PARAMETER Experiment Name: At_100uM_ABA_Mutants__P Parameter: Plant Line Value: CS22 vs. Ler wt
  misc_feature: MA Experiment 20000573 PARAMETER Experiment Name: At_100uM_ABA_Mutants__P Parameter: Timepoint (hr) Value: N/A
  misc_feature: MA Experiment 20000573 PARAMETER Experiment Name: At_100uM_ABA_Mutants__P Parameter: Tissue Value: Whole Plant
  misc_feature: MA Experiment 20000573 PARAMETER Experiment Name: At_100uM_ABA_Mutants__P Parameter: Treatment Value: None
  misc_feature: MA Experiment ID: 20000709 Result: Down-regulated in Transcription
  misc_feature: MA Experiment 20000709 PARAMETER Experiment Name: At_15mM_NH4NO3_L-to-H_P Parameter: Age (hr) Value: 14
  misc_feature: MA Experiment 20000709 PARAMETER Experiment Name: At_15mM_NH4NO3_L-to-H_P Parameter: Organism Value: A. thaliana
  misc_feature: MA Experiment 20000709 PARAMETER Experiment Name: At_15mM_NH4NO3_L-to-H_P Parameter: Plant Line Value: WS
  misc_feature: MA Experiment 20000709 PARAMETER Experiment Name: At_15mM_NH4NO3_L-to-H_P Parameter: Timepoint (hr) Value: 4
  misc_feature: MA Experiment 20000709 PARAMETER Experiment Name: At_15mM_NH4NO3_L-to-H_P Parameter: Tissue Value: Aerial
  misc_feature: MA Experiment 20000709 PARAMETER Experiment Name: At_15mM_NH4NO3_L-to-H_P Parameter: Treatment Value: 15mM NH4NO3 vs. 30mM Mannitol
  misc_feature: MA Experiment ID: 20001554 Result: Up-regulated in Transcription
  misc_feature: MA Experiment 20001554 PARAMETER Experiment Name: At_Drought_Soil_Dry_P Parameter: Age (day) Value: 21
  misc_feature: MA Experiment 20001554 PARAMETER Experiment Name: At_Drought_Soil_Dry_P Parameter: Organism Value: A. thaliana
  misc_feature: MA Experiment 20001554 PARAMETER Experiment Name: At_Drought_Soil_Dry_P Parameter: Plant Line Value: WS
  misc_feature: MA Experiment 20001554 PARAMETER Experiment Name: At_Drought_Soil_Dry_P Parameter: Post Timepoint (hr) Value: None
  misc_feature: MA Experiment 20001554 PARAMETER Experiment Name: At_Drought_Soil_Dry_P Parameter: Post-Treatment Value: None
  misc_feature: MA Experiment 20001554 PARAMETER Experiment Name: At_Drought_Soil_Dry_P Parameter: Timepoint (day) Value: 7
  misc_feature: MA Experiment 20001554 PARAMETER Experiment Name: At_Drought_Soil_Dry_P Parameter: Treatment Value: Drought vs. No Drought
  misc_feature: MA Experiment ID: 20001555 Result: Up-regulated in Transcription
  misc_feature: MA Experiment 20001555 PARAMETER Experiment Name: At_Drought_Soil_Dry_P Parameter: Age (day) Value: 24
  misc_feature: MA Experiment 20001555 PARAMETER Experiment Name: At_Drought_Soil_Dry_P Parameter: Organism Value: A. thaliana
  misc_feature: MA Experiment 20001555 PARAMETER Experiment Name: At_Drought_Soil_Dry_P Parameter: Plant Line Value: WS
  misc_feature: MA Experiment 20001555 PARAMETER Experiment Name: At_Drought_Soil_Dry_P Parameter: Post Timepoint (hr) Value: None
  misc_feature: MA Experiment 20001555 PARAMETER Experiment Name: At_Drought_Soil_Dry_P Parameter: Post-Treatment Value: None
  misc_feature: MA Experiment 20001555 PARAMETER Experiment Name: At_Drought_Soil_Dry_P Parameter: Timepoint (day) Value: 10
  misc_feature: MA Experiment 20001555 PARAMETER Experiment Name: At_Drought_Soil_Dry_P Parameter: Treatment Value: Drought vs. No Drought
  misc_feature: MA Experiment ID: 20001757 Result: Down-regulated in Transcription
  misc_feature: MA Experiment 20001757 PARAMETER Experiment Name: At_50mM_NH4NO3_L-to-H_P Parameter: Timepoint (hr) Value: 6
  misc_feature: MA Experiment 20001757 PARAMETER Experiment Name: At_50mM_NH4NO3_L-to-H_P Parameter: Tissue Value: Leaf
  misc_feature: MA Experiment 20001757 PARAMETER Experiment Name: At_50mM_NH4NO3_L-to-H_P Parameter: Treatment Value: 50mM NH4NO3 vs 100mM Mannitol
  misc_feature: MA Experiment ID: 20001911 Result: Up-regulated in Transcription
  misc_feature: MA Experiment 20001911 PARAMETER Experiment Name: At_Drought_Reproduction_P Parameter: Age (day) Value: 40
  misc_feature: MA Experiment 20001911 PARAMETER Experiment Name: At_Drought_Reproduction_P Parameter: Organism Value: A. thaliana
  misc_feature: MA Experiment 20001911 PARAMETER Experiment Name: At_Drought_Reproduction_P Parameter: Plant Line Value: WS
  misc_feature: MA Experiment 20001911 PARAMETER Experiment Name: At_Drought_Reproduction_P Parameter: Timepoint (day) Value: 10
  misc_feature: MA Experiment 20001911 PARAMETER Experiment Name: At_Drought_Reproduction_P Parameter: Tissue Value: Flowers
  misc_feature: MA Experiment 20001911 PARAMETER Experiment Name: At_Drought_Reproduction_P Parameter: Treatment Value: Drought vs. No Drought
gcaagtctcatcagaagaggaagagaatcaatggcgagttgcttcagctacgtgtcttctcgtaacaaatgttaccaatacagcttctctcgtgctggtctccgatcatctacctccgatcttggcgacggcaccgtcttccactgttggatcccacttactcacatccacaccaagcccacgctcctcctccttcacgggatcggagctaacgctatgtggcagtgggaccgcttcatcgaccgttttatcccccgcttcaacgtctacgtaccggacctcatcttctttggcgactcctacaccactcgtcccgaccgctcagagtctttccaggcgacttgtgtcatgaaggcgatggatgcttacggtgttaggaccatgaccgtcgctggcctcagctacggtggttttgtggcctactccttggcggcgcagtttaaggagagggtagatcgagttgtgctaatatgcgccggtgttgctctggaggagaaagactcggaggatggtatgttcaaagtgaagagcccggaggaagcggcggctgttttgtttcctcagtctccttcgatgctccggcggcttctccagttatctttctataaaccgccgatttggatcccttcttgctttgccatggactacattcatgtaatgtgtaaagactatcttcaagaaaggaaagaacttgtggaagctctgcataagggtagaagattcgccaatcttccaaagataacacagccgacattgatgatatggggagaggaagatcaagtatttccagttgaattagctcatagattgaaaagatatttaggggaagacagagcacaattggtgttactgaagaagacaggacatgcgattaatgaagagaaaccaaaagagatgtacaaacacatgaaatcttttctttgcactgacgcaatgattcctcagaatcaccagatcaatgctaagagactcatgttagcaaacttgatatccccagatcagcagatcaacaagtgatgttactgcagaaaaaaaaaaagtgttgttagaagacataatagttaatcatgtttttagcttgtccctaaatgtgatttgtatcgttattgttaaagaaagacattgcttctaatagttggaattaagaatacttttatttcaagaaagtaat

SEQ ID NO: 105489 - protein, 338 aa, Arabidopsis thaliana
  peptide (1)..(338): Ceres Seq. ID no. 13617351
  misc_feature (87)..(305): Pfam Name: alpha/beta hydrolase fold Pfam Description: alpha/beta hydrolase fold
  misc_feature (11)..(338): Homolog of NCBI NO: 18420566 NR Description: hydrolase, alpha/beta fold family [Arabidopsis
  misc_feature (11)..(338): Homolog of NCBI NO: 21536873 NR Description: putative hydrolase [Arabidopsis thaliana]
  misc_feature (14)..(307): Homolog of NCBI NO: 15242419 NR Description: hydrolase, alpha/beta fold family [Arabidopsis >gi|9955530|emb|CAC05469.1| putative hydrolase [Arabidopsis
  misc_feature (11)..(307): Homolog of NCBI NO: 18411865 NR Description: hydrolase, alpha/beta fold family [Arabidopsis >gi|19699019|gb|AAL91245.1| unknown protein [Arabidopsis >gi|25084092|gb|AAN72173.1| unknown protein [Arabidopsis
  misc_feature (7)..(318): Homolog of NCBI NO: 33146617 NR Description: hydrolase-like protein [Oryza sativa (japonica
  misc_feature (7)..(305): Homolog of NCBI NO: 37533664 NR Description: putative hydrolase [Oryza sativa (japonica >gi|19920100|gb|AAM08532.1| Putative hydrolase [Oryza sativa]
  misc_feature (11)..(219): Homolog of NCBI NO: 25406548 NR Description: hypothetical protein T11I11.15 [imported] -
  misc_feature (43)..(217): Homolog of NCBI NO: 27436747 NR Description: Hypothetical protein [Oryza sativa (japonica
  misc_feature (218)..(307): Homolog of NCBI NO: 27436747 NR Description: Hypothetical protein [Oryza sativa (japonica
  misc_feature (29)..(314): Homolog of NCBI NO: 22326938 NR Description: hydrolase, alpha/beta fold family [Arabidopsis >gi|29294062|gb|AAO73899.1| hydrolase, alpha/beta fold family
ASLIRRGRESMASCFSYVSSRNKCYQYSFSRAGLRSSTSDLGDGTVFHCWIPLTHIHTKPTLLLLHGIGANAMWQWDRFIDRFIPRFNVYVPDLIFFGDSYTTRPDRSESFQATCVMKAMDAYGVRTMTVAGLSYGGFVAYSLAAQFKERVDRVVLICAGVALEEKDSEDGMFKVKSPEEAAAVLFPQSPSMLRRLLQLSFYKPPIWIPSCFAMDYIHVMCKDYLQERKELVEALHKGRRFANLPKITQPTLMIWGEEDQVFPVELAHRLKRYLGEDRAQLVLLKKTGHAINEEKPKEMYKHMKSFLCTDAMIPQNHQINAKRLMLANLISPDQQINK

SEQ ID NO: 105490 - protein, 328 aa, Arabidopsis thaliana
  peptide (1)..(328): Ceres Seq. ID no. 13617352
  misc_feature (77)..(295): Pfam Name: alpha/beta hydrolase fold Pfam Description: alpha/beta hydrolase fold
  misc_feature (1)..(328): Homolog of NCBI NO: 18420566 NR Description: hydrolase, alpha/beta fold family [Arabidopsis
  misc_feature (1)..(328): Homolog of NCBI NO: 21536873 NR Description: putative hydrolase [Arabidopsis thaliana]
  misc_feature (4)..(297): Homolog of NCBI NO: 15242419 NR Description: hydrolase, alpha/beta fold family [Arabidopsis >gi|9955530|emb|CAC05469.1| putative hydrolase [Arabidopsis
  misc_feature (1)..(297): Homolog of NCBI NO: 18411865 NR Description: hydrolase, alpha/beta fold family [Arabidopsis >gi|19699019|gb|AAL91245.1| unknown protein [Arabidopsis >gi|25084092|gb|AAN72173.1| unknown protein [Arabidopsis
  misc_feature (1)..(308): Homolog of NCBI NO: 33146617 NR Description: hydrolase-like protein [Oryza sativa (japonica
  misc_feature (1)..(295): Homolog of NCBI NO: 37533664 NR Description: putative hydrolase [Oryza sativa (japonica >gi|19920100|gb|AAM08532.1| Putative hydrolase [Oryza sativa]
  misc_feature (1)..(209): Homolog of NCBI NO: 25406548 NR Description: hypothetical protein T11I11.15 [imported] -
  misc_feature (33)..(207): Homolog of NCBI NO: 27436747 NR Description: Hypothetical protein [Oryza sativa (japonica
  misc_feature (208)..(297): Homolog of NCBI NO: 27436747 NR Description: Hypothetical protein [Oryza sativa (japonica
  misc_feature (19)..(304): Homolog of NCBI NO: 22326938 NR Description: hydrolase, alpha/beta fold family [Arabidopsis >gi|29294062|gb|AAO73899.1| hydrolase, alpha/beta fold family
MASCFSYVSSRNKCYQYSFSRAGLRSSTSDLGDGTVFHCWIPLTHIHTKPTLLLLHGIGANAMWQWDRFIDRFIPRFNVYVPDLIFFGDSYTTRPDRSESFQATCVMKAMDAYGVRTMTVAGLSYGGFVAYSLAAQFKERVDRVVLICAGVALEEKDSEDGMFKVKSPEEAAAVLFPQSPSMLRRLLQLSFYKPPIWIPSCFAMDYIHVMCKDYLQERKELVEALHKGRRFANLPKITQPTLMIWGEEDQVFPVELAHRLKRYLGEDRAQLVLLKKTGHAINEEKPKEMYKHMKSFLCTDAMIPQNHQINAKRLMLANLISPDQQINK

SEQ ID NO: 105491 - protein, 266 aa, Arabidopsis thaliana
  peptide (1)..(266): Ceres Seq. ID no. 13617353
  misc_feature (15)..(233): Pfam Name: alpha/beta hydrolase fold Pfam Description: alpha/beta hydrolase fold
  misc_feature (1)..(266): Homolog of NCBI NO: 18420566 NR Description: hydrolase, alpha/beta fold family [Arabidopsis
  misc_feature (1)..(266): Homolog of NCBI NO: 21536873 NR Description: putative hydrolase [Arabidopsis thaliana]
  misc_feature (1)..(235): Homolog of NCBI NO: 15242419 NR Description: hydrolase, alpha/beta fold family [Arabidopsis >gi|9955530|emb|CAC05469.1| putative hydrolase [Arabidopsis
  misc_feature (1)..(235): Homolog of NCBI NO: 18411865 NR Description: hydrolase, alpha/beta fold family [Arabidopsis >gi|19699019|gb|AAL91245.1| unknown protein [Arabidopsis >gi|25084092|gb|AAN72173.1| unknown protein [Arabidopsis
  misc_feature (1)..(246): Homolog of NCBI NO: 33146617 NR Description: hydrolase-like protein [Oryza sativa (japonica
  misc_feature (1)..(233): Homolog of NCBI NO: 37533664 NR Description: putative hydrolase [Oryza sativa (japonica >gi|19920100|gb|AAM08532.1| Putative hydrolase [Oryza sativa]
  misc_feature (1)..(147): Homolog of NCBI NO: 25406548 NR Description: hypothetical protein T11I11.15 [imported] -
  misc_feature (1)..(145): Homolog of NCBI NO: 27436747 NR Description: Hypothetical protein [Oryza sativa (japonica
  misc_feature (146)..(235): Homolog of NCBI NO: 27436747 NR Description: Hypothetical protein [Oryza sativa (japonica
  misc_feature (1)..(242): Homolog of NCBI NO: 22326938 NR Description: hydrolase, alpha/beta fold family [Arabidopsis >gi|29294062|gb|AAO73899.1| hydrolase, alpha/beta fold family
MWQWDRFIDRFIPRFNVYVPDLIFFGDSYTTRPDRSESFQATCVMKAMDAYGVRTMTVAGLSYGGFVAYSLAAQFKERVDRVVLICAGVALEEKDSEDGMFKVKSPEEAAAVLFPQSPSMLRRLLQLSFYKPPIWIPSCFAMDYIHVMCKDYLQERKELVEALHKGRRFANLPKITQPTLMIWGEEDQVFPVELAHRLKRYLGEDRAQLVLLKKTGHAINEEKPKEMYKHMKSFLCTDAMIPQNHQINAKRLMLANLISPDQQINK

SEQ ID NO: 105492 - DNA, 1472 bp, Arabidopsis thaliana
  misc_feature (1)..(1472): Ceres Seq. ID no. 13617358
  misc_feature: MA Experiment ID: 108434 Result: Up-regulated in Transcription
  misc_feature: MA Experiment 108434 PARAMETER Experiment Name: At_Root_Tips_cDNA_P Parameter: Tissue Value: Root Tips
  misc_feature: MA Experiment ID: 108462 Result: Up-regulated in Transcription
  misc_feature: MA Experiment 108462 PARAMETER Experiment Name: At_Germinating_Seeds_cDNA_P Parameter: Age (day) Value: 2 vs. 0
  misc_feature: MA Experiment 108462 PARAMETER Experiment Name: At_Germinating_Seeds_cDNA_P Parameter: Tissue Value: Germinating Seeds
  misc_feature: MA Experiment ID: 20000069 Result: Down-regulated in Transcription
  misc_feature: MA Experiment 20000069 PARAMETER Experiment Name: At_100uM_ABA_Mutants_cDNA_P Parameter: Plant Line Value: CS23
  misc_feature: MA Experiment 20000069 PARAMETER Experiment Name: At_100uM_ABA_Mutants_cDNA_P Parameter: Timepoint (hr) Value: 6
  misc_feature: MA Experiment 20000069 PARAMETER Experiment Name: At_100uM_ABA_Mutants_cDNA_P Parameter: Tissue Value: Aerial
  misc_feature: MA Experiment 20000069 PARAMETER Experiment Name: At_100uM_ABA_Mutants_cDNA_P Parameter: Treatment Value: 100uM ABA vs. No Treatment
  misc_feature: MA Experiment ID: 20000070 Result: Down-regulated in Transcription
  misc_feature: MA Experiment 20000070 PARAMETER Experiment Name: At_100uM_ABA_Mutants_cDNA_P Parameter: Plant Line Value: CS24
  misc_feature: MA Experiment 20000070 PARAMETER Experiment Name: At_100uM_ABA_Mutants_cDNA_P Parameter: Timepoint (hr) Value: 6
  misc_feature: MA Experiment 20000070 PARAMETER Experiment Name: At_100uM_ABA_Mutants_cDNA_P Parameter: Tissue Value: Aerial
  misc_feature: MA Experiment 20000070 PARAMETER Experiment Name: At_100uM_ABA_Mutants_cDNA_P Parameter: Treatment Value: 100uM ABA vs. No Treatment
  misc_feature: MA Experiment ID: 20000071 Result: Down-regulated in Transcription
  misc_feature: MA Experiment 20000071 PARAMETER Experiment Name: At_100uM_ABA_Mutants_cDNA_P Parameter: Plant Line Value: CS8104
  misc_feature: MA Experiment 20000071 PARAMETER Experiment Name: At_100uM_ABA_Mutants_cDNA_P Parameter: Timepoint (hr) Value: 6
  misc_feature: MA Experiment 20000071 PARAMETER Experiment Name: At_100uM_ABA_Mutants_cDNA_P Parameter: Tissue Value: Aerial
  misc_feature: MA Experiment 20000071 PARAMETER Experiment Name: At_100uM_ABA_Mutants_cDNA_P Parameter: Treatment Value: 100uM ABA vs. No Treatment
  misc_feature: MA Experiment ID: 20000072 Result: Down-regulated in Transcription
  misc_feature: MA Experiment 20000072 PARAMETER Experiment Name: At_100uM_ABA_Mutants_cDNA_P Parameter: Plant Line Value: CS8105
  misc_feature: MA Experiment 20000072 PARAMETER Experiment Name: At_100uM_ABA_Mutants_cDNA_P Parameter: Timepoint (hr) Value: 6
  misc_feature: MA Experiment 20000072 PARAMETER Experiment Name: At_100uM_ABA_Mutants_cDNA_P Parameter: Tissue Value: Aerial
  misc_feature: MA Experiment 20000072 PARAMETER Experiment Name: At_100uM_ABA_Mutants_cDNA_P Parameter: Treatment Value: 100uM ABA vs. No Treatment
  misc_feature: MA Experiment ID: 20000086 Result: Down-regulated in Transcription
  misc_feature: MA Experiment 20000086 PARAMETER Experiment Name: At_100uM_ABA_Mutants_cDNA_P Parameter: Plant Line Value: CS22
  misc_feature: MA Experiment 20000086 PARAMETER Experiment Name: At_100uM_ABA_Mutants_cDNA_P Parameter: Timepoint (hr) Value: 6
  misc_feature: MA Experiment 20000086 PARAMETER Experiment Name: At_100uM_ABA_Mutants_cDNA_P Parameter: Tissue Value: Aerial
  misc_feature: MA Experiment 20000086 PARAMETER Experiment Name: At_100uM_ABA_Mutants_cDNA_P Parameter: Treatment Value: 100uM ABA vs. No Treatment
  misc_feature: MA Experiment ID: 20000087 Result: Down-regulated in Transcription
  misc_feature: MA Experiment 20000087 PARAMETER Experiment Name: At_100uM_ABA_Mutants_cDNA_P Parameter: Plant Line Value: WS
  misc_feature: MA Experiment 20000087 PARAMETER Experiment Name: At_100uM_ABA_Mutants_cDNA_P Parameter: Timepoint (hr) Value: 6
  misc_feature: MA Experiment 20000087 PARAMETER Experiment Name: At_100uM_ABA_Mutants_cDNA_P Parameter: Tissue Value: Aerial
  misc_feature: MA Experiment 20000087 PARAMETER Experiment Name: At_100uM_ABA_Mutants_cDNA_P Parameter: Treatment Value: 100uM ABA vs. No Treatment
  misc_feature: MA Experiment ID: 20000090 Result: Down-regulated in Transcription
  misc_feature: MA Experiment ID: 20000117 Result: Down-regulated in Transcription
  misc_feature: MA Experiment 20000117 PARAMETER Experiment Name: At_100uM_ABA_Mutants_cDNA_P Parameter: Plant Line Value: Columbia
  misc_feature: MA Experiment 20000117 PARAMETER Experiment Name: At_100uM_ABA_Mutants_cDNA_P Parameter: Timepoint (hr) Value: 6
  misc_feature: MA Experiment 20000117 PARAMETER Experiment Name: At_100uM_ABA_Mutants_cDNA_P Parameter: Tissue Value: Aerial
  misc_feature: MA Experiment 20000117 PARAMETER Experiment Name: At_100uM_ABA_Mutants_cDNA_P Parameter: Treatment Value: 100uM ABA vs. No Treatment
  misc_feature: MA Experiment ID: 20000180 Result: Up-regulated in Transcription
  misc_feature: MA Experiment 20000180 PARAMETER Experiment Name: At_Germinating_Seeds_P Parameter: Age (hr) Value: 24 vs. 0
  misc_feature: MA Experiment 20000180 PARAMETER Experiment Name: At_Germinating_Seeds_P Parameter: Tissue Value: Germinating Seeds
  misc_feature: MA Experiment ID: 20000184 Result: Up-regulated in Transcription
  misc_feature: MA Experiment 20000184 PARAMETER Experiment Name: At_Shoots__P Parameter: Age (day) Value: 7
  misc_feature: MA Experiment 20000184 PARAMETER Experiment Name: At_Shoots__P Parameter: Tissue Value: Shoots vs. Whole Plant
  misc_feature: MA Experiment ID: 20000265 Result: Up-regulated in Transcription
  misc_feature: MA Experiment 20000265 PARAMETER Experiment Name: At_Open_Flower_P Parameter: Age (day) Value: 21
  misc_feature: MA Experiment 20000265 PARAMETER Experiment Name: At_Open_Flower_P Parameter: Plant Line Value: WS
  misc_feature: MA Experiment 20000265 PARAMETER Experiment Name: At_Open_Flower_P Parameter: Tissue Value: Closed Flower vs. Whole Plant
  misc_feature: MA Experiment ID: 20000438 Result: Up-regulated in Transcription
  misc_feature: MA Experiment 20000438 PARAMETER Experiment Name: At_Shoots__P Parameter: Age (day) Value: 14
  misc_feature: MA Experiment 20000438 PARAMETER Experiment Name: At_Shoots__P Parameter: Tissue Value: Shoots vs. Whole Plant
  misc_feature: MA Experiment ID: 20001905 Result: Down-regulated in Transcription
  misc_feature: MA Experiment 20001905 PARAMETER Experiment Name: At_Drought_Reproduction_P Parameter: Age (day) Value: 40
  misc_feature: MA Experiment 20001905 PARAMETER Experiment Name: At_Drought_Reproduction_P Parameter: Organism Value: A. thaliana
  misc_feature: MA Experiment 20001905 PARAMETER Experiment Name: At_Drought_Reproduction_P Parameter: Plant Line Value: WS
  misc_feature: MA Experiment 20001905 PARAMETER Experiment Name: At_Drought_Reproduction_P Parameter: Timepoint (day) Value: 10
  misc_feature: MA Experiment 20001905 PARAMETER Experiment Name: At_Drought_Reproduction_P Parameter: Tissue Value: Rosettes
  misc_feature: MA Experiment 20001905 PARAMETER Experiment Name: At_Drought_Reproduction_P Parameter: Treatment Value: Drought vs. No Drought
gagattacaagagtgttgtttgagagcgaatcaaggttcctccaaagaaggaagatgactttaattcttatttaatttccctttctccttttgcttcaccaaaatccacacattcatcaattaaaaaacaaaccctagattcttgaaaactggaactcattcacgaatcctaaaaagagagctcctttggttttcttgaaacccagattcttcaagctcagctatggcggtcttcaaaaccctagctttcctattcgttttaagcatcgtgatttaccaatcagtggctgttacagatgtaaattcatcgttttcctttaatgggtttgtgaaagctccaagctttgacaataatgttgctctgtttggagattcgaagctcgttcatggcggtccatcgatacaattgactgactcagtgagtcgcagtgaagggcgagttatttacaagaaacccatcagactgttccaaggtaaagagagaaacttttccggatcattctcaactagtttctcgttttcgatgtctgatgagattggtagtgtcttggcttttataatggttccaagaggtttggatcttaggttgtttggtagaaagggtaataatagttcctctggtttagggttcttattgaaacacaaagttgttgctgttgagtttggtatctccaagagagggaatcatgtagggatcttagttggtcgtcctgaatctggtaaagttagaaagttatcatcttttggtcaccatttcaatgaagagaagagattgaattgttggattgattatgaggcaagctcaaagagaatagaggttcgtttgagtctatctgctgccttaaagccggtggatccattcgtgtcttactctgtagacttggctaagctatggaaagatgggaagtttatggtgggtttaacctctgcaaatggaaacacttcaaagccggtttatctccattcgtggagctttaaactgagacatccttcgatgaggattcactcgcagccgcttgatccaaacgacgtttccaagactgttaaggaaggggagaagacggtggaagttaaggggaaaggaaaatgtatatggagaatccttggtgcattggttttgggggcggtttgtggaacattgggagccatgttcgcgttatacctttggacaatatgcggtaataggcagtcaatggcgatagttcccgaggaatgtgctgacgaaaaagcggatatccttgtaacgaaagctgatgttgttgttgaagaagaagtcaagaagtagtagaaaaagaaaagtttggtgtgtgtgttttagaatgttgtatttgttgtttgtaatgtaaattcttgtgtccttctttattcttcttctgtttgtttttttgttagttgcagatttggtgagatgagttttcacatgtagaagaatcatacaatatgtattaagttaagatcctgaaatcttgatc

SEQ ID NO: 105493 - protein, 353 aa, Arabidopsis thaliana
  peptide (1)..(353): Ceres Seq. ID no. 13617359
  misc_feature (1)..(353): Homolog of NCBI NO: 15240888 NR Description: lectin - like protein [Arabidopsis thaliana]
  misc_feature (1)..(353): Homolog of NCBI NO: 21593676 NR Description: lectin-like protein [Arabidopsis thaliana]
  misc_feature (1)..(335): Homolog of NCBI NO: 22330926 NR Description: lectin -related protein [Arabidopsis thaliana]
  misc_feature (40)..(332): Homolog of NCBI NO: 5923683 NR Description: putative lectin [Arabidopsis thaliana]
  misc_feature (5)..(331): Homolog of NCBI NO: 15232413 NR Description: expressed protein [Arabidopsis thaliana]
  misc_feature (5)..(277): Homolog of NCBI NO: 15232332 NR Description: receptor lectin kinase, putative [Arabidopsis
  misc_feature (5)..(277): Homolog of NCBI NO: 28416699 NR Description: At3g53810 [Arabidopsis thaliana]
  misc_feature (7)..(280): Homolog of NCBI NO: 15230670 NR Description: receptor-related protein kinase [Arabidopsis
  misc_feature (9)..(253): Homolog of NCBI NO: 38112427 NR Description: lectin-like receptor kinase 7;2 [Medicago
  misc_feature (10)..(334): Homolog of NCBI NO: 15230700 NR Description: receptor like protein kinase [Arabidopsis
MAVFKTLAFLFVLSIVIYQSVAVTDVNSSFSFNGFVKAPSFDNNVALFGDSKLVHGGPSIQLTDSVSRSEGRVIYKKPIRLFQGKERNFSGSFSTSFSFSMSDEIGSVLAFIMVPRGLDLRLFGRKGNNSSSGLGFLLKHKVVAVEFGISKRGNHVGILVGRPESGKVRKLSSFGHHFNEEKRLNCWIDYEASSKRIEVRLSLSAALKPVDPFVSYSVDLAKLWKDGKFMVGLTSANGNTSKPVYLHSWSFKLRHPSMRIHSQPLDPNDVSKTVKEGEKTVEVKGKGKCIWRILGALVLGAVCGTLGAMFALYLWTICGNRQSMAIVPEECADEKADILVTKADVVVEEEVKK

SEQ ID NO: 105494 - protein, 253 aa, Arabidopsis thaliana
  peptide (1)..(253): Ceres Seq. ID no. 13617360
  misc_feature (1)..(253): Homolog of NCBI NO: 15240888 NR Description: lectin - like protein [Arabidopsis thaliana]
  misc_feature (1)..(253): Homolog of NCBI NO: 21593676 NR Description: lectin-like protein [Arabidopsis thaliana]
  misc_feature (1)..(235): Homolog of NCBI NO: 22330926 NR Description: lectin -related protein [Arabidopsis thaliana]
  misc_feature (1)..(232): Homolog of NCBI NO: 5923683 NR Description: putative lectin [Arabidopsis thaliana]
  misc_feature (1)..(231): Homolog of NCBI NO: 15232413 NR Description: expressed protein [Arabidopsis thaliana]
  misc_feature (1)..(177): Homolog of NCBI NO: 15232332 NR Description: receptor lectin kinase, putative [Arabidopsis
  misc_feature (1)..(177): Homolog of NCBI NO: 28416699 NR Description: At3g53810 [Arabidopsis thaliana]
  misc_feature (1)..(180): Homolog of NCBI NO: 15230670 NR Description: receptor-related protein kinase [Arabidopsis
  misc_feature (1)..(153): Homolog of NCBI NO: 38112427 NR Description: lectin-like receptor kinase 7;2 [Medicago
  misc_feature (1)..(234): Homolog of NCBI NO: 15230700 NR Description: receptor like protein kinase [Arabidopsis
MSDEIGSVLAFIMVPRGLDLRLFGRKGNNSSSGLGFLLKHKVVAVEFGISKRGNHVGILVGRPESGKVRKLSSFGHHFNEEKRLNCWIDYEASSKRIEVRLSLSAALKPVDPFVSYSVDLAKLWKDGKFMVGLTSANGNTSKPVYLHSWSFKLRHPSMRIHSQPLDPNDVSKTVKEGEKTVEVKGKGKCIWRILGALVLGAVCGTLGAMFALYLWTICGNRQSMAIVPEECADEKADILVTKADVVVEEEVKK

SEQ ID NO: 105495 - protein, 241 aa, Arabidopsis thaliana
  peptide (1)..(241): Ceres Seq. ID no. 13617361
  misc_feature (1)..(241): Homolog of NCBI NO: 15240888 NR Description: lectin - like protein [Arabidopsis thaliana]
  misc_feature (1)..(241): Homolog of NCBI NO: 21593676 NR Description: lectin-like protein [Arabidopsis thaliana]
  misc_feature (1)..(223): Homolog of NCBI NO: 22330926 NR Description: lectin -related protein [Arabidopsis thaliana]
  misc_feature (1)..(220): Homolog of NCBI NO: 5923683 NR Description: putative lectin [Arabidopsis thaliana]
  misc_feature (1)..(219): Homolog of NCBI NO: 15232413 NR Description: expressed protein [Arabidopsis thaliana]
  misc_feature (1)..(165): Homolog of NCBI NO: 15232332 NR Description: receptor lectin kinase, putative [Arabidopsis
  misc_feature (1)..(165): Homolog of NCBI NO: 28416699 NR Description: At3g53810 [Arabidopsis thaliana]
  misc_feature (1)..(168): Homolog of NCBI NO: 15230670 NR Description: receptor-related protein kinase [Arabidopsis
  misc_feature (1)..(141): Homolog of NCBI NO: 38112427 NR Description: lectin-like receptor kinase 7;2 [Medicago
  misc_feature (1)..(222): Homolog of NCBI NO: 15230700 NR Description: receptor like protein kinase [Arabidopsis
MVPRGLDLRLFGRKGNNSSSGLGFLLKHKVVAVEFGISKRGNHVGILVGRPESGKVRKLSSFGHHFNEEKRLNCWIDYEASSKRIEVRLSLSAALKPVDPFVSYSVDLAKLWKDGKFMVGLTSANGNTSKPVYLHSWSFKLRHPSMRIHSQPLDPNDVSKTVKEGEKTVEVKGKGKCIWRILGALVLGAVCGTLGAMFALYLWTICGNRQSMAIVPEECADEKADILVTKADVVVEEEVKK

SEQ ID NO: 105496 - DNA, 1275 bp, Arabidopsis thaliana
  misc_feature (1)..(1275): Ceres Seq. ID no. 13617362
  misc_feature: MA Experiment ID: 108434 Result: Up-regulated in Transcription
  misc_feature: MA Experiment 108434 PARAMETER Experiment Name: At_Root_Tips_cDNA_P Parameter: Tissue Value: Root Tips
  misc_feature: MA Experiment ID: 108462 Result: Down-regulated in Transcription
  misc_feature: MA Experiment 108462 PARAMETER Experiment Name: At_Germinating_Seeds_cDNA_P Parameter: Age (day) Value: 2 vs. 0
  misc_feature: MA Experiment 108462 PARAMETER Experiment Name: At_Germinating_Seeds_cDNA_P Parameter: Tissue Value: Germinating Seeds
  misc_feature: MA Experiment ID: 108573 Result: Up-regulated in Transcription
  misc_feature: MA Experiment 108573 PARAMETER Experiment Name: At_Drought_cDNA_P Parameter: Timepoint (hr) Value: 6
  misc_feature: MA Experiment 108573 PARAMETER Experiment Name: At_Drought_cDNA_P Parameter: Tissue Value: Aerial
  misc_feature: MA Experiment 108573 PARAMETER Experiment Name: At_Drought_cDNA_P Parameter: Treatment Value: Drought vs. No Drought
  misc_feature: MA Experiment ID: 20000214 Result: Down-regulated in Transcription
  misc_feature: MA Experiment 20000214 PARAMETER Experiment Name: At_4deg_Cold_P Parameter: Timepoint (hr) Value: 6
  misc_feature: MA Experiment ID: 20000495 Result: Up-regulated in Transcription
  misc_feature: MA Experiment 20000495 PARAMETER Experiment Name: At_Guard_Cells_P Parameter: Harvest Date Value: 8/2/2002
  misc_feature: MA Experiment 20000495 PARAMETER Experiment Name: At_Guard_Cells_P Parameter: Organism Value: A. thaliana
  misc_feature: MA Experiment 20000495 PARAMETER Experiment Name: At_Guard_Cells_P Parameter: Tissue Value: Guard Cells vs. Leaves
  misc_feature: MA Experiment ID: 20001248 Result: Up-regulated in Transcription
  misc_feature: MA Experiment 20001248 PARAMETER Experiment Name: At_Far-red-induction_P Parameter: Age (day) Value: 7
  misc_feature: MA Experiment 20001248 PARAMETER Experiment Name: At_Far-red-induction_P Parameter: Light Value: Far-red vs. White
  misc_feature: MA Experiment 20001248 PARAMETER Experiment Name: At_Far-red-induction_P Parameter: Organism Value: A. thaliana
  misc_feature: MA Experiment 20001248 PARAMETER Experiment Name: At_Far-red-induction_P Parameter: Plant Line Value: Columbia
  misc_feature: MA Experiment 20001248 PARAMETER Experiment Name: At_Far-red-induction_P Parameter: Timepoint (hr) Value: 4
  misc_feature: MA Experiment 20001248 PARAMETER Experiment Name: At_Far-red-induction_P Parameter: Tissue Value: Whole Plant
  misc_feature: MA Experiment ID: 20001450 Result: Up-regulated in Transcription
  misc_feature: MA Experiment 20001450 PARAMETER Experiment Name: At_Far-red-induction_P Parameter: Age (day) Value: 7
  misc_feature: MA Experiment 20001450 PARAMETER Experiment Name: At_Far-red-induction_P Parameter: Light Value: Far-red vs. White
  misc_feature: MA Experiment 20001450 PARAMETER Experiment Name: At_Far-red-induction_P Parameter: Organism Value: A. thaliana
  misc_feature: MA Experiment 20001450 PARAMETER Experiment Name: At_Far-red-induction_P Parameter: Plant Line Value: Columbia
  misc_feature: MA Experiment 20001450 PARAMETER Experiment Name: At_Far-red-induction_P Parameter: Timepoint (hr) Value: 8
  misc_feature: MA Experiment 20001450 PARAMETER Experiment Name: At_Far-red-induction_P Parameter: Tissue Value: Whole Plant
  misc_feature: MA Experiment ID: 20001451 Result: Up-regulated in Transcription
  misc_feature: MA Experiment 20001451 PARAMETER Experiment Name: At_Far-red-induction_P Parameter: Age (day) Value: 7
  misc_feature: MA Experiment 20001451 PARAMETER Experiment Name: At_Far-red-induction_P Parameter: Light Value: Far-red vs. White
  misc_feature: MA Experiment 20001451 PARAMETER Experiment Name: At_Far-red-induction_P Parameter: Organism Value: A. thaliana
  misc_feature: MA Experiment 20001451 PARAMETER Experiment Name: At_Far-red-induction_P Parameter: Plant Line Value: Columbia
  misc_feature: MA Experiment 20001451 PARAMETER Experiment Name: At_Far-red-induction_P Parameter: Timepoint (hr) Value: 24
  misc_feature: MA Experiment 20001451 PARAMETER Experiment Name: At_Far-red-induction_P Parameter: Tissue Value: Whole Plant
  misc_feature: MA Experiment ID: 20001911 Result: Up-regulated in Transcription
  misc_feature: MA Experiment 20001911 PARAMETER Experiment Name: At_Drought_Reproduction_P Parameter: Age (day) Value: 40
  misc_feature: MA Experiment 20001911 PARAMETER Experiment Name: At_Drought_Reproduction_P Parameter: Organism Value: A. thaliana
  misc_feature: MA Experiment 20001911 PARAMETER Experiment Name: At_Drought_Reproduction_P Parameter: Plant Line Value: WS
  misc_feature: MA Experiment 20001911 PARAMETER Experiment Name: At_Drought_Reproduction_P Parameter: Timepoint (day) Value: 10
  misc_feature: MA Experiment 20001911 PARAMETER Experiment Name: At_Drought_Reproduction_P Parameter: Tissue Value: Flowers
  misc_feature: MA Experiment 20001911 PARAMETER Experiment Name: At_Drought_Reproduction_P Parameter: Treatment Value: Drought vs. No Drought
tccggcgtgattcttgagaagaactgaagtagagagagagatctgaaatctcaatctccgatttaacttgcgacaatgcttcaaattcgtcttcggagggattccccgacggaaactggaaatggtgcgaggccttctccgacggagacggttactgtagcctgtcccgaccatctcgtcctcgccgatcttcctgttgcgaaaggaatcggttccgtgactcccaccaccgtaatcaagcccgtcggtcgtcgttctcgccgtcagctaggcgagagagttcacttctgcgttcgttgcgattttccgattgcaatctatggtcgtctgattccttgtgatcatgccttttgccttgaatgtgctcgcagtgattccatctgctatctatgtgatgagcggattcagaagattcaaacaatcaagatgatggaagggatcttcatctgtgcagctcctcattgtcttaggtctttcctgaagaaacttgactttgaagcccatgtccatgacctccatggaagcctattacaagccgatgcagagaaagaagatggtaaccagtcagatgttcagagcacaatgcagcagtcttcagcttcagaatccaccttgcgagctcctttaagatcccagctgcaacaatcccgtgaactaaacaggtcggcgtcatttgcaaagtcacagtctggatttagtcaagtccagaattaccctccagatagcgataactctcgccctcctggattcgaaaccgctagtcctaaaccaggaatccggttcccagactacccccagcctatgaatcttatgcaaccgcccagcttgcccgttccaatgaatcaaaacccgggtttaccacagcagtttggttttccttcgtatccaacaacagagagtggatcatctcaacaattctttaacggtgctcagtacgagatgacaagaacagagagcggcggatcagaacaaagttcattgctcgggtatcccccgccttcaccaatgacgaatctgaatttccaaggatcgtatcctcctccatcatggaatcccggaatggcaccgcctcacacgacccagcaggttaaccggggtagagacggtcaaagttttgggtggccacaagagaaccgtgatggctttgggcaggagtaagagtagtctagtttgaatttgtgcaatgttaaactcgtcgtttgaaagtttcaagtacttttgtttctaaaaactgtgtcgtttgttgttggtctaacatgtaattcgagtaaaccc

SEQ ID NO: 105497 - protein, 360 aa, Arabidopsis thaliana
  peptide (1)..(360): Ceres Seq. ID no. 13617363
  misc_feature (1)..(360): Homolog of NCBI NO: 15240902 NR Description: expressed protein [Arabidopsis thaliana]
  misc_feature (1)..(360): Homolog of NCBI NO: 21536615 NR Description: unknown [Arabidopsis thaliana]
  misc_feature (11)..(256): Homolog of NCBI NO: 37535662 NR Description: hypothetical protein [Oryza sativa (japonica group)] >gi|22128705|gb|AAM92817.1| hypothetical protein [Oryza
  misc_feature (65)..(148): Homolog of NCBI NO: 26339810 NR Description: unnamed protein product [Mus musculus]
  misc_feature (65)..(148): Homolog of NCBI NO: 13376204 NR Description: E-cadherin binding protein E7 [Homo sapiens]
  misc_feature (65)..(148): Homolog of NCBI NO: 31203659 NR Description: ENSANGP00000015589 [Anopheles gambiae]
  misc_feature (65)..(148): Homolog of NCBI NO: 34785057 NR Description: E-cadherin binding protein E7 [Homo sapiens]
  misc_feature (65)..(148): Homolog of NCBI NO: 19527264 NR Description: E-cadherin binding protein E7 [Mus musculus]
  misc_feature (65)..(148): Homolog of NCBI NO: 9622093 NR Description: E-cadherin binding protein E7 [Mus musculus]
  misc_feature (65)..(148): Homolog of NCBI NO: 34864203 NR Description: similar to Casitas B-lineage lymphoma-like 1
MLQIRLRRDSPTETGNGARPSPTETVTVACPDHLVLADLPVAKGIGSVTPTTVIKPVGRRSRRQLGERVHFCVRCDFPIAIYGRLIPCDHAFCLECARSDSICYLCDERIQKIQTIKMMEGIFICAAPHCLRSFLKKLDFEAHVHDLHGSLLQADAEKEDGNQSDVQSTMQQSSASESTLRAPLRSQLQQSRELNRSASFAKSQSGFSQVQNYPPDSDNSRPPGFETASPKPGIRFPDYPQPMNLMQPPSLPVPMNQNPGLPQQFGFPSYPTTESGSSQQFFNGAQYEMTRTESGGSEQSSLLGYPPPSPMTNLNFQGSYPPPSWNPGMAPPHTTQQVNRGRDGQSFGWPQENRDGFGQE

SEQ ID NO: 105498 - protein, 243 aa, Arabidopsis thaliana
  peptide (1)..(243): Ceres Seq. ID no. 13617364
  misc_feature (1)..(243): Homolog of NCBI NO: 15240902 NR Description: expressed protein [Arabidopsis thaliana]
  misc_feature (1)..(243): Homolog of NCBI NO: 21536615 NR Description: unknown [Arabidopsis thaliana]
  misc_feature (1)..(139): Homolog of NCBI NO: 37535662 NR Description: hypothetical protein [Oryza sativa (japonica group)] >gi|22128705|gb|AAM92817.1| hypothetical protein [Oryza
  misc_feature (1)..(31): Homolog of NCBI NO: 26339810 NR Description: unnamed protein product [Mus musculus]
  misc_feature (1)..(31): Homolog of NCBI NO: 13376204 NR Description: E-cadherin binding protein E7 [Homo sapiens]
  misc_feature (1)..(31): Homolog of NCBI NO: 31203659 NR Description: ENSANGP00000015589 [Anopheles gambiae]
  misc_feature (1)..(31): Homolog of NCBI NO: 34785057 NR Description: E-cadherin binding protein E7 [Homo sapiens]
  misc_feature (1)..(31): Homolog of NCBI NO: 19527264 NR Description: E-cadherin binding protein E7 [Mus musculus]
  misc_feature (1)..(31): Homolog of NCBI NO: 9622093 NR Description: E-cadherin binding protein E7 [Mus musculus]
  misc_feature (1)..(31): Homolog of NCBI NO: 34864203 NR Description: similar to Casitas B-lineage lymphoma-like 1
MMEGIFICAAPHCLRSFLKKLDFEAHVHDLHGSLLQADAEKEDGNQSDVQSTMQQSSASESTLRAPLRSQLQQSRELNRSASFAKSQSGFSQVQNYPPDSDNSRPPGFETASPKPGIRFPDYPQPMNLMQPPSLPVPMNQNPGLPQQFGFPSYPTTESGSSQQFFNGAQYEMTRTESGGSEQSSLLGYPPPSPMTNLNFQGSYPPPSWNPGMAPPHTTQQVNRGRDGQSFGWPQENRDGFGQE

SEQ ID NO: 105499 - protein, 242 aa, Arabidopsis thaliana
  peptide (1)..(242): Ceres Seq. ID no. 13617365
  misc_feature (1)..(242): Homolog of NCBI NO: 15240902 NR Description: expressed protein [Arabidopsis thaliana]
  misc_feature (1)..(242): Homolog of NCBI NO: 21536615 NR Description: unknown [Arabidopsis thaliana]
  misc_feature (1)..(138): Homolog of NCBI NO: 37535662 NR Description: hypothetical protein [Oryza sativa (japonica group)] >gi|22128705|gb|AAM92817.1| hypothetical protein [Oryza
  misc_feature (1)..(30): Homolog of NCBI NO: 26339810 NR Description: unnamed protein product [Mus musculus]
  misc_feature (1)..(30): Homolog of NCBI NO: 13376204 NR Description: E-cadherin binding protein E7 [Homo sapiens]
  misc_feature (1)..(30): Homolog of NCBI NO: 31203659 NR Description: ENSANGP00000015589 [Anopheles gambiae]
  misc_feature (1)..(30): Homolog of NCBI NO: 34785057 NR Description: E-cadherin binding protein E7 [Homo sapiens]
  misc_feature (1)..(30): Homolog of NCBI NO: 19527264 NR Description: E-cadherin binding protein E7 [Mus musculus]
  misc_feature (1)..(30): Homolog of NCBI NO: 9622093 NR Description: E-cadherin binding protein E7 [Mus musculus]
  misc_feature (1)..(30): Homolog of NCBI NO: 34864203 NR Description: similar to Casitas B-lineage lymphoma-like 1
MEGIFICAAPHCLRSFLKKLDFEAHVHDLHGSLLQADAEKEDGNQSDVQSTMQQSSASESTLRAPLRSQLQQSRELNRSASFAKSQSGFSQVQNYPPDSDNSRPPGFETASPKPGIRFPDYPQPMNLMQPPSLPVPMNQNPGLPQQFGFPSYPTTESGSSQQFFNGAQYEMTRTESGGSEQSSLLGYPPPSPMTNLNFQGSYPPPSWNPGMAPPHTTQQVNRGRDGQSFGWPQENRDGFGQE

SEQ ID NO: 105500 - DNA, 731 bp, Arabidopsis thaliana
  misc_feature (1)..(731): Ceres Seq. ID no. 13617366
  misc_feature: MA Experiment ID: 20000184 Result: Down-regulated in Transcription
  misc_feature: MA Experiment 20000184 PARAMETER Experiment Name: At_Shoots__P Parameter: Age (day) Value: 7
  misc_feature: MA Experiment 20000184 PARAMETER Experiment Name: At_Shoots__P Parameter: Tissue Value: Shoots vs. Whole Plant
  misc_feature: MA Experiment ID: 20001248 Result: Up-regulated in Transcription
  misc_feature: MA Experiment 20001248 PARAMETER Experiment Name: At_Far-red-induction_P Parameter: Age (day) Value: 7
  misc_feature: MA Experiment 20001248 PARAMETER Experiment Name: At_Far-red-induction_P Parameter: Light Value: Far-red vs. White
  misc_feature: MA Experiment 20001248 PARAMETER Experiment Name: At_Far-red-induction_P Parameter: Organism Value: A. thaliana
  misc_feature: MA Experiment 20001248 PARAMETER Experiment Name: At_Far-red-induction_P Parameter: Plant Line Value: Columbia
  misc_feature: MA Experiment 20001248 PARAMETER Experiment Name: At_Far-red-induction_P Parameter: Timepoint (hr) Value: 4
  misc_feature: MA Experiment 20001248 PARAMETER Experiment Name: At_Far-red-induction_P Parameter: Tissue Value: Whole Plant
cggcgtctccatcgccgtctctatctaatctcgtcctgcgtcgacctagtgagctacttcagattccggccatcacgcagctccagttgtatgctttgagagttaatacaaagatgacaacaatcgaaaccggtcagaaaactcaaaagtcttctccttccggttctggtactacccctactggtactcttaagcagtcatcagcatcgtttaaaaggtggggaaggagacacccgtttgtaagatatggacttccgatgatatctctcactgtatttggagccctcggactcggccaactccttcaaggcagtaaggatattgcaaaggtaaaagatgaccaagaatgggagattatagaaacaagaaaggcactttcgagaacaggacctgtcgatgcctataaacctaaaaacacatccattgaagatgagctcaaggctatgcaagagaaggtggacataaacacgtacgagtacaagaaaattccaaagctaaacgaaagcaagtcgagttaagaagagtctttgtataagattagtctttttagatgtgtttcagttttaaatgactcttcagttcacataatcgcccaagtacaaattccagtaagttctgtctgggcttcctaaaaccaagaacaacgagggacttgccaattgttgataatacatgttgtcgtgttgatttacgacgtccaaatagatctgaaagaggttttataaccagtt

SEQ ID NO: 105501 - protein, 171 aa, Arabidopsis thaliana
  peptide (1)..(171): Ceres Seq. ID no. 13617367
  misc_feature (34)..(171): Homolog of NCBI NO: 7428718 NR Description: probable kinesin - Arabidopsis thaliana kinesin like protein [Arabidopsis thaliana]
  misc_feature (38)..(171): Homolog of NCBI NO: 22328612 NR Description: kinesin like protein {Arabidopsis -related
  misc_feature (38)..(104): Homolog of NCBI NO: 26453208 NR Description: putative kinesin [Arabidopsis thaliana]
ASPSPSLSNLVLRRPSELLQIPAITQLQLYALRVNTKMTTIETGQKTQKSSPSGSGTTPTGTLKQSSASFKRWGRRHPFVRYGLPMISLTVFGALGLGQLLQGSKDIAKVKDDQEWEIIETRKALSRTGPVDAYKPKNTSIEDELKAMQEKVDINTYEYKKIPKLNESKSS

SEQ ID NO: 105502 - protein, 134 aa, Arabidopsis thaliana
  peptide (1)..(134): Ceres Seq. ID no. 13617368
  misc_feature (1)..(134): Homolog of NCBI NO: 7428718 NR Description: probable kinesin - Arabidopsis thaliana kinesin like protein [Arabidopsis thaliana]
  misc_feature (1)..(134): Homolog of NCBI NO: 22328612 NR Description: kinesin like protein {Arabidopsis -related
  misc_feature (1)..(67): Homolog of NCBI NO: 26453208 NR Description: putative kinesin [Arabidopsis thaliana]
MTTIETGQKTQKSSPSGSGTTPTGTLKQSSASFKRWGRRHPFVRYGLPMISLTVFGALGLGQLLQGSKDIAKVKDDQEWEIIETRKALSRTGPVDAYKPKNTSIEDELKAMQEKVDINTYEYKKIPKLNESKSS

SEQ ID NO: 105503 - protein, 86 aa, Arabidopsis thaliana; identical to SEQ ID NO: 29125
  peptide (1)..(86): Ceres Seq. ID no. 13617369
  misc_feature (1)..(86): Homolog of NCBI NO: 7428718 NR Description: probable kinesin - Arabidopsis thaliana kinesin like protein [Arabidopsis thaliana]
  misc_feature (1)..(86): Homolog of NCBI NO: 22328612 NR Description: kinesin like protein {Arabidopsis -related
  misc_feature (1)..(19): Homolog of NCBI NO: 26453208 NR Description: putative kinesin [Arabidopsis thaliana]

SEQ ID NO: 105504 - DNA, 836 bp, Arabidopsis thaliana
  misc_feature (1)..(836): Ceres Seq. ID no. 13617378
  misc_feature: MA Experiment ID: 20000794 Result: Down-regulated in Transcription
  misc_feature: MA Experiment 20000794 PARAMETER Experiment Name: At_Petals_P Parameter: Age (day) Value: 23-25 days
  misc_feature: MA Experiment 20000794 PARAMETER Experiment Name: At_Petals_P Parameter: Plant Line Value: WS
  misc_feature: MA Experiment 20000794 PARAMETER Experiment Name: At_Petals_P Parameter: Tissue Value: Petals vs. Whole plant
  misc_feature: MA Experiment ID: 20001558 Result: Up-regulated in Transcription
  misc_feature: MA Experiment 20001558 PARAMETER Experiment Name: At_Drought_Soil_Dry_P Parameter: Age (day) Value: 27
  misc_feature: MA Experiment 20001558 PARAMETER Experiment Name: At_Drought_Soil_Dry_P Parameter: Organism Value: A. thaliana
  misc_feature: MA Experiment 20001558 PARAMETER Experiment Name: At_Drought_Soil_Dry_P Parameter: Plant Line Value: WS
  misc_feature: MA Experiment 20001558 PARAMETER Experiment Name: At_Drought_Soil_Dry_P Parameter: Post Timepoint (hr) Value: 6
  misc_feature: MA Experiment 20001558 PARAMETER Experiment Name: At_Drought_Soil_Dry_P Parameter: Post-Treatment Value: Re-Water vs. No Drought
  misc_feature: MA Experiment 20001558 PARAMETER Experiment Name: At_Drought_Soil_Dry_P Parameter: Timepoint (day) Value: 13
  misc_feature: MA Experiment 20001558 PARAMETER Experiment Name: At_Drought_Soil_Dry_P Parameter: Treatment Value: Drought vs. No Drought
  misc_feature: MA Experiment ID: 20001560 Result: Up-regulated in Transcription
  misc_feature: MA Experiment 20001560 PARAMETER Experiment Name: At_Drought_Soil_Dry_P Parameter: Age (day) Value: 28
  misc_feature: MA Experiment 20001560 PARAMETER Experiment Name: At_Drought_Soil_Dry_P Parameter: Organism Value: A. thaliana
  misc_feature: MA Experiment 20001560 PARAMETER Experiment Name: At_Drought_Soil_Dry_P Parameter: Plant Line Value: WS
  misc_feature: MA Experiment 20001560 PARAMETER Experiment Name: At_Drought_Soil_Dry_P Parameter: Post Timepoint (hr) Value: None
  misc_feature: MA Experiment 20001560 PARAMETER Experiment Name: At_Drought_Soil_Dry_P Parameter: Post-Treatment Value: None
  misc_feature: MA Experiment 20001560 PARAMETER Experiment Name: At_Drought_Soil_Dry_P Parameter: Timepoint (day) Value: 14
  misc_feature: MA Experiment 20001560 PARAMETER Experiment Name: At_Drought_Soil_Dry_P Parameter: Treatment Value: Drought vs. No Drought
  misc_feature: MA Experiment ID: 20001911 Result: Down-regulated in Transcription
  misc_feature: MA Experiment 20001911 PARAMETER Experiment Name: At_Drought_Reproduction_P Parameter: Age (day) Value: 40
  misc_feature: MA Experiment 20001911 PARAMETER Experiment Name: At_Drought_Reproduction_P Parameter: Organism Value: A. thaliana
  misc_feature: MA Experiment 20001911 PARAMETER Experiment Name: At_Drought_Reproduction_P Parameter: Plant Line Value: WS
  misc_feature: MA Experiment 20001911 PARAMETER Experiment Name: At_Drought_Reproduction_P Parameter: Timepoint (day) Value: 10
  misc_feature: MA Experiment 20001911 PARAMETER Experiment Name: At_Drought_Reproduction_P Parameter: Tissue Value: Flowers
  misc_feature: MA Experiment 20001911 PARAMETER Experiment Name: At_Drought_Reproduction_P Parameter: Treatment Value: Drought vs. No Drought
aaaatcagcctcttcgttttctttctcctcctgtctgttgatttaaagacccaaatctgacgcttctctctctctttctggtatctgcgtttgattcggagaagaaaaaaaaaaaaaaggcaaagagagagcttcaatggagttagcttctttccttggtagagctctgtttgtttccgtatttcttctctccgcatggcaagagttcaatgattttggtgaagatggtggccgatcagctaaatctttgaaaccaaaattcaatgcctttgtaaaccatgtgacaactcacactggccagcaattgccaccagtcgatatgaagattcttgttgctgctgctatagccttgaagggtattgggggactattgtttgtctttggcagctcattgggagcttatctcttgcttctgcatcaagccgttgccaccccaattctgtatgatttctacaactacgatgttgacagaaaggaattcggccaactattttcaaaatttacacagagcttggctcttcttggaggactgctcttcttcattggaatgaaaaactcaaggaaacacggtaggcaactcaggaaaaaggctccaaaggcaaaagcaaactgaagaagccatatctttcatcggttttattcggtctgtattttattttcattttggaatccaggatgggtttaaagagtctatctgatgaggccattgaaaggcaaaatctctgcaaatcattttgcttacttcaagaagcttttatgacacttttttgtagaaatatttatggattattgtttcttagagacaccacttcaatgttattgttccaacttatttc

SEQ ID NO: 105505 - protein, 158 aa, Arabidopsis thaliana; identical to SEQ ID NO: 26093
  peptide (1)..(158): Ceres Seq. ID no. 13617379
  misc_feature (1)..(138): Pfam Name: HR-like lesion-inducing Pfam Description: HR-like lesion-inducing
  misc_feature (1)..(158): Homolog of NCBI NO: 15236497 NR Description: elicitor like protein [Arabidopsis thaliana]
  misc_feature (1)..(158): Homolog of NCBI NO: 7489144 NR Description: hypothetical protein (clone NF22) - common tobacco
  misc_feature (1)..(158): Homolog of NCBI NO: 27261473 NR Description: Unknown protein [Oryza sativa (japonica
  misc_feature (1)..(128): Homolog of NCBI NO: 7489143 NR Description: hypothetical protein (clone ND1) - common tobacco
  misc_feature (1)..(158): Homolog of NCBI NO: 38346190 NR Description: OSJNBa0027O01.6 [Oryza sativa (japonica
  misc_feature (1)..(157): Homolog of NCBI NO: 15219714 NR Description: lesion-inducing ORF protein - related
  misc_feature (1)..(157): Homolog of NCBI NO: 21592798 NR Description: Nicotiana lesion-inducing like [Arabidopsis
  misc_feature (24)..(157): Homolog of NCBI NO: 37534824 NR Description: putative RNA-binding protein [Oryza sativa
  misc_feature (1)..(157): Homolog of NCBI NO: 15239873 NR Description: Nicotiana lesion-inducing like [Arabidopsis
  misc_feature (1)..(156): Homolog of NCBI NO: 40287494 NR Description: putative lesion-inducing protein [Capsicum annuum]

SEQ ID NO: 105506 - protein, 97 aa, Arabidopsis thaliana; identical to SEQ ID NO: 26094
  peptide (1)..(97): Ceres Seq. ID no. 13617380
  misc_feature (1)..(77): Pfam Name: HR-like lesion-inducing Pfam Description: HR-like lesion-inducing
  misc_feature (1)..(97): Homolog of NCBI NO: 15236497 NR Description: elicitor like protein [Arabidopsis thaliana]
  misc_feature (1)..(97): Homolog of NCBI NO: 7489144 NR Description: hypothetical protein (clone NF22) - common tobacco
  misc_feature (1)..(97): Homolog of NCBI NO: 27261473 NR Description: Unknown protein [Oryza sativa (japonica
  misc_feature (1)..(67): Homolog of NCBI NO: 7489143 NR Description: hypothetical protein (clone ND1) - common tobacco
  misc_feature (1)..(97): Homolog of NCBI NO: 38346190 NR Description: OSJNBa0027O01.6 [Oryza sativa (japonica
  misc_feature (1)..(96): Homolog of NCBI NO: 15219714 NR Description: lesion-inducing ORF protein - related
  misc_feature (1)..(96): Homolog of NCBI NO: 21592798 NR Description: Nicotiana lesion-inducing like [Arabidopsis
  misc_feature (1)..(96): Homolog of NCBI NO: 37534824 NR Description: putative RNA-binding protein [Oryza sativa
  misc_feature (1)..(96): Homolog of NCBI NO: 15239873 NR Description: Nicotiana lesion-inducing like [Arabidopsis
  misc_feature (1)..(95): Homolog of NCBI NO: 40287494 NR Description: putative lesion-inducing protein [Capsicum annuum]

SEQ ID NO: 105507 - DNA, 1106 bp, Arabidopsis thaliana
  misc_feature (1)..(1106): Ceres Seq. ID no. 13617381
  misc_feature: MA Experiment ID: 108595 Result: Up-regulated in Transcription
  misc_feature: MA Experiment 108595 PARAMETER Experiment Name: At_Ler-pi_Ovule_cDNA_P Parameter: Plant Line Value: null
  misc_feature: MA Experiment ID: 20000182 Result: Up-regulated in Transcription
  misc_feature: MA Experiment 20000182 PARAMETER Experiment Name: At_2mM_SA_P Parameter: Age (day) Value: 14
  misc_feature: MA Experiment 20000182 PARAMETER Experiment Name: At_2mM_SA_P Parameter: Organism Value: A. thaliana
  misc_feature: MA Experiment 20000182 PARAMETER Experiment Name: At_2mM_SA_P Parameter: Plant Line Value: WS
  misc_feature: MA Experiment 20000182 PARAMETER Experiment Name: At_2mM_SA_P Parameter: Timepoint (hr) Value: 6
  misc_feature: MA Experiment 20000182 PARAMETER Experiment Name: At_2mM_SA_P Parameter: Tissue Value: Aerial
  misc_feature: MA Experiment 20000182 PARAMETER Experiment Name: At_2mM_SA_P Parameter: Treatment Value: 2mM SA vs. No Treatment
  misc_feature: MA Experiment ID: 20000265 Result: Down-regulated in Transcription
  misc_feature: MA Experiment 20000265 PARAMETER Experiment Name: At_Open_Flower_P Parameter: Age (day) Value: 21
  misc_feature: MA Experiment 20000265 PARAMETER Experiment Name: At_Open_Flower_P Parameter: Plant Line Value: WS
  misc_feature: MA Experiment 20000265 PARAMETER Experiment Name: At_Open_Flower_P Parameter: Tissue Value: Closed Flower vs. Whole Plant
  misc_feature: MA Experiment ID: 20001450 Result: Up-regulated in Transcription
  misc_feature: MA Experiment 20001450 PARAMETER Experiment Name: At_Far-red-induction_P Parameter: Age (day) Value: 7
  misc_feature: MA Experiment 20001450 PARAMETER Experiment Name: At_Far-red-induction_P Parameter: Light Value: Far-red vs. White
  misc_feature: MA Experiment 20001450 PARAMETER Experiment Name: At_Far-red-induction_P Parameter: Organism Value: A. thaliana
  misc_feature: MA Experiment 20001450 PARAMETER Experiment Name: At_Far-red-induction_P Parameter: Plant Line Value: Columbia
  misc_feature: MA Experiment 20001450 PARAMETER Experiment Name: At_Far-red-induction_P Parameter: Timepoint (hr) Value: 8
  misc_feature: MA Experiment 20001450 PARAMETER Experiment Name: At_Far-red-induction_P Parameter: Tissue Value: Whole Plant
  misc_feature: MA Experiment ID: 20001451 Result: Up-regulated in Transcription
  misc_feature: MA Experiment 20001451 PARAMETER Experiment Name: At_Far-red-induction_P Parameter: Age (day) Value: 7
  misc_feature: MA Experiment 20001451 PARAMETER Experiment Name: At_Far-red-induction_P Parameter: Light Value: Far-red vs. White
  misc_feature: MA Experiment 20001451 PARAMETER Experiment Name: At_Far-red-induction_P Parameter: Organism Value: A. thaliana
  misc_feature: MA Experiment 20001451 PARAMETER Experiment Name: At_Far-red-induction_P Parameter: Plant Line Value: Columbia
  misc_feature: MA Experiment 20001451 PARAMETER Experiment Name: At_Far-red-induction_P Parameter: Timepoint (hr) Value: 24
  misc_feature: MA Experiment 20001451 PARAMETER Experiment Name: At_Far-red-induction_P Parameter: Tissue Value: Whole Plant
  misc_feature: MA Experiment ID: 20001557 Result: Up-regulated in Transcription
  misc_feature: MA Experiment 20001557 PARAMETER Experiment Name: At_Drought_Soil_Dry_P Parameter: Age (day) Value: 27
  misc_feature: MA Experiment 20001557 PARAMETER Experiment Name: At_Drought_Soil_Dry_P Parameter: Organism Value: A. thaliana
  misc_feature: MA Experiment 20001557 PARAMETER Experiment Name: At_Drought_Soil_Dry_P Parameter: Plant Line Value: WS
  misc_feature: MA Experiment 20001557 PARAMETER Experiment Name: At_Drought_Soil_Dry_P Parameter: Post Timepoint (hr) Value: 3
  misc_feature: MA Experiment 20001557 PARAMETER Experiment Name: At_Drought_Soil_Dry_P Parameter: Post-Treatment Value: Re-Water vs. No Drought
  misc_feature: MA Experiment 20001557 PARAMETER Experiment Name: At_Drought_Soil_Dry_P Parameter: Timepoint (day) Value: 13
  misc_feature: MA Experiment 20001557 PARAMETER Experiment Name: At_Drought_Soil_Dry_P Parameter: Treatment Value: Drought vs. No Drought
  misc_feature: MA Experiment ID: 20001560 Result: Up-regulated in Transcription
  misc_feature: MA Experiment 20001560 PARAMETER Experiment Name: At_Drought_Soil_Dry_P Parameter: Age (day) Value: 28
  misc_feature: MA Experiment 20001560 PARAMETER Experiment Name: At_Drought_Soil_Dry_P Parameter: Organism Value: A. thaliana
  misc_feature: MA Experiment 20001560 PARAMETER Experiment Name: At_Drought_Soil_Dry_P Parameter: Plant Line Value: WS
  misc_feature: MA Experiment 20001560 PARAMETER Experiment Name: At_Drought_Soil_Dry_P Parameter: Post Timepoint (hr) Value: None
  misc_feature: MA Experiment 20001560 PARAMETER Experiment Name: At_Drought_Soil_Dry_P Parameter: Post-Treatment Value: None
  misc_feature: MA Experiment 20001560 PARAMETER Experiment Name: At_Drought_Soil_Dry_P Parameter: Timepoint (day) Value: 14
  misc_feature: MA Experiment 20001560 PARAMETER Experiment Name: At_Drought_Soil_Dry_P Parameter: Treatment Value: Drought vs. No Drought
  misc_feature: MA Experiment ID: 20001904 Result: Up-regulated in Transcription
  misc_feature: MA Experiment 20001904 PARAMETER Experiment Name: At_Drought_Reproduction_P Parameter: Age (day) Value: 37
  misc_feature: MA Experiment 20001904 PARAMETER Experiment Name: At_Drought_Reproduction_P Parameter: Organism Value: A. thaliana
  misc_feature: MA Experiment 20001904 PARAMETER Experiment Name: At_Drought_Reproduction_P Parameter: Plant Line Value: WS
  misc_feature: MA Experiment 20001904 PARAMETER Experiment Name: At_Drought_Reproduction_P Parameter: Timepoint (day) Value: 7
  misc_feature: MA Experiment 20001904 PARAMETER Experiment Name: At_Drought_Reproduction_P Parameter: Tissue Value: Rosettes
  misc_feature: MA Experiment 20001904 PARAMETER Experiment Name: At_Drought_Reproduction_P Parameter: Treatment Value: Drought vs. No Drought
aacaacacgatttctcacacatttcaagttttcattatcatccagaaatcttcttcttcctccgatcaccaccatgtgtacgttagagaaacgcggcgatctcttcctcctaaccctaaccggagacggcgaacacagattccaccccgacacaattgccaccattctctcccttctcgaacaagccaaatctcaatccacccgtggatccatcctcatcaccaccgccaacggcaaattcttctccaacggattcgatcttgcatgggctcaaaccgccggatccaaaaccggagccgcaaaccggcttcaccaaatggttgaatcattcaaaccggtggtagcagcgcttctcgatctccctatgccgacgatcgccgccttgaacggccacgccgccgccgcgggattgattttggctttgagccatgattacgtgttcatgaggaaagatcgtggggttctgtatatgagtgaagttgacatcgggctttcgatgccggattatttctcggcgttggttagggctaagatcgggacgagtgcggcgaggagagagctgttgttgagtgggaagaagattagaggagaagaagcggtgggtttggggattgttgactcggccgcgtatgatagtgaggaaggtgttgttgtggctagtgtgcgccttggtgagaaattggcggcgaagaaatggagcggtgaggtttatgcgtcgataaggaagagtttgtatccggagctttgtgggattcttggtttagagactagagtgtttgcaacacctaagctctaagaaagcgtctttcagagagtgaatctttggtttatttgaaaaacacatgttttgggagaaagagacaatgttaaactctagaactgtgatcacagaaataataaacatgttcaatgttggcttgttcagtgttgttgttgggcttgttcttaggcttggttgtttaaaatatggaaccggtttaatcggttttagagctaattagatgaactagagataaccgggttgtagtagttatcggagaaggagaaacggtgttgtgaatttgtgattgctgaaattacgccatgttaaaccggtattaaaacac

SEQ ID NO: 105508 - protein, 264 aa, Arabidopsis thaliana; identical to SEQ ID NO: 21152
  peptide (1)..(264): Ceres Seq. ID no. 13617382
  misc_feature (35)..(210): Pfam Name: Enoyl-CoA hydratase/isomerase family Pfam Description: Enoyl-CoA hydratase/isomerase family
  misc_feature (25)..(264): Homolog of NCBI NO: 15236498 NR Description: enoyl-CoA hydratase/isomerase family [Arabidopsis
  misc_feature (25)..(264): Homolog of NCBI NO: 21555734 NR Description: carnitine racemase like protein [Arabidopsis
  misc_feature (25)..(264): Homolog of NCBI NO: 15236499 NR Description: enoyl-CoA hydratase/isomerase family [Arabidopsis
  misc_feature (25)..(248): Homolog of NCBI NO: 15218713 NR Description: enoyl-CoA hydratase/isomerase family [Arabidopsis
  misc_feature (24)..(248): Homolog of NCBI NO: 34903766 NR Description: unnamed protein product [Oryza sativa (japonica group)] >gi|7340875|dbj|BAA92965.1| unnamed protein product
  misc_feature (25)..(258): Homolog of NCBI NO: 23017142 NR Description: hypothetical protein [Thermobifida fusca]
  misc_feature (41)..(230): Homolog of NCBI NO: 15828352 NR Description: possible enoyl-CoA hydratase [Mycobacterium
  misc_feature (34)..(247): Homolog of NCBI NO: 32404374 NR Description: hypothetical protein ( hypothetical protein
  misc_feature (19)..(247): Homolog of NCBI NO: 40739395 NR Description: hypothetical protein AN6767.2 [Aspergillus
  misc_feature (51)..(214): Homolog of NCBI NO: 24214965 NR Description: enoyl-CoA hydratase [Leptospira interrogans

SEQ ID NO: 105509 - protein, 240 aa, Arabidopsis thaliana; identical to SEQ ID NO: 21153
  peptide (1)..(240): Ceres Seq. ID no. 13617383
  misc_feature (11)..(186): Pfam Name: Enoyl-CoA hydratase/isomerase family Pfam Description: Enoyl-CoA hydratase/isomerase family
  misc_feature (1)..(240): Homolog of NCBI NO: 15236498 NR Description: enoyl-CoA hydratase/isomerase family [Arabidopsis
  misc_feature (1)..(240): Homolog of NCBI NO: 21555734 NR Description: carnitine racemase like protein [Arabidopsis
  misc_feature (1)..(240): Homolog of NCBI NO: 15236499 NR Description: enoyl-CoA hydratase/isomerase family [Arabidopsis
  misc_feature (1)..(224): Homolog of NCBI NO: 15218713 NR Description: enoyl-CoA hydratase/isomerase family [Arabidopsis
  misc_feature (1)..(224): Homolog of NCBI NO: 34903766 NR Description: unnamed protein product [Oryza sativa (japonica group)] >gi|7340875|dbj|BAA92965.1| unnamed protein product
  misc_feature (1)..(234): Homolog of NCBI NO: 23017142 NR Description: hypothetical protein [Thermobifida fusca]
  misc_feature (17)..(206): Homolog of NCBI NO: 15828352 NR Description: possible enoyl-CoA hydratase [Mycobacterium
  misc_feature (10)..(223): Homolog of NCBI NO: 32404374 NR Description: hypothetical protein ( hypothetical protein
  misc_feature (1)..(223): Homolog of NCBI NO: 40739395 NR Description: hypothetical protein AN6767.2 [Aspergillus
  misc_feature (27)..(190): Homolog of NCBI NO: 24214965 NR Description: enoyl-CoA hydratase [Leptospira interrogans

SEQ ID NO: 105510 - protein, 159 aa, Arabidopsis thaliana; identical to SEQ ID NO: 21154
  peptide (1)..(159): Ceres Seq. ID no. 13617384
  misc_feature (1)..(105): Pfam Name: Enoyl-CoA hydratase/isomerase family Pfam Description: Enoyl-CoA hydratase/isomerase family
  misc_feature (1)..(159): Homolog of NCBI NO: 15236498 NR Description: enoyl-CoA hydratase/isomerase family [Arabidopsis
  misc_feature (1)..(159): Homolog of NCBI NO: 21555734 NR Description: carnitine racemase like protein [Arabidopsis
  misc_feature (1)..(159): Homolog of NCBI NO: 15236499 NR Description: enoyl-CoA hydratase/isomerase family [Arabidopsis
  misc_feature (1)..(143): Homolog of NCBI NO: 15218713 NR Description: enoyl-CoA hydratase/isomerase family [Arabidopsis
  misc_feature (1)..(143): Homolog of NCBI NO: 34903766 NR Description: unnamed protein product [Oryza sativa (japonica group)] >gi|7340875|dbj|BAA92965.1| unnamed protein product
  misc_feature (1)..(153): Homolog of NCBI NO: 23017142 NR Description: hypothetical protein [Thermobifida fusca]
  misc_feature (1)..(125): Homolog of NCBI NO: 15828352 NR Description: possible enoyl-CoA hydratase [Mycobacterium
  misc_feature (1)..(142): Homolog of NCBI NO: 32404374 NR Description: hypothetical protein ( hypothetical protein
  misc_feature (1)..(142): Homolog of NCBI NO: 40739395 NR Description: hypothetical protein AN6767.2 [Aspergillus
  misc_feature (1)..(109): Homolog of NCBI NO: 24214965 NR Description: enoyl-CoA hydratase [Leptospira interrogans

SEQ ID NO: 105511 - DNA, 1766 bp, Arabidopsis thaliana
  misc_feature (1)..(1766): Ceres Seq. ID no. 13617387
  misc_feature: MA Experiment ID: 20000224 Result: Down-regulated in Transcription
  misc_feature: MA Experiment ID: 20000437 Result: Up-regulated in Transcription
  misc_feature: MA Experiment 20000437 PARAMETER Experiment Name: At_Drought_P Parameter: Age (day) Value: 8
  misc_feature: MA Experiment 20000437 PARAMETER Experiment Name: At_Drought_P Parameter: Organism Value: A. thaliana
  misc_feature: MA Experiment 20000437 PARAMETER Experiment Name: At_Drought_P Parameter: Plant Line Value: WS
  misc_feature: MA Experiment 20000437 PARAMETER Experiment Name: At_Drought_P Parameter: Timepoint (hr) Value: 24
  misc_feature: MA Experiment 20000437 PARAMETER Experiment Name: At_Drought_P Parameter: Tissue Value: Whole Plant
  misc_feature: MA Experiment 20000437 PARAMETER Experiment Name: At_Drought_P Parameter: Treatment Value: Drought vs. No Drought
  misc_feature: MA Experiment ID: 20000439 Result: Down-regulated in Transcription
  misc_feature: MA Experiment 20000439 PARAMETER Experiment Name: At_Roots__P Parameter: Age (day) Value: 14 vs. 21
  misc_feature: MA Experiment 20000439 PARAMETER Experiment Name: At_Roots__P Parameter: Organism Value: A. thaliana
  misc_feature: MA Experiment 20000439 PARAMETER Experiment Name: At_Roots__P Parameter: Tissue Value: Roots vs. Whole Plant
  misc_feature: MA Experiment ID: 20001247 Result: Up-regulated in Transcription
  misc_feature: MA Experiment 20001247 PARAMETER Experiment Name: At_Far-red-induction_P Parameter: Age (day) Value: 7
  misc_feature: MA Experiment 20001247 PARAMETER Experiment Name: At_Far-red-induction_P Parameter: Light Value: Far-red vs. White
  misc_feature: MA Experiment 20001247 PARAMETER Experiment Name: At_Far-red-induction_P Parameter: Organism Value: A. thaliana
  misc_feature: MA Experiment 20001247 PARAMETER Experiment Name: At_Far-red-induction_P Parameter: Plant Line Value: Columbia
  misc_feature: MA Experiment 20001247 PARAMETER Experiment Name: At_Far-red-induction_P Parameter: Timepoint (hr) Value: 1
  misc_feature: MA Experiment 20001247 PARAMETER Experiment Name: At_Far-red-induction_P Parameter: Tissue Value: Whole Plant
  misc_feature: MA Experiment ID: 20001905 Result: Up-regulated in Transcription
  misc_feature: MA Experiment 20001905 PARAMETER Experiment Name: At_Drought_Reproduction_P Parameter: Age (day) Value: 40
  misc_feature: MA Experiment 20001905 PARAMETER Experiment Name: At_Drought_Reproduction_P Parameter: Organism Value: A. thaliana
  misc_feature: MA Experiment 20001905 PARAMETER Experiment Name: At_Drought_Reproduction_P Parameter: Plant Line Value: WS
  misc_feature: MA Experiment 20001905 PARAMETER Experiment Name: At_Drought_Reproduction_P Parameter: Timepoint (day) Value: 10
  misc_feature: MA Experiment 20001905 PARAMETER Experiment Name: At_Drought_Reproduction_P Parameter: Tissue Value: Rosettes
  misc_feature: MA Experiment 20001905 PARAMETER Experiment Name: At_Drought_Reproduction_P Parameter: Treatment Value: Drought vs. No Drought
aatcaattaaatcaccaaactcaattaaataaaaagaaaaaaattattattatcccttcttcttcttcttcgtcttcgtctttgattctcctgattcatgtcgcttaaatttttagcgatcttcgaatcccattttccttcgggaatctgacattttttctcgggaaatttttttatccaaatcggagtaaagtatcgaatctagagaatccgctatggatgagacctattttgatctattgaatttctttaagaatccctcttttacagagacatttgtcgacatcttactatgcgcagttccgatttggctcgccgttatgatcgggttattaatcggatggtcttggcgtccaagatggaccggtttgatctatttagggtttcgttctaagcttcggtttttatggaccgcaccgcctgggtttggtgctcgtcggctttggcttgctttcaccgctctctctgctttctccgtttgccgaaccatctggtcaaggaatgacaccagagctaataaatcggcgaccggttcagcttcgtcgcagacgcctgttgaggataatgatgaatcaggattggcctcaagaggtagcgataacgggacggtgacagaggatattgtgacagagaatgatttagagcatctgcttcagctgcttgaagttggaaatgcagctttggaatggcaatctatgatggataagactactccaaatatgagctaccaggcttggcgtcatgagcctgagacaggtcctgttatttatcgcagccggactgtgtttgaggatgcaactccagatattgttagggatttcttctgggatgatgagtttcgacctaaatgggatttcatgcttgccaacttcaaaacgttggaggaggacactcagacaggaacaatgattgttcagtggagaaaaaagtttccttttttctgtagtgaccgagagtatatcattggccggagaatatgggagtctgggaagaagtattattgtgtcacaaagggagttccttatccagctctaccaaagcgtgataagccaaggcgtgttgagctttatttctcaagttgggttatcagagcggttgaatcccgaaaaggagatggacagcaaacggcttgtgaagtttcccttgtccactacgaagacatgggcatcccaaaagacgtagcaaagttaggtgtccgtcatggcatgtggggagctgtcaagaagctaaactctggtttacgagcgtaccaatccgccagaaaatcagactcatctctatctcggatcgcccaaatggcaagaatcactacaaaactgaacatggattctgcagaatcatcttcaagagatgaagacagaagcagagcaatggaatatgcgagacaacgggaccatttgagaatggactggaaatgggttgttgtaggaggtgtcgcattggcttgtggccttcactctgggatcattggcaaggctttactggctggagctggccagagactggctcgtaggtgagaaaccttgtcgtattcttattatatcttcccttgacagaaaagagaaacatatgcatataattaagggaaatgtattatttttgcaactcctctgagaagggcatgtggttttggtggtgaaccatgtagagtagtagctttaaactatggagtcataagttatttgagttctatcttgtaccacaggatagtgagatatgtattttataaactatatgaatctacatagcttctaaaagcttaaatt

SEQ ID NO: 105512 - protein, 433 aa, Arabidopsis thaliana
  peptide (1)..(433): Ceres Seq. ID no. 13617388
  misc_feature (185)..(264): Pfam Name: START domain Pfam Description: START domain
  misc_feature (1)..(433): Homolog of NCBI NO: 18414239 NR Description: expressed protein [Arabidopsis thaliana] AT4g14500/dl3290w [Arabidopsis thaliana]
  misc_feature (1)..(433): Homolog of NCBI NO: 7485064 NR Description: hypothetical protein - Arabidopsis thaliana hypothetical protein [Arabidopsis thaliana]
  misc_feature (9)..(433): Homolog of NCBI NO: 18403635 NR Description: expressed protein [Arabidopsis thaliana]
  misc_feature (9)..(433): Homolog of NCBI NO: 15810257 NR Description: unknown protein [Arabidopsis thaliana]
  misc_feature (118)..(429): Homolog of NCBI NO: 34393225 NR Description: putative membrane related protein CP5 [Oryza
  misc_feature (5)..(42): Homolog of NCBI NO: 34393225 NR Description: putative membrane related protein CP5 [Oryza
  misc_feature (76)..(432): Homolog of NCBI NO: 22135902 NR Description: membrane related protein CP5, putative thaliana] >gi|23197608|gb|AAN15331.1| membrane related protein
  misc_feature (21)..(52): Homolog of NCBI NO: 22135902 NR Description: membrane related protein CP5, putative thaliana] >gi|23197608|gb|AAN15331.1| membrane related protein
  misc_feature (76)..(432): Homolog of NCBI NO: 15217736 NR Description: membrane related protein CP5 -related
  misc_feature (21)..(52): Homolog of NCBI NO: 15217736 NR Description: membrane related protein CP5 -related
MDETYFDLLNFFKNPSFTETFVDILLCAVPIWLAVMIGLLIGWSWRPRWTGLIYLGFRSKLRFLWTAPPGFGARRLWLAFTALSAFSVCRTIWSRNDTRANKSATGSASSQTPVEDNDESGLASRGSDNGTVTEDIVTENDLEHLLQLLEVGNAALEWQSMMDKTTPNMSYQAWRHEPETGPVIYRSRTVFEDATPDIVRDFFWDDEFRPKWDFMLANFKTLEEDTQTGTMIVQWRKKFPFFCSDREYIIGRRIWESGKKYYCVTKGVPYPALPKRDKPRRVELYFSSWVIRAVESRKGDGQQTACEVSLVHYEDMGIPKDVAKLGVRHGMWGAVKKLNSGLRAYQSARKSDSSLSRIAQMARITTKLNMDSAESSSRDEDRSRAMEYARQRDHLRMDWKWVVVGGVALACGLHSGIIGKALLAGAGQRLARR

SEQ ID NO: 105513 - protein, 398 aa, Arabidopsis thaliana
  peptide (1)..(398): Ceres Seq. ID no. 13617389
  misc_feature (150)..(229): Pfam Name: START domain Pfam Description: START domain
  misc_feature (1)..(398): Homolog of NCBI NO: 18414239 NR Description: expressed protein [Arabidopsis thaliana] AT4g14500/dl3290w [Arabidopsis thaliana]
  misc_feature (1)..(398): Homolog of NCBI NO: 7485064 NR Description: hypothetical protein - Arabidopsis thaliana hypothetical protein [Arabidopsis thaliana]
  misc_feature (1)..(398): Homolog of NCBI NO: 18403635 NR Description: expressed protein [Arabidopsis thaliana]
  misc_feature (1)..(398): Homolog of NCBI NO: 15810257 NR Description: unknown protein [Arabidopsis thaliana]
  misc_feature (83)..(394): Homolog of NCBI NO: 34393225 NR Description: putative membrane related protein CP5 [Oryza
  misc_feature (41)..(397): Homolog of NCBI NO: 22135902 NR Description: membrane related protein CP5, putative thaliana] >gi|23197608|gb|AAN15331.1| membrane related protein
  misc_feature (1)..(17): Homolog of NCBI NO: 22135902 NR Description: membrane related protein CP5, putative thaliana] >gi|23197608|gb|AAN15331.1| membrane related protein
  misc_feature (41)..(397): Homolog of NCBI NO: 15217736 NR Description: membrane related protein CP5 -related
  misc_feature (1)..(17): Homolog of NCBI NO: 15217736 NR Description: membrane related protein CP5 -related
  misc_feature (102)..(396): Homolog of NCBI NO: 38344869 NR Description: OSJNBa0020P07.12 [Oryza sativa (japonica
MIGLLIGWSWRPRWTGLIYLGFRSKLRFLWTAPPGFGARRLWLAFTALSAFSVCRTIWSRNDTRANKSATGSASSQTPVEDNDESGLASRGSDNGTVTEDIVTENDLEHLLQLLEVGNAALEWQSMMDKTTPNMSYQAWRHEPETGPVIYRSRTVFEDATPDIVRDFFWDDEFRPKWDFMLANFKTLEEDTQTGTMIVQWRKKFPFFCSDREYIIGRRIWESGKKYYCVTKGVPYPALPKRDKPRRVELYFSSWVIRAVESRKGDGQQTACEVSLVHYEDMGIPKDVAKLGVRHGMWGAVKKLNSGLRAYQSARKSDSSLSRIAQMARITTKLNMDSAESSSRDEDRSRAMEYARQRDHLRMDWKWVVVGGVALACGLHSGIIGKALLAGAGQRLARR

SEQ ID NO: 105514 - protein, 273 aa, Arabidopsis thaliana
  peptide (1)..(273): Ceres Seq. ID no. 13617390
  misc_feature (25)..(104): Pfam Name: START domain Pfam Description: START domain
  misc_feature (1)..(273): Homolog of NCBI NO: 18414239 NR Description: expressed protein [Arabidopsis thaliana] AT4g14500/dl3290w [Arabidopsis thaliana]
  misc_feature (1)..(273): Homolog of NCBI NO: 7485064 NR Description: hypothetical protein - Arabidopsis thaliana hypothetical protein [Arabidopsis thaliana]
  misc_feature (1)..(273): Homolog of NCBI NO: 18403635 NR Description: expressed protein [Arabidopsis thaliana]
  misc_feature (1)..(273): Homolog of NCBI NO: 15810257 NR Description: unknown protein [Arabidopsis thaliana]
  misc_feature (1)..(269): Homolog of NCBI NO: 34393225 NR Description: putative membrane related protein CP5 [Oryza
  misc_feature (1)..(272): Homolog of NCBI NO: 22135902 NR Description: membrane related protein CP5, putative thaliana] >gi|23197608|gb|AAN15331.1| membrane related protein
  misc_feature (1)..(272): Homolog of NCBI NO: 15217736 NR Description: membrane related protein CP5 -related
  misc_feature (1)..(271): Homolog of NCBI NO: 38344869 NR Description: OSJNBa0020P07.12 [Oryza sativa (japonica
  misc_feature (1)..(269): Homolog of NCBI NO: 18033654 NR Description: putative nodule membrane protein [Medicago sativa]
  misc_feature (1)..(269): Homolog of NCBI NO: 10178166 NR Description: membrane related protein-like [Arabidopsis
MMDKTTPNMSYQAWRHEPETGPVIYRSRTVFEDATPDIVRDFFWDDEFRPKWDFMLANFKTLEEDTQTGTMIVQWRKKFPFFCSDREYIIGRRIWESGKKYYCVTKGVPYPALPKRDKPRRVELYFSSWVIRAVESRKGDGQQTACEVSLVHYEDMGIPKDVAKLGVRHGMWGAVKKLNSGLRAYQSARKSDSSLSRIAQMARITTKLNMDSAESSSRDEDRSRAMEYARQRDHLRMDWKWVVVGGVALACGLHSGIIGKALLAGAGQRLARR

SEQ ID NO: 105515 - DNA, 802 bp, Arabidopsis thaliana
  misc_feature (1)..(802): Ceres Seq. ID no. 13617391
  misc_feature: MA Experiment ID: 108461 Result: Up-regulated in Transcription
  misc_feature: MA Experiment 108461 PARAMETER Experiment Name: At_Germinating_Seeds_cDNA_P Parameter: Age (day) Value: 1 vs. 0
  misc_feature: MA Experiment 108461 PARAMETER Experiment Name: At_Germinating_Seeds_cDNA_P Parameter: Tissue Value: Germinating Seeds
  misc_feature: MA Experiment ID: 108462 Result: Up-regulated in Transcription
  misc_feature: MA Experiment 108462 PARAMETER Experiment Name: At_Germinating_Seeds_cDNA_P Parameter: Age (day) Value: 2 vs. 0
  misc_feature: MA Experiment 108462 PARAMETER Experiment Name: At_Germinating_Seeds_cDNA_P Parameter: Tissue Value: Germinating Seeds
  misc_feature: MA Experiment ID: 108595 Result: Down-regulated in Transcription
  misc_feature: MA Experiment 108595 PARAMETER Experiment Name: At_Ler-pi_Ovule_cDNA_P Parameter: Plant Line Value: null
  misc_feature: MA Experiment ID: 108667 Result: Down-regulated in Transcription
  misc_feature: MA Experiment 108667 PARAMETER Experiment Name: At_2mM_SA_cDNA_P Parameter: Plant Line Value: WS
  misc_feature: MA Experiment 108667 PARAMETER Experiment Name: At_2mM_SA_cDNA_P Parameter: Timepoint (hr) Value: 1
  misc_feature: MA Experiment 108667 PARAMETER Experiment Name: At_2mM_SA_cDNA_P Parameter: Treatment Value: 2mM SA vs. No Treatment
  misc_feature: MA Experiment ID: 108668 Result: Down-regulated in Transcription
  misc_feature: MA Experiment 108668 PARAMETER Experiment Name: At_2mM_SA_cDNA_P Parameter: Plant Line Value: WS
  misc_feature: MA Experiment 108668 PARAMETER Experiment Name: At_2mM_SA_cDNA_P Parameter: Timepoint (hr) Value: 6
  misc_feature: MA Experiment 108668 PARAMETER Experiment Name: At_2mM_SA_cDNA_P Parameter: Treatment Value: 2mM SA vs. No Treatment
  misc_feature: MA Experiment ID: 20000070 Result: Down-regulated in Transcription
  misc_feature: MA Experiment 20000070 PARAMETER Experiment Name: At_100uM_ABA_Mutants_cDNA_P Parameter: Plant Line Value: CS24
  misc_feature: MA Experiment 20000070 PARAMETER Experiment Name: At_100uM_ABA_Mutants_cDNA_P Parameter: Timepoint (hr) Value: 6
  misc_feature: MA Experiment 20000070 PARAMETER Experiment Name: At_100uM_ABA_Mutants_cDNA_P Parameter: Tissue Value: Aerial
  misc_feature: MA Experiment 20000070 PARAMETER Experiment Name: At_100uM_ABA_Mutants_cDNA_P Parameter: Treatment Value: 100uM ABA vs. No Treatment
  misc_feature: MA Experiment ID: 20000071 Result: Down-regulated in Transcription
  misc_feature: MA Experiment 20000071 PARAMETER Experiment Name: At_100uM_ABA_Mutants_cDNA_P Parameter: Plant Line Value: CS8104
  misc_feature: MA Experiment 20000071 PARAMETER Experiment Name: At_100uM_ABA_Mutants_cDNA_P Parameter: Timepoint (hr) Value: 6
  misc_feature: MA Experiment 20000071 PARAMETER Experiment Name: At_100uM_ABA_Mutants_cDNA_P Parameter: Tissue Value: Aerial
  misc_feature: MA Experiment 20000071 PARAMETER Experiment Name: At_100uM_ABA_Mutants_cDNA_P Parameter: Treatment Value: 100uM ABA vs. No Treatment
  misc_feature: MA Experiment ID: 20000087 Result: Down-regulated in Transcription
  misc_feature: MA Experiment 20000087 PARAMETER Experiment Name: At_100uM_ABA_Mutants_cDNA_P Parameter: Plant Line Value: WS
  misc_feature: MA Experiment 20000087 PARAMETER Experiment Name: At_100uM_ABA_Mutants_cDNA_P Parameter: Timepoint (hr) Value: 6
  misc_feature: MA Experiment 20000087 PARAMETER Experiment Name: At_100uM_ABA_Mutants_cDNA_P Parameter: Tissue Value: Aerial
  misc_feature: MA Experiment 20000087 PARAMETER Experiment Name: At_100uM_ABA_Mutants_cDNA_P Parameter: Treatment Value: 100uM ABA vs. No Treatment
  misc_feature: MA Experiment ID: 20000117 Result: Down-regulated in Transcription
  misc_feature: MA Experiment 20000117 PARAMETER Experiment Name: At_100uM_ABA_Mutants_cDNA_P Parameter: Plant Line Value: Columbia
  misc_feature: MA Experiment 20000117 PARAMETER Experiment Name: At_100uM_ABA_Mutants_cDNA_P Parameter: Timepoint (hr) Value: 6
  misc_feature: MA Experiment 20000117 PARAMETER Experiment Name: At_100uM_ABA_Mutants_cDNA_P Parameter: Tissue Value: Aerial
  misc_feature: MA Experiment 20000117 PARAMETER Experiment Name: At_100uM_ABA_Mutants_cDNA_P Parameter: Treatment Value: 100uM ABA vs. No Treatment
  misc_feature: MA Experiment ID: 20000180 Result: Up-regulated in Transcription
  misc_feature: MA Experiment 20000180 PARAMETER Experiment Name: At_Germinating_Seeds_P Parameter: Age (hr) Value: 24 vs. 0
  misc_feature: MA Experiment 20000180 PARAMETER Experiment Name: At_Germinating_Seeds_P Parameter: Tissue Value: Germinating Seeds
  misc_feature: MA Experiment ID: 20000444 Result: Up-regulated in Transcription
  misc_feature: MA Experiment 20000444 PARAMETER Experiment Name: At_100uM_NAA__P Parameter: Age (day) Value: 14
  misc_feature: MA Experiment 20000444 PARAMETER Experiment Name: At_100uM_NAA__P Parameter: Organism Value: A. thaliana
  misc_feature: MA Experiment 20000444 PARAMETER Experiment Name: At_100uM_NAA__P Parameter: Plant Line Value: WS
  misc_feature: MA Experiment 20000444 PARAMETER Experiment Name: At_100uM_NAA__P Parameter: Timepoint (hr) Value: 1
  misc_feature: MA Experiment 20000444 PARAMETER Experiment Name: At_100uM_NAA__P Parameter: Tissue Value: Aerial
  misc_feature: MA Experiment 20000444 PARAMETER Experiment Name: At_100uM_NAA__P Parameter: Treatment Value: 100uM NAA vs. No Treatment
  misc_feature: MA Experiment ID: 20000445 Result: Up-regulated in Transcription
  misc_feature: MA Experiment 20000445 PARAMETER Experiment Name: At_100uM_NAA__P Parameter: Age (day) Value: 14
  misc_feature: MA Experiment 20000445 PARAMETER Experiment Name: At_100uM_NAA__P Parameter: Organism Value: A. thaliana
  misc_feature: MA Experiment 20000445 PARAMETER Experiment Name: At_100uM_NAA__P Parameter: Plant Line Value: WS
  misc_feature: MA Experiment 20000445 PARAMETER Experiment Name: At_100uM_NAA__P Parameter: Timepoint (hr) Value: 6
  misc_feature: MA Experiment 20000445 PARAMETER Experiment Name: At_100uM_NAA__P Parameter: Tissue Value: Aerial
  misc_feature: MA Experiment 20000445 PARAMETER Experiment Name: At_100uM_NAA__P Parameter: Treatment Value: 100uM NAA vs. No Treatment
  misc_feature: MA Experiment ID: 20000573 Result: Down-regulated in Transcription
  misc_feature: MA Experiment 20000573 PARAMETER Experiment Name: At_100uM_ABA_Mutants__P Parameter: Organism Value: A. thaliana
  misc_feature: MA Experiment 20000573 PARAMETER Experiment Name: At_100uM_ABA_Mutants__P Parameter: Plant Line Value: CS22 vs. Ler wt
  misc_feature: MA Experiment 20000573 PARAMETER Experiment Name: At_100uM_ABA_Mutants__P Parameter: Timepoint (hr) Value: N/A
  misc_feature: MA Experiment 20000573 PARAMETER Experiment Name: At_100uM_ABA_Mutants__P Parameter: Tissue Value: Whole Plant
  misc_feature: MA Experiment 20000573 PARAMETER Experiment Name: At_100uM_ABA_Mutants__P Parameter: Treatment Value: None
  misc_feature: MA Experiment ID: 20001247 Result: Up-regulated in Transcription
  misc_feature: MA Experiment 20001247 PARAMETER Experiment Name: At_Far-red-induction_P Parameter: Age (day) Value: 7
  misc_feature: MA Experiment 20001247 PARAMETER Experiment Name: At_Far-red-induction_P Parameter: Light Value: Far-red vs. White
  misc_feature: MA Experiment 20001247 PARAMETER Experiment Name: At_Far-red-induction_P Parameter: Organism Value: A. thaliana
  misc_feature: MA Experiment 20001247 PARAMETER Experiment Name: At_Far-red-induction_P Parameter: Plant Line Value: Columbia
  misc_feature: MA Experiment 20001247 PARAMETER Experiment Name: At_Far-red-induction_P Parameter: Timepoint (hr) Value: 1
  misc_feature: MA Experiment 20001247 PARAMETER Experiment Name: At_Far-red-induction_P Parameter: Tissue Value: Whole Plant
  misc_feature: MA Experiment ID: 20001248 Result: Up-regulated in Transcription
  misc_feature: MA Experiment 20001248 PARAMETER Experiment Name: At_Far-red-induction_P Parameter: Age (day) Value: 7
  misc_feature: MA Experiment 20001248 PARAMETER Experiment Name: At_Far-red-induction_P Parameter: Light Value: Far-red vs. White
  misc_feature: MA Experiment 20001248 PARAMETER Experiment Name: At_Far-red-induction_P Parameter: Organism Value: A. thaliana
  misc_feature: MA Experiment 20001248 PARAMETER Experiment Name: At_Far-red-induction_P Parameter: Plant Line Value: Columbia
  misc_feature: MA Experiment 20001248 PARAMETER Experiment Name: At_Far-red-induction_P Parameter: Timepoint (hr) Value: 4
  misc_feature: MA Experiment 20001248 PARAMETER Experiment Name: At_Far-red-induction_P Parameter: Tissue Value: Whole Plant
  misc_feature: MA Experiment ID: 20001757 Result: Up-regulated in Transcription
  misc_feature: MA Experiment 20001757 PARAMETER Experiment Name: At_50mM_NH4NO3_L-to-H_P Parameter: Timepoint (hr) Value: 6
  misc_feature: MA Experiment 20001757 PARAMETER Experiment Name: At_50mM_NH4NO3_L-to-H_P Parameter: Tissue Value: Leaf
  misc_feature: MA Experiment 20001757 PARAMETER Experiment Name: At_50mM_NH4NO3_L-to-H_P Parameter: Treatment Value: 50mM NH4NO3 vs 100mM Mannitol
  misc_feature: MA Experiment ID: 20001768 Result: Up-regulated in Transcription
  misc_feature: MA Experiment 20001768 PARAMETER Experiment Name: At_Far-red-enriched-adult_P Parameter: Age (day) Value: 28
  misc_feature: MA Experiment 20001768 PARAMETER Experiment Name: At_Far-red-enriched-adult_P Parameter: Light Value: Far-red enriched vs. White
  misc_feature: MA Experiment 20001768 PARAMETER Experiment Name: At_Far-red-enriched-adult_P Parameter: Organism Value: A. thaliana
  misc_feature: MA Experiment 20001768 PARAMETER Experiment Name: At_Far-red-enriched-adult_P Parameter: Plant Line Value: Columbia
  misc_feature: MA Experiment 20001768 PARAMETER Experiment Name: At_Far-red-enriched-adult_P Parameter: Timepoint (hr) Value: 1
  misc_feature: MA Experiment 20001768 PARAMETER Experiment Name: At_Far-red-enriched-adult_P Parameter: Tissue Value: Aerial
acacaagcattttcaaggatatcaaatcacaatcccaagaagagcaataacaagagaagaagaagtagttcaagaattaaggaagagagcttctccgttaaagtatagtgagagaatatggaagtcaccaatgggcttaaccttaaggacacagagcttcgtttgggattacccggagcacaagaagaacaacaactagaactttcttgcgtcagaagcaacaacaagcgcaagaacaacgactcaacagaagaatctgctcctcctcctgcaaaaacacaaatcgttggatggcctccagtgagatctaaccgtaagaacaacaacaacaaaaacgtgagttatgtgaaagtgagtatggacggagctccatatctccgtaagatagatctcaagatgtacaaaaactatccagagcttctcaaagcactagagaacatgttcaagttcacagtaggtgaatattccgagagagaaggctacaaaggatctggatttgtacctacttatgaagacaaagatggagattggatgttggtcggtgatgttccatgggacatgttctcttcatcttgtcaaaaactcagaatcatgaaaggatccgaagctcctactgccttatgatccattgtctcaaaacaccttttggtcgaggcaaaaacaaattctactttgtttagataaaaaaaagtttggtgtaaagaaagaaaaagcaatagggttacaaatacgttatatagatgtaaactagctttggttaattctgtaaaagatgagttttgattatacgaagtttatatgt

SEQ ID NO: 105516 - protein, 168 aa, Arabidopsis thaliana; identical to SEQ ID NO: 22588
  peptide (1)..(168): Ceres Seq. ID no. 13617392
  misc_feature (7)..(167): Pfam Name: AUX/IAA family Pfam Description: AUX/IAA family
  misc_feature (1)..(168): Homolog of NCBI NO: 15233496 NR Description: auxin-responsive protein IAA1 (Indoleacetic
  misc_feature (1)..(168): Homolog of NCBI NO: 454281 NR Description: auxin-responsive protein
  misc_feature (2)..(165): Homolog of NCBI NO: 15228939 NR Description: auxin-responsive protein IAA2 (Indoleacetic
  misc_feature (2)..(165): Homolog of NCBI NO: 2598932 NR Description: auxin-responsive protein IAA2 [Arabidopsis
  misc_feature (5)..(164): Homolog of NCBI NO: 34550779 NR Description: Gbiaa-Re [Gossypium barbadense]
  misc_feature (1)..(163): Homolog of NCBI NO: 15239950 NR Description: auxin-responsive protein IAA4 (Indoleacetic
  misc_feature (1)..(163): Homolog of NCBI NO: 99663 NR Description: auxin-induced protein AUX2-11 - Arabidopsis
  misc_feature (7)..(164): Homolog of NCBI NO: 4887012 NR Description: Nt-iaa2.3 deduced protein [Nicotiana tabacum]
  misc_feature (4)..(164): Homolog of NCBI NO: 20269063 NR Description: aux/IAA protein [Populus tremula x Populus
  misc_feature (10)..(160): Homolog of NCBI NO: 18071490 NR Description: auxin-induced AUX/IAA1 [Antirrhinum majus]

SEQ ID NO: 105517 - protein, 88 aa, Arabidopsis thaliana; identical to SEQ ID NO: 22589
  peptide (1)..(88): Ceres Seq. ID no. 13617393
  misc_feature (1)..(87): Pfam Name: AUX/IAA family Pfam Description: AUX/IAA family
  misc_feature (1)..(88): Homolog of NCBI NO: 15233496 NR Description: auxin-responsive protein IAA1 (Indoleacetic
  misc_feature (1)..(88): Homolog of NCBI NO: 454281 NR Description: auxin-responsive protein
  misc_feature (1)..(85): Homolog of NCBI NO: 15228939 NR Description: auxin-responsive protein IAA2 (Indoleacetic
  misc_feature (1)..(85): Homolog of NCBI NO: 2598932 NR Description: auxin-responsive protein IAA2 [Arabidopsis
  misc_feature (1)..(84): Homolog of NCBI NO: 34550779 NR Description: Gbiaa-Re [Gossypium barbadense]
  misc_feature (1)..(83): Homolog of NCBI NO: 15239950 NR Description: auxin-responsive protein IAA4 (Indoleacetic
  misc_feature (1)..(83): Homolog of NCBI NO: 99663 NR Description: auxin-induced protein AUX2-11 - Arabidopsis
  misc_feature (1)..(84): Homolog of NCBI NO: 4887012 NR Description: Nt-iaa2.3 deduced protein [Nicotiana tabacum]
  misc_feature (1)..(84): Homolog of NCBI NO: 20269063 NR Description: aux/IAA protein [Populus tremula x Populus
  misc_feature (1)..(80): Homolog of NCBI NO: 18071490 NR Description: auxin-induced AUX/IAA1 [Antirrhinum majus]

SEQ ID NO: 105518 - DNA, 944 bp, Arabidopsis thaliana
  misc_feature (1)..(944): Ceres Seq. ID no. 13617402
  misc_feature: MA Experiment ID: 108595 Result: Up-regulated in Transcription
  misc_feature: MA Experiment 108595 PARAMETER Experiment Name: At_Ler-pi_Ovule_cDNA_P Parameter: Plant Line Value: null
  misc_feature: MA Experiment ID: 20000179 Result: Up-regulated in Transcription
  misc_feature: MA Experiment 20000179 PARAMETER Experiment Name: At_Germinating_Seeds_P Parameter: Age (hr) Value: 6 vs. 0
  misc_feature: MA Experiment 20000179 PARAMETER Experiment Name: At_Germinating_Seeds_P Parameter: Tissue Value: Germinating Seeds
  misc_feature: MA Experiment ID: 20000180 Result: Up-regulated in Transcription
  misc_feature: MA Experiment 20000180 PARAMETER Experiment Name: At_Germinating_Seeds_P Parameter: Age (hr) Value: 24 vs. 0
  misc_feature: MA Experiment 20000180 PARAMETER Experiment Name: At_Germinating_Seeds_P Parameter: Tissue Value: Germinating Seeds
  misc_feature: MA Experiment ID: 20000227 Result: Up-regulated in Transcription
  misc_feature: MA Experiment 20000227 PARAMETER Experiment Name: At_Root-Tips-vs-Tops_P Parameter: Tissue Value: Root Tips vs. Root Tops
  misc_feature: MA Experiment ID: 20000234 Result: Up-regulated in Transcription
  misc_feature: MA Experiment 20000234 PARAMETER Experiment Name: At_Siliques_P Parameter: Age (day) Value: 21
  misc_feature: MA Experiment 20000234 PARAMETER Experiment Name: At_Siliques_P Parameter: Organism Value: A. thaliana
  misc_feature: MA Experiment 20000234 PARAMETER Experiment Name: At_Siliques_P Parameter: Plant Line Value: WS
  misc_feature: MA Experiment 20000234 PARAMETER Experiment Name: At_Siliques_P Parameter: Tissue Value: Less Than 5mm Siliques vs. Whole Plant
  misc_feature: MA Experiment ID: 20000496 Result: Up-regulated in Transcription
  misc_feature: MA Experiment 20000496 PARAMETER Experiment Name: At_Guard_Cells_P Parameter: Harvest Date Value: 7/19/2002
  misc_feature: MA Experiment 20000496 PARAMETER Experiment Name: At_Guard_Cells_P Parameter: Organism Value: Canola
  misc_feature: MA Experiment 20000496 PARAMETER Experiment Name: At_Guard_Cells_P Parameter: Tissue Value: Guard Cells vs. Leaves
  misc_feature: MA Experiment ID: 20000573 Result: Down-regulated in Transcription
  misc_feature: MA Experiment 20000573 PARAMETER Experiment Name: At_100uM_ABA_Mutants__P Parameter: Organism Value: A. thaliana
  misc_feature: MA Experiment 20000573 PARAMETER Experiment Name: At_100uM_ABA_Mutants__P Parameter: Plant Line Value: CS22 vs. Ler wt
  misc_feature: MA Experiment 20000573 PARAMETER Experiment Name: At_100uM_ABA_Mutants__P Parameter: Timepoint (hr) Value: N/A
  misc_feature: MA Experiment 20000573 PARAMETER Experiment Name: At_100uM_ABA_Mutants__P Parameter: Tissue Value: Whole Plant
  misc_feature: MA Experiment 20000573 PARAMETER Experiment Name: At_100uM_ABA_Mutants__P Parameter: Treatment Value: None
  misc_feature: MA Experiment ID: 20000574 Result: Down-regulated in Transcription
  misc_feature: MA Experiment 20000574 PARAMETER Experiment Name: At_100uM_ABA_Mutants__P Parameter: Organism Value: A. thaliana
  misc_feature: MA Experiment 20000574 PARAMETER Experiment Name: At_100uM_ABA_Mutants__P Parameter: Plant Line Value: CS23 vs. Ler wt
  misc_feature: MA Experiment 20000574 PARAMETER Experiment Name: At_100uM_ABA_Mutants__P Parameter: Timepoint (hr) Value: N/A
  misc_feature: MA Experiment 20000574 PARAMETER Experiment Name: At_100uM_ABA_Mutants__P Parameter: Tissue Value: Whole Plant
  misc_feature: MA Experiment 20000574 PARAMETER Experiment Name: At_100uM_ABA_Mutants__P Parameter: Treatment Value: None
  misc_feature: MA Experiment ID: 20001248 Result: Down-regulated in Transcription
  misc_feature: MA Experiment 20001248 PARAMETER Experiment Name: At_Far-red-induction_P Parameter: Age (day) Value: 7
  misc_feature: MA Experiment 20001248 PARAMETER Experiment Name: At_Far-red-induction_P Parameter: Light Value: Far-red vs. White
  misc_feature: MA Experiment 20001248 PARAMETER Experiment Name: At_Far-red-induction_P Parameter: Organism Value: A. thaliana
  misc_feature: MA Experiment 20001248 PARAMETER Experiment Name: At_Far-red-induction_P Parameter: Plant Line Value: Columbia
  misc_feature: MA Experiment 20001248 PARAMETER Experiment Name: At_Far-red-induction_P Parameter: Timepoint (hr) Value: 4
  misc_feature: MA Experiment 20001248 PARAMETER Experiment Name: At_Far-red-induction_P Parameter: Tissue Value: Whole Plant
  misc_feature: MA Experiment ID: 20001450 Result: Down-regulated in Transcription
  misc_feature: MA Experiment 20001450 PARAMETER Experiment Name: At_Far-red-induction_P Parameter: Age (day) Value: 7
  misc_feature: MA Experiment 20001450 PARAMETER Experiment Name: At_Far-red-induction_P Parameter: Light Value: Far-red vs. White
  misc_feature: MA Experiment 20001450 PARAMETER Experiment Name: At_Far-red-induction_P Parameter: Organism Value: A. thaliana
  misc_feature: MA Experiment 20001450 PARAMETER Experiment Name: At_Far-red-induction_P Parameter: Plant Line Value: Columbia
  misc_feature: MA Experiment 20001450 PARAMETER Experiment Name: At_Far-red-induction_P Parameter: Timepoint (hr) Value: 8
  misc_feature: MA Experiment 20001450 PARAMETER Experiment Name: At_Far-red-induction_P Parameter: Tissue Value: Whole Plant
  misc_feature: MA Experiment ID: 20001451 Result: Down-regulated in Transcription
  misc_feature: MA Experiment 20001451 PARAMETER Experiment Name: At_Far-red-induction_P Parameter: Age (day) Value: 7
  misc_feature: MA Experiment 20001451 PARAMETER Experiment Name: At_Far-red-induction_P Parameter: Light Value: Far-red vs. White
  misc_feature: MA Experiment 20001451 PARAMETER Experiment Name: At_Far-red-induction_P Parameter: Organism Value: A. thaliana
  misc_feature: MA Experiment 20001451 PARAMETER Experiment Name: At_Far-red-induction_P Parameter: Plant Line Value: Columbia
  misc_feature: MA Experiment 20001451 PARAMETER Experiment Name: At_Far-red-induction_P Parameter: Timepoint (hr) Value: 24
  misc_feature: MA Experiment 20001451 PARAMETER Experiment Name: At_Far-red-induction_P Parameter: Tissue Value: Whole Plant
tctccacattttccaaggcttcagtttcacttcatcacactctctgcaaaaaaacaaaaatgagctctcaaatctgcagatctgcttccaaagcagccaaatctcttctctcttcagctaaaaatgctcgcttcttctctgaaggacgagccattggtgctgcggcagcggtttcggcgtcaggaaaaattcctttgtatgcatctaactttgcaagatcatcaggttctggtgttgcttctaagagttggatcactggactcttagctcttcctgctgcagcttatatgattcaagatcaagaggttcttgctgctgagatggaacgaacttttattgctatcaagcctgatggtgtgcaaagaggactgatatcagagatcatttctcgattcgaacgcaagggattcaagctagttggtatcaaagtcattgttccttctaaagatttcgcacaaaagcattaccatgatcttaaggaaagacctttcttcaatggtttgtgtgacttccttagctctggtcctgttattgccatggtctgggaaggagatggtgtgatcagatacggacgtaaactgattggagccactgatcctcagaaatctgagcctggaacaatccgaggagatcttgcagttactgttggcaggaacataatccatggaagtgatggaccagagactgcaaaggatgagatcagtctgtggtttaagcctcaagaacttgtttcttacactagtaactctgagaagtggctctatggtgacaactaaatccctcttcctcttgtcttttgaaatcaaatcacattggtttttcttttcttttcttacccatacaataaaaacaagaaacagttgttacggatacaaacacattccgggttttgatttttccccggtgaactcagtaaacagagcataagcaataagtatgggatg

SEQ ID NO: 105519 - protein, 257 aa, Arabidopsis thaliana
  peptide (1)..(257): Ceres Seq. ID no. 13617403
  misc_feature (108)..(245): Pfam Name: Nucleoside diphosphate kinase Pfam Description: Nucleoside diphosphate kinase
  misc_feature (20)..(257): Homolog of NCBI NO: 15237018 NR Description: nucleoside diphosphate kinase 3 (ndpk3) thaliana] >gi|6225753|sp|O49203|NDK3_ARATH Nucleoside diphosphate III, mitochondrial precursor (NDK III) (NDP kinase III) (NDPK
  misc_feature (20)..(257): Homolog of NCBI NO: 19744167 NR Description: NDPK III [Brassica rapa]
  misc_feature (20)..(257): Homolog of NCBI NO: 18416233 NR Description: expressed protein [Arabidopsis thaliana]
  misc_feature (20)..(257): Homolog of NCBI NO: 21593387 NR Description: nucleoside diphosphate kinase 3 (ndpk3)
  misc_feature (20)..(257): Homolog of NCBI NO: 6435320 NR Description: nucleoside diphosphate kinase [Pisum sativum]
  misc_feature (62)..(257): Homolog of NCBI NO: 8272416 NR Description: nucleoside diphosphate kinase 3 [Brassica rapa]
  misc_feature (20)..(257): Homolog of NCBI NO: 19699051 NR Description: nucleoside diphosphate kinase III [Spinacia
  misc_feature (20)..(255): Homolog of NCBI NO: 20218817 NR Description: putative nucleoside diphosphate kinase [Pinus
  misc_feature (105)..(257): Homolog of NCBI NO: 6225754 NR Description: NUCLEOSIDE DIPHOSPHATE KINASE III (NDK III) (NDP
  misc_feature (103)..(254): Homolog of NCBI NO: 31199387 NR Description: ENSANGP00000011253 [Anopheles gambiae]
STFSKASVSLHHTLCKKTKMSSQICRSASKAAKSLLSSAKNARFFSEGRAIGAAAAVSASGKIPLYASNFARSSGSGVASKSWITGLLALPAAAYMIQDQEVLAAEMERTFIAIKPDGVQRGLISEIISRFERKGFKLVGIKVIVPSKDFAQKHYHDLKERPFFNGLCDFLSSGPVIAMVWEGDGVIRYGRKLIGATDPQKSEPGTIRGDLAVTVGRNIIHGSDGPETAKDEISLWFKPQELVSYTSNSEKWLYGDN

SEQ ID NO: 105520 - protein, 238 aa, Arabidopsis thaliana; identical to SEQ ID NO: 23294
  peptide (1)..(238): Ceres Seq. ID no. 13617404
  misc_feature (89)..(226): Pfam Name: Nucleoside diphosphate kinase Pfam Description: Nucleoside diphosphate kinase
  misc_feature (1)..(238): Homolog of NCBI NO: 15237018 NR Description: nucleoside diphosphate kinase 3 (ndpk3) thaliana] >gi|6225753|sp|O49203|NDK3_ARATH Nucleoside diphosphate III, mitochondrial precursor (NDK III) (NDP kinase III) (NDPK
  misc_feature (1)..(238): Homolog of NCBI NO: 19744167 NR Description: NDPK III [Brassica rapa]
  misc_feature (1)..(238): Homolog of NCBI NO: 18416233 NR Description: expressed protein [Arabidopsis thaliana]
  misc_feature (1)..(238): Homolog of NCBI NO: 21593387 NR Description: nucleoside diphosphate kinase 3 (ndpk3)
  misc_feature (1)..(238): Homolog of NCBI NO: 6435320 NR Description: nucleoside diphosphate kinase [Pisum sativum]
  misc_feature (43)..(238): Homolog of NCBI NO: 8272416 NR Description: nucleoside diphosphate kinase 3 [Brassica rapa]
  misc_feature (1)..(238): Homolog of NCBI NO: 19699051 NR Description: nucleoside diphosphate kinase III [Spinacia
  misc_feature (1)..(236): Homolog of NCBI NO: 20218817 NR Description: putative nucleoside diphosphate kinase [Pinus
  misc_feature (86)..(238): Homolog of NCBI NO: 6225754 NR Description: NUCLEOSIDE DIPHOSPHATE KINASE III (NDK III) (NDP
  misc_feature (84)..(235): Homolog of NCBI NO: 31199387 NR Description: ENSANGP00000011253 [Anopheles gambiae]

SEQ ID NO: 105521 - protein, 162 aa, Arabidopsis thaliana; identical to SEQ ID NO: 23295
  peptide (1)..(162): Ceres Seq. ID no. 13617405
  misc_feature (13)..(150): Pfam Name: Nucleoside diphosphate kinase Pfam Description: Nucleoside diphosphate kinase
  misc_feature (1)..(162): Homolog of NCBI NO: 15237018 NR Description: nucleoside diphosphate kinase 3 (ndpk3) thaliana] >gi|6225753|sp|O49203|NDK3_ARATH Nucleoside diphosphate III, mitochondrial precursor (NDK III) (NDP kinase III) (NDPK
  misc_feature (1)..(162): Homolog of NCBI NO: 19744167 NR Description: NDPK III [Brassica rapa]
  misc_feature (1)..(162): Homolog of NCBI NO: 18416233 NR Description: expressed protein [Arabidopsis thaliana]
  misc_feature (1)..(162): Homolog of NCBI NO: 21593387 NR Description: nucleoside diphosphate kinase 3 (ndpk3)
  misc_feature (1)..(162): Homolog of NCBI NO: 6435320 NR Description: nucleoside diphosphate kinase [Pisum sativum]
  misc_feature (1)..(162): Homolog of NCBI NO: 8272416 NR Description: nucleoside diphosphate kinase 3 [Brassica rapa]
  misc_feature (1)..(162): Homolog of NCBI NO: 19699051 NR Description: nucleoside diphosphate kinase III [Spinacia
  misc_feature (1)..(160): Homolog of NCBI NO: 20218817 NR Description: putative nucleoside diphosphate kinase [Pinus
  misc_feature (10)..(162): Homolog of NCBI NO: 6225754 NR Description: NUCLEOSIDE DIPHOSPHATE KINASE III (NDK III) (NDP
  misc_feature (8)..(159): Homolog of NCBI NO: 31199387 NR Description: ENSANGP00000011253 [Anopheles gambiae]

SEQ ID NO: 105522 - DNA, 1444 bp, Arabidopsis thaliana
  misc_feature (1)..(1444): Ceres Seq. ID no. 13617406
  misc_feature: MA Experiment ID: 20000182 Result: Up-regulated in Transcription
  misc_feature: MA Experiment 20000182 PARAMETER Experiment Name: At_2mM_SA_P Parameter: Age (day) Value: 14
  misc_feature: MA Experiment 20000182 PARAMETER Experiment Name: At_2mM_SA_P Parameter: Organism Value: A. thaliana
  misc_feature: MA Experiment 20000182 PARAMETER Experiment Name: At_2mM_SA_P Parameter: Plant Line Value: WS
  misc_feature: MA Experiment 20000182 PARAMETER Experiment Name: At_2mM_SA_P Parameter: Timepoint (hr) Value: 6
  misc_feature: MA Experiment 20000182 PARAMETER Experiment Name: At_2mM_SA_P Parameter: Tissue Value: Aerial
  misc_feature: MA Experiment 20000182 PARAMETER Experiment Name: At_2mM_SA_P Parameter: Treatment Value: 2mM SA vs. No Treatment
  misc_feature: MA Experiment ID: 20000184 Result: Down-regulated in Transcription
  misc_feature: MA Experiment 20000184 PARAMETER Experiment Name: At_Shoots__P Parameter: Age (day) Value: 7
  misc_feature: MA Experiment 20000184 PARAMETER Experiment Name: At_Shoots__P Parameter: Tissue Value: Shoots vs. Whole Plant
  misc_feature: MA Experiment ID: 20001451 Result: Up-regulated in Transcription
  misc_feature: MA Experiment 20001451 PARAMETER Experiment Name: At_Far-red-induction_P Parameter: Age (day) Value: 7
  misc_feature: MA Experiment 20001451 PARAMETER Experiment Name: At_Far-red-induction_P Parameter: Light Value: Far-red vs. White
  misc_feature: MA Experiment 20001451 PARAMETER Experiment Name: At_Far-red-induction_P Parameter: Organism Value: A. thaliana
  misc_feature: MA Experiment 20001451 PARAMETER Experiment Name: At_Far-red-induction_P Parameter: Plant Line Value: Columbia
  misc_feature: MA Experiment 20001451 PARAMETER Experiment Name: At_Far-red-induction_P Parameter: Timepoint (hr) Value: 24
  misc_feature: MA Experiment 20001451 PARAMETER Experiment Name: At_Far-red-induction_P Parameter: Tissue Value: Whole Plant
cttaaaagaaaaaaaaaatcccaaacacagcaaaaaaaaaaaaagcctagaggaatagaatcggtctctttctctataatctctctctctctctgacttgtttgtgttctctcaaatcctctgataagaatcaatggccaaggaattagcagagaaagctaaagaagcttttctagatgatgacttcgatgttgctgttgacttatactccaaagccattgacttggatcccaattgcgccgccttcttcgccgatcgtgctcaggccaacatcaaaatcgataacttcactgaagctgttgtagatgcgaacaaagccattgagttggagccaacgttggcaaaagcctatctcagaaagggcactgcttgtatgaagctagaagaatatagtactgctaaagcagccctggaaaagggagcttctgttgcaccgaatgaaccaaagtttaagaagatgatagatgaatgcgatcttcgtattgcagaagaagagaaagatttggttcagccgatgccaccgagtttgccttcaagctctacaacaccactagcaacggaagctgatgctcctcctgttccaattcctgcagcacctgccaaaccgatgttcaggcacgagttctaccagaaaccagaagaagcggtggtgacaattttcgccaaaaaagtacctaaggagaacgtaactgtcgagtttggtgagcagattctgagtgttgtcattgatgttgctggagaggaagcttatcatctccagccgagattgttcgggaagataataccagagaagtgcagatttgaagtattgtcgaccaaagttgagatccgtcttgcgaaagcagagataatcacctgggcctcccttgaatatggtaaagggcaaagtgttttgcccaaacccaatgtctcatcagcgctgtcgcagagaccagtgtacccatcttctaagccagcaaaagactgggacaagttggaagctgaagtgaagaaacaggagaaggatgagaagcttgatggagatgcagctatgaacaaatttttcagcgacatatactcgagtgcagatgaagacatgaggcgggcaatgaacaaatcatttgcagagtcgaatgggacggtactgtcgacaaactggaaagaagttgggactaagaaagtggagagcactccaccagatggcatggagctcaagaagtgggagtattgatcttcttaaaatccccttttctggtttttgttaaaaaaaagtctgacaaatcttttgaacttttaaggtgtttttcttttttggtttctgctcgaatttgtctctctccattcttgcgttgtggtctcaaagaacgttctgatactttgattttgtattagaaaactaaaactcgcaagtctgttgttttggaactttgttcttttatcgagaggcttatctaaatatttcttg

SEQ ID NO: 105523 - protein, 358 aa, Arabidopsis thaliana; identical to SEQ ID NO: 25341
  peptide (1)..(358): Ceres Seq. ID no. 13617407
  misc_feature (158)..(245): Pfam Name: CS domain Pfam Description: CS domain
  misc_feature (1)..(358): Homolog of NCBI NO: 15237122 NR Description: phosphatase - related [Arabidopsis thaliana]
  misc_feature (1)..(358): Homolog of NCBI NO: 40974915 NR Description: SGT1-like protein [Brassica oleracea]
  misc_feature (1)..(358): Homolog of NCBI NO: 40974917 NR Description: SGT1-like protein [Brassica oleracea]
  misc_feature (1)..(357): Homolog of NCBI NO: 17017308 NR Description: SGT1a [Arabidopsis thaliana]
  misc_feature (1)..(357): Homolog of NCBI NO: 15236528 NR Description: phosphatase - related [Arabidopsis thaliana]
  misc_feature (1)..(357): Homolog of NCBI NO: 29468339 NR Description: SGT1 [Nicotiana benthamiana]
  misc_feature (2)..(358): Homolog of NCBI NO: 17017306 NR Description: SGT1 [Hordeum vulgare]
  misc_feature (2)..(358): Homolog of NCBI NO: 34912836 NR Description: Sgt1 [Oryza sativa (japonica cultivar-group)]
  misc_feature (2)..(358): Homolog of NCBI NO: 6581058 NR Description: Sgt1 [Oryza sativa]
  misc_feature (78)..(357): Homolog of NCBI NO: 30524966 NR Description: SGT1-like protein [Arabidopsis thaliana]

SEQ ID NO: 105524 - protein, 278 aa, Arabidopsis thaliana; identical to SEQ ID NO: 25342
  peptide (1)..(278): Ceres Seq. ID no. 13617408
  misc_feature (78)..(165): Pfam Name: CS domain Pfam Description: CS domain
  misc_feature (1)..(278): Homolog of NCBI NO: 15237122 NR Description: phosphatase - related [Arabidopsis thaliana]
  misc_feature (1)..(278): Homolog of NCBI NO: 40974915 NR Description: SGT1-like protein [Brassica oleracea]
  misc_feature (1)..(278): Homolog of NCBI NO: 40974917 NR Description: SGT1-like protein [Brassica oleracea]
  misc_feature (1)..(277): Homolog of NCBI NO: 17017308 NR Description: SGT1a [Arabidopsis thaliana]
  misc_feature (1)..(277): Homolog of NCBI NO: 15236528 NR Description: phosphatase - related [Arabidopsis thaliana]
  misc_feature (1)..(277): Homolog of NCBI NO: 29468339 NR Description: SGT1 [Nicotiana benthamiana]
  misc_feature (1)..(278): Homolog of NCBI NO: 17017306 NR Description: SGT1 [Hordeum vulgare]
  misc_feature (1)..(278): Homolog of NCBI NO: 34912836 NR Description: Sgt1 [Oryza sativa (japonica cultivar-group)]
  misc_feature (1)..(278): Homolog of NCBI NO: 6581058 NR Description: Sgt1 [Oryza sativa]
  misc_feature (1)..(277): Homolog of NCBI NO: 30524966 NR Description: SGT1-like protein [Arabidopsis thaliana]

SEQ ID NO: 105525 - protein, 250 aa, Arabidopsis thaliana; identical to SEQ ID NO: 25343
  peptide (1)..(250): Ceres Seq. ID no. 13617409
  misc_feature (50)..(137): Pfam Name: CS domain Pfam Description: CS domain
  misc_feature (1)..(250): Homolog of NCBI NO: 15237122 NR Description: phosphatase - related [Arabidopsis thaliana]
  misc_feature (1)..(250): Homolog of NCBI NO: 40974915 NR Description: SGT1-like protein [Brassica oleracea]
  misc_feature (1)..(250): Homolog of NCBI NO: 40974917 NR Description: SGT1-like protein [Brassica oleracea]
  misc_feature (1)..(249): Homolog of NCBI NO: 17017308 NR Description: SGT1a [Arabidopsis thaliana]
  misc_feature (1)..(249): Homolog of NCBI NO: 15236528 NR Description: phosphatase - related [Arabidopsis thaliana]
  misc_feature (1)..(249): Homolog of NCBI NO: 29468339 NR Description: SGT1 [Nicotiana benthamiana]
  misc_feature (1)..(250): Homolog of NCBI NO: 17017306 NR Description: SGT1 [Hordeum vulgare]
  misc_feature (1)..(250): Homolog of NCBI NO: 34912836 NR Description: Sgt1 [Oryza sativa (japonica cultivar-group)]
  misc_feature (1)..(250): Homolog of NCBI NO: 6581058 NR Description: Sgt1 [Oryza sativa]
  misc_feature (1)..(249): Homolog of NCBI NO: 30524966 NR Description: SGT1-like protein [Arabidopsis thaliana]

SEQ ID NO: 105526 - DNA, 1189 bp, Arabidopsis thaliana
  misc_feature (1)..(1189): Ceres Seq. ID no. 13617410
  misc_feature: MA Experiment ID: 20000169 Result: Down-regulated in Transcription
  misc_feature: MA Experiment 20000169 PARAMETER Experiment Name: At_100uM_ABA_P Parameter: Age (day) Value: 14
  misc_feature: MA Experiment 20000169 PARAMETER Experiment Name: At_100uM_ABA_P Parameter: Organism Value: A. thaliana
  misc_feature: MA Experiment 20000169 PARAMETER Experiment Name: At_100uM_ABA_P Parameter: Plant Line Value: WS
  misc_feature: MA Experiment 20000169 PARAMETER Experiment Name: At_100uM_ABA_P Parameter: Timepoint (hr) Value: 6
  misc_feature: MA Experiment 20000169 PARAMETER Experiment Name: At_100uM_ABA_P Parameter: Tissue Value: Aerial
  misc_feature: MA Experiment 20000169 PARAMETER Experiment Name: At_100uM_ABA_P Parameter: Treatment Value: 100uM ABA vs. No Treatment
  misc_feature: MA Experiment ID: 20000173 Result: Down-regulated in Transcription
  misc_feature: MA Experiment 20000173 PARAMETER Experiment Name: At_42deg_Heat_P Parameter: Age (day) Value: 14
  misc_feature: MA Experiment 20000173 PARAMETER Experiment Name: At_42deg_Heat_P Parameter: Organism Value: A. thaliana
  misc_feature: MA Experiment 20000173 PARAMETER Experiment Name: At_42deg_Heat_P Parameter: Plant Line Value: WS
  misc_feature: MA Experiment 20000173 PARAMETER Experiment Name: At_42deg_Heat_P Parameter: Temperature (deg C) Value: 42 vs. 22
  misc_feature: MA Experiment 20000173 PARAMETER Experiment Name: At_42deg_Heat_P Parameter: Timepoint (hr) Value: 6
  misc_feature: MA Experiment 20000173 PARAMETER Experiment Name: At_42deg_Heat_P Parameter: Tissue Value: Aerial
  misc_feature: MA Experiment ID: 20000180 Result: Up-regulated in Transcription
  misc_feature: MA Experiment 20000180 PARAMETER Experiment Name: At_Germinating_Seeds_P Parameter: Age (hr) Value: 24 vs. 0
  misc_feature: MA Experiment 20000180 PARAMETER Experiment Name: At_Germinating_Seeds_P Parameter: Tissue Value: Germinating Seeds
  misc_feature: MA Experiment ID: 20000185 Result: Up-regulated in Transcription
  misc_feature: MA Experiment 20000185 PARAMETER Experiment Name: At_Roots__P Parameter: Age (day) Value: 7 vs. 21
  misc_feature: MA Experiment 20000185 PARAMETER Experiment Name: At_Roots__P Parameter: Organism Value: A. thaliana
  misc_feature: MA Experiment 20000185 PARAMETER Experiment Name: At_Roots__P Parameter: Tissue Value: Roots vs. Whole Plant
  misc_feature: MA Experiment ID: 20000437 Result: Down-regulated in Transcription
  misc_feature: MA Experiment 20000437 PARAMETER Experiment Name: At_Drought_P Parameter: Age (day) Value: 8
  misc_feature: MA Experiment 20000437 PARAMETER Experiment Name: At_Drought_P Parameter: Organism Value: A. thaliana
  misc_feature: MA Experiment 20000437 PARAMETER Experiment Name: At_Drought_P Parameter: Plant Line Value: WS
  misc_feature: MA Experiment 20000437 PARAMETER Experiment Name: At_Drought_P Parameter: Timepoint (hr) Value: 24
  misc_feature: MA Experiment 20000437 PARAMETER Experiment Name: At_Drought_P Parameter: Tissue Value: Whole Plant
  misc_feature: MA Experiment 20000437 PARAMETER Experiment Name: At_Drought_P Parameter: Treatment Value: Drought vs. No Drought
  misc_feature: MA Experiment ID: 20000439 Result: Up-regulated in Transcription
  misc_feature: MA Experiment 20000439 PARAMETER Experiment Name: At_Roots__P Parameter: Age (day) Value: 14 vs. 21
  misc_feature: MA Experiment 20000439 PARAMETER Experiment Name: At_Roots__P Parameter: Organism Value: A. thaliana
  misc_feature: MA Experiment 20000439 PARAMETER Experiment Name: At_Roots__P Parameter: Tissue Value: Roots vs. Whole Plant
  misc_feature: MA Experiment ID: 20000453 Result: Down-regulated in Transcription
  misc_feature: MA Experiment 20000453 PARAMETER Experiment Name: At_100uM_ABA_P Parameter: Age (day) Value: 15
  misc_feature: MA Experiment 20000453 PARAMETER Experiment Name: At_100uM_ABA_P Parameter: Organism Value: A. thaliana
  misc_feature: MA Experiment 20000453 PARAMETER Experiment Name: At_100uM_ABA_P Parameter: Plant Line Value: WS
  misc_feature: MA Experiment 20000453 PARAMETER Experiment Name: At_100uM_ABA_P Parameter: Timepoint (hr) Value: 24
  misc_feature: MA Experiment 20000453 PARAMETER Experiment Name: At_100uM_ABA_P Parameter: Tissue Value: Aerial
  misc_feature: MA Experiment 20000453 PARAMETER Experiment Name: At_100uM_ABA_P Parameter: Treatment Value: 100uM ABA vs. No Treatment
  misc_feature: MA Experiment ID: 20000455 Result: Down-regulated in Transcription
  misc_feature: MA Experiment 20000455 PARAMETER Experiment Name: At_100uM_ABA_P Parameter: Age (day) Value: 16
  misc_feature: MA Experiment 20000455 PARAMETER Experiment Name: At_100uM_ABA_P Parameter: Organism Value: A. thaliana
  misc_feature: MA Experiment 20000455 PARAMETER Experiment Name: At_100uM_ABA_P Parameter: Plant Line Value: WS
  misc_feature: MA Experiment 20000455 PARAMETER Experiment Name: At_100uM_ABA_P Parameter: Timepoint (hr) Value: 48
  misc_feature: MA Experiment 20000455 PARAMETER Experiment Name: At_100uM_ABA_P Parameter: Tissue Value: Aerial
  misc_feature: MA Experiment 20000455 PARAMETER Experiment Name: At_100uM_ABA_P Parameter: Treatment Value: 100uM ABA vs. No Treatment
  misc_feature: MA Experiment ID: 20000576 Result: Down-regulated in Transcription
  misc_feature: MA Experiment 20000576 PARAMETER Experiment Name: At_100uM_ABA_Mutants__P Parameter: Organism Value: A. thaliana
  misc_feature: MA Experiment 20000576 PARAMETER Experiment Name: At_100uM_ABA_Mutants__P Parameter: Plant Line Value: CS23
  misc_feature: MA Experiment 20000576 PARAMETER Experiment Name: At_100uM_ABA_Mutants__P Parameter: Timepoint (hr) Value: 6
  misc_feature: MA Experiment 20000576 PARAMETER Experiment Name: At_100uM_ABA_Mutants__P Parameter: Tissue Value: Whole Plant
  misc_feature: MA Experiment 20000576 PARAMETER Experiment Name: At_100uM_ABA_Mutants__P Parameter: Treatment Value: 1uM ABA vs. No Treatment
  misc_feature: MA Experiment ID: 20000794 Result: Down-regulated in Transcription
  misc_feature: MA Experiment 20000794 PARAMETER Experiment Name: At_Petals_P Parameter: Age (day) Value: 23-25 days
  misc_feature: MA Experiment 20000794 PARAMETER Experiment Name: At_Petals_P Parameter: Plant Line Value: WS
  misc_feature: MA Experiment 20000794 PARAMETER Experiment Name: At_Petals_P Parameter: Tissue Value: Petals vs. Whole plant
  misc_feature: MA Experiment ID: 20001450 Result: Down-regulated in Transcription
  misc_feature: MA Experiment 20001450 PARAMETER Experiment Name: At_Far-red-induction_P Parameter: Age (day) Value: 7
  misc_feature: MA Experiment 20001450 PARAMETER Experiment Name: At_Far-red-induction_P Parameter: Light Value: Far-red vs. White
  misc_feature: MA Experiment 20001450 PARAMETER Experiment Name: At_Far-red-induction_P Parameter: Organism Value: A. thaliana
  misc_feature: MA Experiment 20001450 PARAMETER Experiment Name: At_Far-red-induction_P Parameter: Plant Line Value: Columbia
  misc_feature: MA Experiment 20001450 PARAMETER Experiment Name: At_Far-red-induction_P Parameter: Timepoint (hr) Value: 8
  misc_feature: MA Experiment 20001450 PARAMETER Experiment Name: At_Far-red-induction_P Parameter: Tissue Value: Whole Plant
  misc_feature: MA Experiment ID: 20001554 Result: Down-regulated in Transcription
  misc_feature: MA Experiment 20001554 PARAMETER Experiment Name: At_Drought_Soil_Dry_P Parameter: Age (day) Value: 21
  misc_feature: MA Experiment 20001554 PARAMETER Experiment Name: At_Drought_Soil_Dry_P Parameter: Organism Value: A. thaliana
  misc_feature: MA Experiment 20001554 PARAMETER Experiment Name: At_Drought_Soil_Dry_P Parameter: Plant Line Value: WS
  misc_feature: MA Experiment 20001554 PARAMETER Experiment Name: At_Drought_Soil_Dry_P Parameter: Post Timepoint (hr) Value: None
  misc_feature: MA Experiment 20001554 PARAMETER Experiment Name: At_Drought_Soil_Dry_P Parameter: Post-Treatment Value: None
  misc_feature: MA Experiment 20001554 PARAMETER Experiment Name: At_Drought_Soil_Dry_P Parameter: Timepoint (day) Value: 7
  misc_feature: MA Experiment 20001554 PARAMETER Experiment Name: At_Drought_Soil_Dry_P Parameter: Treatment Value: Drought vs. No Drought
  misc_feature: MA Experiment ID: 20001555 Result: Down-regulated in Transcription
  misc_feature: MA Experiment 20001555 PARAMETER Experiment Name: At_Drought_Soil_Dry_P Parameter: Age (day) Value: 24
  misc_feature: MA Experiment 20001555 PARAMETER Experiment Name: At_Drought_Soil_Dry_P Parameter: Organism Value: A. thaliana
  misc_feature: MA Experiment 20001555 PARAMETER Experiment Name: At_Drought_Soil_Dry_P Parameter: Plant Line Value: WS
  misc_feature: MA Experiment 20001555 PARAMETER Experiment Name: At_Drought_Soil_Dry_P Parameter: Post Timepoint (hr) Value: None
  misc_feature: MA Experiment 20001555 PARAMETER Experiment Name: At_Drought_Soil_Dry_P Parameter: Post-Treatment Value: None
  misc_feature: MA Experiment 20001555 PARAMETER Experiment Name: At_Drought_Soil_Dry_P Parameter: Timepoint (day) Value: 10
  misc_feature: MA Experiment 20001555 PARAMETER Experiment Name: At_Drought_Soil_Dry_P Parameter: Treatment Value: Drought vs. No Drought
  misc_feature: MA Experiment ID: 20001556 Result: Down-regulated in Transcription
  misc_feature: MA Experiment 20001556 PARAMETER Experiment Name: At_Drought_Soil_Dry_P Parameter: Age (day) Value: 26
  misc_feature: MA Experiment 20001556 PARAMETER Experiment Name: At_Drought_Soil_Dry_P Parameter: Organism Value: A. thaliana
  misc_feature: MA Experiment 20001556 PARAMETER Experiment Name: At_Drought_Soil_Dry_P Parameter: Plant Line Value: WS
  misc_feature: MA Experiment 20001556 PARAMETER Experiment Name: At_Drought_Soil_Dry_P Parameter: Post Timepoint (hr) Value: None
  misc_feature: MA Experiment 20001556 PARAMETER Experiment Name: At_Drought_Soil_Dry_P Parameter: Post-Treatment Value: None
  misc_feature: MA Experiment 20001556 PARAMETER Experiment Name: At_Drought_Soil_Dry_P Parameter: Timepoint (day) Value: 12
  misc_feature: MA Experiment 20001556 PARAMETER Experiment Name: At_Drought_Soil_Dry_P Parameter: Treatment Value: Drought vs. No Drought
  misc_feature: MA Experiment ID: 20001757 Result: Up-regulated in Transcription
  misc_feature: MA Experiment 20001757 PARAMETER Experiment Name: At_50mM_NH4NO3_L-to-H_P Parameter: Timepoint (hr) Value: 6
  misc_feature: MA Experiment 20001757 PARAMETER Experiment Name: At_50mM_NH4NO3_L-to-H_P Parameter: Tissue Value: Leaf
  misc_feature: MA Experiment 20001757 PARAMETER Experiment Name: At_50mM_NH4NO3_L-to-H_P Parameter: Treatment Value: 50mM NH4NO3 vs 100mM Mannitol
  misc_feature: MA Experiment ID: 20001904 Result: Down-regulated in Transcription
  misc_feature: MA Experiment 20001904 PARAMETER Experiment Name: At_Drought_Reproduction_P Parameter: Age (day) Value: 37
  misc_feature: MA Experiment 20001904 PARAMETER Experiment Name: At_Drought_Reproduction_P Parameter: Organism Value: A. thaliana
  misc_feature: MA Experiment 20001904 PARAMETER Experiment Name: At_Drought_Reproduction_P Parameter: Plant Line Value: WS
  misc_feature: MA Experiment 20001904 PARAMETER Experiment Name: At_Drought_Reproduction_P Parameter: Timepoint (day) Value: 7
  misc_feature: MA Experiment 20001904 PARAMETER Experiment Name: At_Drought_Reproduction_P Parameter: Tissue Value: Rosettes
  misc_feature: MA Experiment 20001904 PARAMETER Experiment Name: At_Drought_Reproduction_P Parameter: Treatment Value: Drought vs. No Drought
  misc_feature: MA Experiment ID: 20001911 Result: Down-regulated in Transcription
  misc_feature: MA Experiment 20001911 PARAMETER Experiment Name: At_Drought_Reproduction_P Parameter: Age (day) Value: 40
  misc_feature: MA Experiment 20001911 PARAMETER Experiment Name: At_Drought_Reproduction_P Parameter: Organism Value: A. thaliana
  misc_feature: MA Experiment 20001911 PARAMETER Experiment Name: At_Drought_Reproduction_P Parameter: Plant Line Value: WS
  misc_feature: MA Experiment 20001911 PARAMETER Experiment Name: At_Drought_Reproduction_P Parameter: Timepoint (day) Value: 10
  misc_feature: MA Experiment 20001911 PARAMETER Experiment Name: At_Drought_Reproduction_P Parameter: Tissue Value: Flowers
  misc_feature: MA Experiment 20001911 PARAMETER Experiment Name: At_Drought_Reproduction_P Parameter: Treatment Value: Drought vs. No Drought
aaaccaaattttctaagtgtctcataaaaaatgacgagattcggattagctcttttgatgattcttgtgattcaagggcttgtgaccttttcagaagcacaattgaagatgggattctacgaccaaacgtgcccttacgcagagaagatcgtacaagatgttgtcaaccaacatataaacaatgcaccctctttggctgctggcctaattaggatgcattttcatgactgcttcgttcggggttgtgatggttccatcttgatcaacgcgacatcgagcaaccaacaagtggagaagcttgctcctccgaatctaactgtgagaggtttcgattttatcgataaagtaaagtctgctctagaatcaaagtgccctggaatcgtctcttgcgctgatatcatcacacttgctactagagactctattgttgctattggtggaccgacatggaacgttccaacggggcgcagagacggacgtatctctaactttgccgaggctatgaacaatattcctcctcctttcggaaacttcacgactctgataaccctctttggaaaccaaggacttgatgttaaagacctcgtcttgttatccggtgcccacacgattggagtgtctcattgctcctccttctcaaaccgtctcttcaatttcaccggcgttggagaccaagatccatcgctcgacagcgaatatgccgacaatctcaaatcacggagatgtttatctatcgctgacaataccacaaaagtcgaaatggatcccggtagtcgaaacaccttcgatcttagctactaccgtcttgtcctaaaacgtcgtggactttttgagtctgacgctgcattgactatgaatcctgcggcattggctcaggtcaaacgcttcgccggaggatcggagcaagagttctttgctgagttctccaactccatggagaaaatgggaaggattggggtcaaaacagggtcggatggggagattcgaagaacatgtgcatttgttaactaaaagtgtttcttactttttctttcgcaacttttttgttttgttttaaatatcttttatattggtttttatgttccttttgtcaacttttttgggtgtttggaagaatttcgagatatgtattattgtatgtggtgaatatgtgattttcaaataaatttcacgtctgtgaaaatcgttg

SEQ ID NO: 105527 - protein, 326 aa, Arabidopsis thaliana
  peptide (1)..(326): Ceres Seq. ID no. 13617411
  misc_feature (1)..(326): Homolog of NCBI NO: 15237128 NR Description: peroxidase, putative [Arabidopsis thaliana]
  misc_feature (1)..(326): Homolog of NCBI NO: 1546692 NR Description: peroxidase; peroxidase ATP19a [Arabidopsis
  misc_feature (6)..(326): Homolog of NCBI NO: 15220463 NR Description: peroxidase, putative [Arabidopsis thaliana] Peroxidase 3 precursor (Atperox P3) (Rare cold inducible protein)
  misc_feature (6)..(326): Homolog of NCBI NO: 21536908 NR Description: putative peroxidase [Arabidopsis thaliana]
MTRFGLALLMILVIQGLVTFSEAQLKMGFYDQTCPYAEKIVQDVVNQHINNAPSLAAGLIRMHFHDCFVRGCDGSILINATSSNQQVEKLAPPNLTVRGFDFIDKVKSALESKCPGIVSCADIITLATRDSIVAIGGPTWNVPTGRRDGRISNFAEAMNNIPPPFGNFTTLITLFGNQGLDVKDLVLLSGAHTIGVSHCSSFSNRLFNFTGVGDQDPSLDSEYADNLKSRRCLSIADNTTKVEMDPGSRNTFDLSYYRLVLKRRGLFESDAALTMNPAALAQVKRFAGGSEQEFFAEFSNSMEKMGRIGVKTGSDGEIRRTCAFVN

SEQ ID NO: 105528 - protein, 317 aa, Arabidopsis thaliana
  peptide (1)..(317): Ceres Seq. ID no. 13617412
  misc_feature (1)..(317): Homolog of NCBI NO: 15237128 NR Description: peroxidase, putative [Arabidopsis thaliana]
  misc_feature (1)..(317): Homolog of NCBI NO: 1546692 NR Description: peroxidase; peroxidase ATP19a [Arabidopsis
  misc_feature (1)..(317): Homolog of NCBI NO: 15220463 NR Description: peroxidase, putative [Arabidopsis thaliana] Peroxidase 3 precursor (Atperox P3) (Rare cold inducible protein)
  misc_feature (1)..(317): Homolog of NCBI NO: 21536908 NR Description: putative peroxidase [Arabidopsis thaliana]
MILVIQGLVTFSEAQLKMGFYDQTCPYAEKIVQDVVNQHINNAPSLAAGLIRMHFHDCFVRGCDGSILINATSSNQQVEKLAPPNLTVRGFDFIDKVKSALESKCPGIVSCADIITLATRDSIVAIGGPTWNVPTGRRDGRISNFAEAMNNIPPPFGNFTTLITLFGNQGLDVKDLVLLSGAHTIGVSHCSSFSNRLFNFTGVGDQDPSLDSEYADNLKSRRCLSIADNTTKVEMDPGSRNTFDLSYYRLVLKRRGLFESDAALTMNPAALAQVKRFAGGSEQEFFAEFSNSMEKMGRIGVKTGSDGEIRRTCAFVN

SEQ ID NO: 105529 - protein, 300 aa, Arabidopsis thaliana
  peptide (1)..(300): Ceres Seq. ID no. 13617413
  misc_feature (1)..(300): Homolog of NCBI NO: 15237128 NR Description: peroxidase, putative [Arabidopsis thaliana]
  misc_feature (1)..(300): Homolog of NCBI NO: 1546692 NR Description: peroxidase; peroxidase ATP19a [Arabidopsis
  misc_feature (1)..(300): Homolog of NCBI NO: 15220463 NR Description: peroxidase, putative [Arabidopsis thaliana] Peroxidase 3 precursor (Atperox P3) (Rare cold inducible protein)
  misc_feature (1)..(300): Homolog of NCBI NO: 21536908 NR Description: putative peroxidase [Arabidopsis thaliana]
MGFYDQTCPYAEKIVQDVVNQHINNAPSLAAGLIRMHFHDCFVRGCDGSILINATSSNQQVEKLAPPNLTVRGFDFIDKVKSALESKCPGIVSCADIITLATRDSIVAIGGPTWNVPTGRRDGRISNFAEAMNNIPPPFGNFTTLITLFGNQGLDVKDLVLLSGAHTIGVSHCSSFSNRLFNFTGVGDQDPSLDSEYADNLKSRRCLSIADNTTKVEMDPGSRNTFDLSYYRLVLKRRGLFESDAALTMNPAALAQVKRFAGGSEQEFFAEFSNSMEKMGRIGVKTGSDGEIRRTCAFVN

SEQ ID NO: 105530 - DNA, 1354 bp, Arabidopsis thaliana
  misc_feature (1)..(1354): Ceres Seq. ID no. 13617414
  misc_feature: MA Experiment ID: 108434 Result: Down-regulated in Transcription
  misc_feature: MA Experiment 108434 PARAMETER Experiment Name: At_Root_Tips_cDNA_P Parameter: Tissue Value: Root Tips
  misc_feature: MA Experiment ID: 108488 Result: Down-regulated in Transcription
  misc_feature: MA Experiment ID: 20000111 Result: Down-regulated in Transcription
  misc_feature: MA Experiment 20000111 PARAMETER Experiment Name: At_42deg_Heat_cDNA_P Parameter: Temperature (deg C) Value: 42 vs. 22
  misc_feature: MA Experiment 20000111 PARAMETER Experiment Name: At_42deg_Heat_cDNA_P Parameter: Timepoint (hr) Value: 6
  misc_feature: MA Experiment 20000111 PARAMETER Experiment Name: At_42deg_Heat_cDNA_P Parameter: Tissue Value: Aerial
  misc_feature: MA Experiment ID: 20000171 Result: Down-regulated in Transcription
  misc_feature: MA Experiment 20000171 PARAMETER Experiment Name: At_42deg_Heat_P Parameter: Age (day) Value: 14
  misc_feature: MA Experiment 20000171 PARAMETER Experiment Name: At_42deg_Heat_P Parameter: Organism Value: A. thaliana
  misc_feature: MA Experiment 20000171 PARAMETER Experiment Name: At_42deg_Heat_P Parameter: Plant Line Value: WS
  misc_feature: MA Experiment 20000171 PARAMETER Experiment Name: At_42deg_Heat_P Parameter: Temperature (deg C) Value: 42 vs. 22
  misc_feature: MA Experiment 20000171 PARAMETER Experiment Name: At_42deg_Heat_P Parameter: Timepoint (hr) Value: 1
  misc_feature: MA Experiment 20000171 PARAMETER Experiment Name: At_42deg_Heat_P Parameter: Tissue Value: Aerial
  misc_feature: MA Experiment ID: 20000173 Result: Down-regulated in Transcription
  misc_feature: MA Experiment 20000173 PARAMETER Experiment Name: At_42deg_Heat_P Parameter: Age (day) Value: 14
  misc_feature: MA Experiment 20000173 PARAMETER Experiment Name: At_42deg_Heat_P Parameter: Organism Value: A. thaliana
  misc_feature: MA Experiment 20000173 PARAMETER Experiment Name: At_42deg_Heat_P Parameter: Plant Line Value: WS
  misc_feature: MA Experiment 20000173 PARAMETER Experiment Name: At_42deg_Heat_P Parameter: Temperature (deg C) Value: 42 vs. 22
  misc_feature: MA Experiment 20000173 PARAMETER Experiment Name: At_42deg_Heat_P Parameter: Timepoint (hr) Value: 6
  misc_feature: MA Experiment 20000173 PARAMETER Experiment Name: At_42deg_Heat_P Parameter: Tissue Value: Aerial
  misc_feature: MA Experiment ID: 20000182 Result: Up-regulated in Transcription
  misc_feature: MA Experiment 20000182 PARAMETER Experiment Name: At_2mM_SA_P Parameter: Age (day) Value: 14
  misc_feature: MA Experiment 20000182 PARAMETER Experiment Name: At_2mM_SA_P Parameter: Organism Value: A. thaliana
  misc_feature: MA Experiment 20000182 PARAMETER Experiment Name: At_2mM_SA_P Parameter: Plant Line Value: WS
  misc_feature: MA Experiment 20000182 PARAMETER Experiment Name: At_2mM_SA_P Parameter: Timepoint (hr) Value: 6
  misc_feature: MA Experiment 20000182 PARAMETER Experiment Name: At_2mM_SA_P Parameter: Tissue Value: Aerial
  misc_feature: MA Experiment 20000182 PARAMETER Experiment Name: At_2mM_SA_P Parameter: Treatment Value: 2mM SA vs. No Treatment
  misc_feature: MA Experiment ID: 20000184 Result: Down-regulated in Transcription
  misc_feature: MA Experiment 20000184 PARAMETER Experiment Name: At_Shoots__P Parameter: Age (day) Value: 7
  misc_feature: MA Experiment 20000184 PARAMETER Experiment Name: At_Shoots__P Parameter: Tissue Value: Shoots vs. Whole Plant
  misc_feature: MA Experiment ID: 20000234 Result: Down-regulated in Transcription
  misc_feature: MA Experiment 20000234 PARAMETER Experiment Name: At_Siliques_P Parameter: Age (day) Value: 21
  misc_feature: MA Experiment 20000234 PARAMETER Experiment Name: At_Siliques_P Parameter: Organism Value: A. thaliana
  misc_feature: MA Experiment 20000234 PARAMETER Experiment Name: At_Siliques_P Parameter: Plant Line Value: WS
  misc_feature: MA Experiment 20000234 PARAMETER Experiment Name: At_Siliques_P Parameter: Tissue Value: Less Than 5mm Siliques vs. Whole Plant
  misc_feature: MA Experiment ID: 20000264 Result: Down-regulated in Transcription
  misc_feature: MA Experiment 20000264 PARAMETER Experiment Name: At_Open_Flower_P Parameter: Age (day) Value: 21
  misc_feature: MA Experiment 20000264 PARAMETER Experiment Name: At_Open_Flower_P Parameter: Plant Line Value: WS
  misc_feature: MA Experiment 20000264 PARAMETER Experiment Name: At_Open_Flower_P Parameter: Tissue Value: Open Flower vs. Whole Plant
  misc_feature: MA Experiment ID: 20000265 Result: Down-regulated in Transcription
  misc_feature: MA Experiment 20000265 PARAMETER Experiment Name: At_Open_Flower_P Parameter: Age (day) Value: 21
  misc_feature: MA Experiment 20000265 PARAMETER Experiment Name: At_Open_Flower_P Parameter: Plant Line Value: WS
  misc_feature: MA Experiment 20000265 PARAMETER Experiment Name: At_Open_Flower_P Parameter: Tissue Value: Closed Flower vs. Whole Plant
  misc_feature: MA Experiment ID: 20000286 Result: Down-regulated in Transcription
  misc_feature: MA Experiment 20000286 PARAMETER Experiment Name: At_Open_Flower_P Parameter: Age (day) Value: 21
  misc_feature: MA Experiment 20000286 PARAMETER Experiment Name: At_Open_Flower_P Parameter: Plant Line Value: WS
  misc_feature: MA Experiment 20000286 PARAMETER Experiment Name: At_Open_Flower_P Parameter: Tissue Value: Half Open vs. Whole Plant
  misc_feature: MA Experiment ID: 20000438 Result: Down-regulated in Transcription
  misc_feature: MA Experiment 20000438 PARAMETER Experiment Name: At_Shoots__P Parameter: Age (day) Value: 14
  misc_feature: MA Experiment 20000438 PARAMETER Experiment Name: At_Shoots__P Parameter: Tissue Value: Shoots vs. Whole Plant
  misc_feature: MA Experiment ID: 20000452 Result: Up-regulated in Transcription
  misc_feature: MA Experiment 20000452 PARAMETER Experiment Name: At_CS6879_Shoots-Roots_P Parameter: Age (day) Value: 14
  misc_feature: MA Experiment 20000452 PARAMETER Experiment Name: At_CS6879_Shoots-Roots_P Parameter: Organism Value: A. thaliana
  misc_feature: MA Experiment 20000452 PARAMETER Experiment Name: At_CS6879_Shoots-Roots_P Parameter: Plant Line Value: CS6879 vs. WS
  misc_feature: MA Experiment 20000452 PARAMETER Experiment Name: At_CS6879_Shoots-Roots_P Parameter: Tissue Value: Shoots
  misc_feature: MA Experiment ID: 20000495 Result: Down-regulated in Transcription
  misc_feature: MA Experiment 20000495 PARAMETER Experiment Name: At_Guard_Cells_P Parameter: Harvest Date Value: 8/2/2002
  misc_feature: MA Experiment 20000495 PARAMETER Experiment Name: At_Guard_Cells_P Parameter: Organism Value: A. thaliana
  misc_feature: MA Experiment 20000495 PARAMETER Experiment Name: At_Guard_Cells_P Parameter: Tissue Value: Guard Cells vs. Leaves
  misc_feature: MA Experiment ID: 20000496 Result: Down-regulated in Transcription
  misc_feature: MA Experiment 20000496 PARAMETER Experiment Name: At_Guard_Cells_P Parameter: Harvest Date Value: 7/19/2002
  misc_feature: MA Experiment 20000496 PARAMETER Experiment Name: At_Guard_Cells_P Parameter: Organism Value: Canola
  misc_feature: MA Experiment 20000496 PARAMETER Experiment Name: At_Guard_Cells_P Parameter: Tissue Value: Guard Cells vs. Leaves
  misc_feature: MA Experiment ID: 20000794 Result: Down-regulated in Transcription
  misc_feature: MA Experiment 20000794 PARAMETER Experiment Name: At_Petals_P Parameter: Age (day) Value: 23-25 days
  misc_feature: MA Experiment 20000794 PARAMETER Experiment Name: At_Petals_P Parameter: Plant Line Value: WS
  misc_feature: MA Experiment 20000794 PARAMETER Experiment Name: At_Petals_P Parameter: Tissue Value: Petals vs. Whole plant
  misc_feature: MA Experiment ID: 20001451 Result: Up-regulated in Transcription
  misc_feature: MA Experiment 20001451 PARAMETER Experiment Name: At_Far-red-induction_P Parameter: Age (day) Value: 7
  misc_feature: MA Experiment 20001451 PARAMETER Experiment Name: At_Far-red-induction_P Parameter: Light Value: Far-red vs. White
  misc_feature: MA Experiment 20001451 PARAMETER Experiment Name: At_Far-red-induction_P Parameter: Organism Value: A. thaliana
  misc_feature: MA Experiment 20001451 PARAMETER Experiment Name: At_Far-red-induction_P Parameter: Plant Line Value: Columbia
  misc_feature: MA Experiment 20001451 PARAMETER Experiment Name: At_Far-red-induction_P Parameter: Timepoint (hr) Value: 24
  misc_feature: MA Experiment 20001451 PARAMETER Experiment Name: At_Far-red-induction_P Parameter: Tissue Value: Whole Plant
  misc_feature: MA Experiment ID: 20001556 Result: Down-regulated in Transcription
  misc_feature: MA Experiment 20001556 PARAMETER Experiment Name: At_Drought_Soil_Dry_P Parameter: Age (day) Value: 26
  misc_feature: MA Experiment 20001556 PARAMETER Experiment Name: At_Drought_Soil_Dry_P Parameter: Organism Value: A. thaliana
  misc_feature: MA Experiment 20001556 PARAMETER Experiment Name: At_Drought_Soil_Dry_P Parameter: Plant Line Value: WS
  misc_feature: MA Experiment 20001556 PARAMETER Experiment Name: At_Drought_Soil_Dry_P Parameter: Post Timepoint (hr) Value: None
  misc_feature: MA Experiment 20001556 PARAMETER Experiment Name: At_Drought_Soil_Dry_P Parameter: Post-Treatment Value: None
  misc_feature: MA Experiment 20001556 PARAMETER Experiment Name: At_Drought_Soil_Dry_P Parameter: Timepoint (day) Value: 12
  misc_feature: MA Experiment 20001556 PARAMETER Experiment Name: At_Drought_Soil_Dry_P Parameter: Treatment Value: Drought vs. No Drought
  misc_feature: MA Experiment ID: 20001557 Result: Down-regulated in Transcription
  misc_feature: MA Experiment 20001557 PARAMETER Experiment Name: At_Drought_Soil_Dry_P Parameter: Age (day) Value: 27
  misc_feature: MA Experiment 20001557 PARAMETER Experiment Name: At_Drought_Soil_Dry_P Parameter: Organism Value: A. thaliana
  misc_feature: MA Experiment 20001557 PARAMETER Experiment Name: At_Drought_Soil_Dry_P Parameter: Plant Line Value: WS
  misc_feature: MA Experiment 20001557 PARAMETER Experiment Name: At_Drought_Soil_Dry_P Parameter: Post Timepoint (hr) Value: 3
  misc_feature: MA Experiment 20001557 PARAMETER Experiment Name: At_Drought_Soil_Dry_P Parameter: Post-Treatment Value: Re-Water vs. No Drought
  misc_feature: MA Experiment 20001557 PARAMETER Experiment Name: At_Drought_Soil_Dry_P Parameter: Timepoint (day) Value: 13
  misc_feature: MA Experiment 20001557 PARAMETER Experiment Name: At_Drought_Soil_Dry_P Parameter: Treatment Value: Drought vs. No Drought
  misc_feature: MA Experiment ID: 20001558 Result: Down-regulated in Transcription
  misc_feature: MA Experiment 20001558 PARAMETER Experiment Name: At_Drought_Soil_Dry_P Parameter: Age (day) Value: 27
  misc_feature: MA Experiment 20001558 PARAMETER Experiment Name: At_Drought_Soil_Dry_P Parameter: Organism Value: A. thaliana
  misc_feature: MA Experiment 20001558 PARAMETER Experiment Name: At_Drought_Soil_Dry_P Parameter: Plant Line Value: WS
  misc_feature: MA Experiment 20001558 PARAMETER Experiment Name: At_Drought_Soil_Dry_P Parameter: Post Timepoint (hr) Value: 6
  misc_feature: MA Experiment 20001558 PARAMETER Experiment Name: At_Drought_Soil_Dry_P Parameter: Post-Treatment Value: Re-Water vs. No Drought
  misc_feature: MA Experiment 20001558 PARAMETER Experiment Name: At_Drought_Soil_Dry_P Parameter: Timepoint (day) Value: 13
  misc_feature: MA Experiment 20001558 PARAMETER Experiment Name: At_Drought_Soil_Dry_P Parameter: Treatment Value: Drought vs. No Drought
  misc_feature: MA Experiment ID: 20001757 Result: Down-regulated in Transcription
  misc_feature: MA Experiment 20001757 PARAMETER Experiment Name: At_50mM_NH4NO3_L-to-H_P Parameter: Timepoint (hr) Value: 6
  misc_feature: MA Experiment 20001757 PARAMETER Experiment Name: At_50mM_NH4NO3_L-to-H_P Parameter: Tissue Value: Leaf
  misc_feature: MA Experiment 20001757 PARAMETER Experiment Name: At_50mM_NH4NO3_L-to-H_P Parameter: Treatment Value: 50mM NH4NO3 vs 100mM Mannitol
aaaaacccttctctgctttttatcaaaattctctctttttcccaaaaagattcacaaatttgttgtagtctcgccgttaagatggcgccggcgacggagcatcagagctcgttcttgagtcgactaagccgtcgcaatcaagtggtttccatggaggttaaccacgagcaagagcaagaagaactcgaagattttcaaaaacacgtagctgaacgtttcgcggagctcttaccaccgtcggattcgccggaatcttacccgattctttcgatccagtggctaaggaagcttcttgatgttttcatgtctatagaatcggagtttcattcggttttaacatcgaatccgtctcagatctcgaaacctccgttggataagcttgtaccggagatgcttgatcggattgttaaagctcttgatatttgtaccgccgtagtcaacggcgttgactcagtcagacaaatccaacgttgtgcggagattgctgttacggcgttgaaacaaacgccgttaagtgacggaagcgttaggagagctaaaagagctcttacaagcctcctcgccgctttaaacgctgataaaaacagcggtagcagcggcggaggaagtggtaggaggtcatcgacggatcagtggtcgtcgtttggtcgacgtagcggcggaagcagcggaggaggaggaggaggagcagggtgtgtgagtaagaattggtcagcggcgaagcagattcaagcaatgacggcgaatcttgtagcgccacgtggaggagaggcgtcgccgatgtatataatgagtagtgtgatggtaatggtgatgtggacgttagttgtagcggttccttgtcagacaagtaacggcttaatggttcatgtaccgctgccgaagaatcaggtatgggctaacgcggccgtgagtatctcggagagggtcggagaagagatgaaacggaaggagacgcgtggtggtggactgatggaggagatgcagaggatggagaggatcgggttgaagctgatggagttcagtgaagggtttaggtttaatggggaggaggatgtggtggcggaagtggcggagatggaggagatttgccggaaaatggaagatgggcttgaggggttacagagaagagttagagaagtgtttcataggttggtgaaaagcagaagtgagatacttgaagtgattgatcactgattgtaatcttttaactttgttgttgtgaaaatttaatctttgagttaactcttttgattaagaaaagagaacaaattacaggtttttattgttttatttatgtgataatctttgatgtatataaattacaattcgtaattaaagaaagataatgtat

SEQ ID NO: 105531 - protein, 398 aa, Arabidopsis thaliana
  peptide (1)..(398): Ceres Seq. ID no. 13617415
  misc_feature (29)..(396): Pfam Name: Protein of unknown function (DUF793) Pfam Description: Protein of unknown function (DUF793)
  misc_feature (28)..(398): Homolog of NCBI NO: 15237130 NR Description: expressed protein [Arabidopsis thaliana]
  misc_feature (28)..(398): Homolog of NCBI NO: 21553882 NR Description: unknown [Arabidopsis thaliana]
  misc_feature (28)..(397): Homolog of NCBI NO: 15236522 NR Description: expressed protein [Arabidopsis thaliana]
  misc_feature (28)..(294): Homolog of NCBI NO: 15222577 NR Description: hypothetical protein [Arabidopsis thaliana]
  misc_feature (30)..(394): Homolog of NCBI NO: 18394649 NR Description: expressed protein [Arabidopsis thaliana]
  misc_feature (30)..(394): Homolog of NCBI NO: 21593634 NR Description: unknown [Arabidopsis thaliana]
  misc_feature (29)..(396): Homolog of NCBI NO: 38345505 NR Description: OSJNBa0039K24.3 [Oryza sativa (japonica
  misc_feature (30)..(394): Homolog of NCBI NO: 15218428 NR Description: hypothetical protein [Arabidopsis thaliana]
  misc_feature (30)..(381): Homolog of NCBI NO: 21536674 NR Description: unknown [Arabidopsis thaliana]
  misc_feature (30)..(381): Homolog of NCBI NO: 18410617 NR Description: expressed protein [Arabidopsis thaliana]
KNPSLLFIKILSFSQKDSQICCSLAVKMAPATEHQSSFLSRLSRRNQVVSMEVNHEQEQEELEDFQKHVAERFAELLPPSDSPESYPILSIQWLRKLLDVFMSIESEFHSVLTSNPSQISKPPLDKLVPEMLDRIVKALDICTAVVNGVDSVRQIQRCAEIAVTALKQTPLSDGSVRRAKRALTSLLAALNADKNSGSSGGGSGRRSSTDQWSSFGRRSGGSSGGGGGGAGCVSKNWSAAKQIQAMTANLVAPRGGEASPMYIMSSVMVMVMWTLVVAVPCQTSNGLMVHVPLPKNQVWANAAVSISERVGEEMKRKETRGGGLMEEMQRMERIGLKLMEFSEGFRFNGEEDVVAEVAEMEEICRKMEDGLEGLQRRVREVFHRLVKSRSEILEVIDH

SEQ ID NO: 105532 - protein, 371 aa, Arabidopsis thaliana
  peptide (1)..(371): Ceres Seq. ID no. 13617416
  misc_feature (2)..(369): Pfam Name: Protein of unknown function (DUF793) Pfam Description: Protein of unknown function (DUF793)
  misc_feature (1)..(371): Homolog of NCBI NO: 15237130 NR Description: expressed protein [Arabidopsis thaliana]
  misc_feature (1)..(371): Homolog of NCBI NO: 21553882 NR Description: unknown [Arabidopsis thaliana]
  misc_feature (1)..(370): Homolog of NCBI NO: 15236522 NR Description: expressed protein [Arabidopsis thaliana]
  misc_feature (1)..(267): Homolog of NCBI NO: 15222577 NR Description: hypothetical protein [Arabidopsis thaliana]
  misc_feature (3)..(367): Homolog of NCBI NO: 18394649 NR Description: expressed protein [Arabidopsis thaliana]
  misc_feature (3)..(367): Homolog of NCBI NO: 21593634 NR Description: unknown [Arabidopsis thaliana]
  misc_feature (2)..(369): Homolog of NCBI NO: 38345505 NR Description: OSJNBa0039K24.3 [Oryza sativa (japonica
  misc_feature (3)..(367): Homolog of NCBI NO: 15218428 NR Description: hypothetical protein [Arabidopsis thaliana]
  misc_feature (3)..(354): Homolog of NCBI NO: 21536674 NR Description: unknown [Arabidopsis thaliana]
  misc_feature (3)..(354): Homolog of NCBI NO: 18410617 NR Description: expressed protein [Arabidopsis thaliana]
MAPATEHQSSFLSRLSRRNQVVSMEVNHEQEQEELEDFQKHVAERFAELLPPSDSPESYPILSIQWLRKLLDVFMSIESEFHSVLTSNPSQISKPPLDKLVPEMLDRIVKALDICTAVVNGVDSVRQIQRCAEIAVTALKQTPLSDGSVRRAKRALTSLLAALNADKNSGSSGGGSGRRSSTDQWSSFGRRSGGSSGGGGGGAGCVSKNWSAAKQIQAMTANLVAPRGGEASPMYIMSSVMVMVMWTLVVAVPCQTSNGLMVHVPLPKNQVWANAAVSISERVGEEMKRKETRGGGLMEEMQRMERIGLKLMEFSEGFRFNGEEDVVAEVAEMEEICRKMEDGLEGLQRRVREVFHRLVKSRSEILEVIDH

SEQ ID NO: 105533 - protein, 348 aa, Arabidopsis thaliana
  peptide (1)..(348): Ceres Seq. ID no. 13617417
  misc_feature (1)..(346): Pfam Name: Protein of unknown function (DUF793) Pfam Description: Protein of unknown function (DUF793)
  misc_feature (1)..(348): Homolog of NCBI NO: 15237130 NR Description: expressed protein [Arabidopsis thaliana]
  misc_feature (1)..(348): Homolog of NCBI NO: 21553882 NR Description: unknown [Arabidopsis thaliana]
  misc_feature (1)..(347): Homolog of NCBI NO: 15236522 NR Description: expressed protein [Arabidopsis thaliana]
  misc_feature (1)..(244): Homolog of NCBI NO: 15222577 NR Description: hypothetical protein [Arabidopsis thaliana]
  misc_feature (1)..(344): Homolog of NCBI NO: 18394649 NR Description: expressed protein [Arabidopsis thaliana]
  misc_feature (1)..(344): Homolog of NCBI NO: 21593634 NR Description: unknown [Arabidopsis thaliana]
  misc_feature (1)..(346): Homolog of NCBI NO: 38345505 NR Description: OSJNBa0039K24.3 [Oryza sativa (japonica
  misc_feature (1)..(344): Homolog of NCBI NO: 15218428 NR Description: hypothetical protein [Arabidopsis thaliana]
  misc_feature (1)..(331): Homolog of NCBI NO: 21536674 NR Description: unknown [Arabidopsis thaliana]
  misc_feature (1)..(331): Homolog of NCBI NO: 18410617 NR Description: expressed protein [Arabidopsis thaliana]
MEVNHEQEQEELEDFQKHVAERFAELLPPSDSPESYPILSIQWLRKLLDVFMSIESEFHSVLTSNPSQISKPPLDKLVPEMLDRIVKALDICTAVVNGVDSVRQIQRCAEIAVTALKQTPLSDGSVRRAKRALTSLLAALNADKNSGSSGGGSGRRSSTDQWSSFGRRSGGSSGGGGGGAGCVSKNWSAAKQIQAMTANLVAPRGGEASPMYIMSSVMVMVMWTLVVAVPCQTSNGLMVHVPLPKNQVWANAAVSISERVGEEMKRKETRGGGLMEEMQRMERIGLKLMEFSEGFRFNGEEDVVAEVAEMEEICRKMEDGLEGLQRRVREVFHRLVKSRSEILEVIDH

SEQ ID NO: 105534 - DNA, 1393 bp, Arabidopsis thaliana
  misc_feature (1)..(1393): Ceres Seq. ID no. 13617418
  misc_feature: MA Experiment ID: 20000173 Result: Down-regulated in Transcription
  misc_feature: MA Experiment 20000173 PARAMETER Experiment Name: At_42deg_Heat_P Parameter: Age (day) Value: 14
  misc_feature: MA Experiment 20000173 PARAMETER Experiment Name: At_42deg_Heat_P Parameter: Organism Value: A. thaliana
  misc_feature: MA Experiment 20000173 PARAMETER Experiment Name: At_42deg_Heat_P Parameter: Plant Line Value: WS
  misc_feature: MA Experiment 20000173 PARAMETER Experiment Name: At_42deg_Heat_P Parameter: Temperature (deg C) Value: 42 vs. 22
  misc_feature: MA Experiment 20000173 PARAMETER Experiment Name: At_42deg_Heat_P Parameter: Timepoint (hr) Value: 6
  misc_feature: MA Experiment 20000173 PARAMETER Experiment Name: At_42deg_Heat_P Parameter: Tissue Value: Aerial
  misc_feature: MA Experiment ID: 20000180 Result: Up-regulated in Transcription
  misc_feature: MA Experiment 20000180 PARAMETER Experiment Name: At_Germinating_Seeds_P Parameter: Age (hr) Value: 24 vs. 0
  misc_feature: MA Experiment 20000180 PARAMETER Experiment Name: At_Germinating_Seeds_P Parameter: Tissue Value: Germinating Seeds
  misc_feature: MA Experiment ID: 20000184 Result: Up-regulated in Transcription
  misc_feature: MA Experiment 20000184 PARAMETER Experiment Name: At_Shoots__P Parameter: Age (day) Value: 7
  misc_feature: MA Experiment 20000184 PARAMETER Experiment Name: At_Shoots__P Parameter: Tissue Value: Shoots vs. Whole Plant
  misc_feature: MA Experiment ID: 20000185 Result: Up-regulated in Transcription
  misc_feature: MA Experiment 20000185 PARAMETER Experiment Name: At_Roots__P Parameter: Age (day) Value: 7 vs. 21
  misc_feature: MA Experiment 20000185 PARAMETER Experiment Name: At_Roots__P Parameter: Organism Value: A. thaliana
  misc_feature: MA Experiment 20000185 PARAMETER Experiment Name: At_Roots__P Parameter: Tissue Value: Roots vs. Whole Plant
  misc_feature: MA Experiment ID: 20000211 Result: Up-regulated in Transcription
  misc_feature: MA Experiment 20000211 PARAMETER Experiment Name: At_0.001percent_MeJA__P Parameter: Age (day) Value: 14
  misc_feature: MA Experiment 20000211 PARAMETER Experiment Name: At_0.001percent_MeJA__P Parameter: Organism Value: A. thaliana
  misc_feature: MA Experiment 20000211 PARAMETER Experiment Name: At_0.001percent_MeJA__P Parameter: Plant Line Value: WS
  misc_feature: MA Experiment 20000211 PARAMETER Experiment Name: At_0.001percent_MeJA__P Parameter: Timepoint (hr) Value: 1
  misc_feature: MA Experiment 20000211 PARAMETER Experiment Name: At_0.001percent_MeJA__P Parameter: Tissue Value: Aerial
  misc_feature: MA Experiment 20000211 PARAMETER Experiment Name: At_0.001percent_MeJA__P Parameter: Treatment Value: 0.001percent MeJA vs. No Treatment
  misc_feature: MA Experiment ID: 20000227 Result: Down-regulated in Transcription
  misc_feature: MA Experiment 20000227 PARAMETER Experiment Name: At_Root-Tips-vs-Tops_P Parameter: Tissue Value: Root Tips vs. Root Tops
  misc_feature: MA Experiment ID: 20000264 Result: Up-regulated in Transcription
  misc_feature: MA Experiment 20000264 PARAMETER Experiment Name: At_Open_Flower_P Parameter: Age (day) Value: 21
  misc_feature: MA Experiment 20000264 PARAMETER Experiment Name: At_Open_Flower_P Parameter: Plant Line Value: WS
  misc_feature: MA Experiment 20000264 PARAMETER Experiment Name: At_Open_Flower_P Parameter: Tissue Value: Open Flower vs. Whole Plant
  misc_feature: MA Experiment ID: 20000265 Result: Up-regulated in Transcription
  misc_feature: MA Experiment 20000265 PARAMETER Experiment Name: At_Open_Flower_P Parameter: Age (day) Value: 21
  misc_feature: MA Experiment 20000265 PARAMETER Experiment Name: At_Open_Flower_P Parameter: Plant Line Value: WS
  misc_feature: MA Experiment 20000265 PARAMETER Experiment Name: At_Open_Flower_P Parameter: Tissue Value: Closed Flower vs. Whole Plant
  misc_feature: MA Experiment ID: 20000267 Result: Down-regulated in Transcription
  misc_feature: MA Experiment 20000267 PARAMETER Experiment Name: At_Drought_P Parameter: Age (day) Value: 7
  misc_feature: MA Experiment 20000267 PARAMETER Experiment Name: At_Drought_P Parameter: Organism Value: A. thaliana
  misc_feature: MA Experiment 20000267 PARAMETER Experiment Name: At_Drought_P Parameter: Plant Line Value: WS
  misc_feature: MA Experiment 20000267 PARAMETER Experiment Name: At_Drought_P Parameter: Timepoint (hr) Value: 6
  misc_feature: MA Experiment 20000267 PARAMETER Experiment Name: At_Drought_P Parameter: Tissue Value: Whole Plant
  misc_feature: MA Experiment 20000267 PARAMETER Experiment Name: At_Drought_P Parameter: Treatment Value: Drought vs. No Drought
  misc_feature: MA Experiment ID: 20000269 Result: Up-regulated in Transcription
  misc_feature: MA Experiment 20000269 PARAMETER Experiment Name: At_1mM_KNO3_L-vs-H_Roots_P Parameter: Age (day) Value: 7,10,12
  misc_feature: MA Experiment 20000269 PARAMETER Experiment Name: At_1mM_KNO3_L-vs-H_Roots_P Parameter: Organism Value: A. thaliana
  misc_feature: MA Experiment 20000269 PARAMETER Experiment Name: At_1mM_KNO3_L-vs-H_Roots_P Parameter: Plant Line Value: WS
  misc_feature: MA Experiment 20000269 PARAMETER Experiment Name: At_1mM_KNO3_L-vs-H_Roots_P Parameter: Timepoint (day) Value: 7,10,12
  misc_feature: MA Experiment 20000269 PARAMETER Experiment Name: At_1mM_KNO3_L-vs-H_Roots_P Parameter: Tissue Value: Roots
  misc_feature: MA Experiment 20000269 PARAMETER Experiment Name: At_1mM_KNO3_L-vs-H_Roots_P Parameter: Treatment Value: 1mM KNO3 vs. 50mM KNO3
  misc_feature: MA Experiment ID: 20000286 Result: Up-regulated in Transcription
  misc_feature: MA Experiment 20000286 PARAMETER Experiment Name: At_Open_Flower_P Parameter: Age (day) Value: 21
  misc_feature: MA Experiment 20000286 PARAMETER Experiment Name: At_Open_Flower_P Parameter: Plant Line Value: WS
  misc_feature: MA Experiment 20000286 PARAMETER Experiment Name: At_Open_Flower_P Parameter: Tissue Value: Half Open vs. Whole Plant
  misc_feature: MA Experiment ID: 20000437 Result: Down-regulated in Transcription
  misc_feature: MA Experiment 20000437 PARAMETER Experiment Name: At_Drought_P Parameter: Age (day) Value: 8
  misc_feature: MA Experiment 20000437 PARAMETER Experiment Name: At_Drought_P Parameter: Organism Value: A. thaliana
  misc_feature: MA Experiment 20000437 PARAMETER Experiment Name: At_Drought_P Parameter: Plant Line Value: WS
  misc_feature: MA Experiment 20000437 PARAMETER Experiment Name: At_Drought_P Parameter: Timepoint (hr) Value: 24
  misc_feature: MA Experiment 20000437 PARAMETER Experiment Name: At_Drought_P Parameter: Tissue Value: Whole Plant
  misc_feature: MA Experiment 20000437 PARAMETER Experiment Name: At_Drought_P Parameter: Treatment Value: Drought vs. No Drought
  misc_feature: MA Experiment ID: 20000438 Result: Up-regulated in Transcription
  misc_feature: MA Experiment 20000438 PARAMETER Experiment Name: At_Shoots__P Parameter: Age (day) Value: 14
  misc_feature: MA Experiment 20000438 PARAMETER Experiment Name: At_Shoots__P Parameter: Tissue Value: Shoots vs. Whole Plant
  misc_feature: MA Experiment ID: 20000439 Result: Up-regulated in Transcription
  misc_feature: MA Experiment 20000439 PARAMETER Experiment Name: At_Roots__P Parameter: Age (day) Value: 14 vs. 21
  misc_feature: MA Experiment 20000439 PARAMETER Experiment Name: At_Roots__P Parameter: Organism Value: A. thaliana
  misc_feature: MA Experiment 20000439 PARAMETER Experiment Name: At_Roots__P Parameter: Tissue Value: Roots vs. Whole Plant
  misc_feature: MA Experiment ID: 20000445 Result: Down-regulated in Transcription
  misc_feature: MA Experiment 20000445 PARAMETER Experiment Name: At_100uM_NAA__P Parameter: Age (day) Value: 14
  misc_feature: MA Experiment 20000445 PARAMETER Experiment Name: At_100uM_NAA__P Parameter: Organism Value: A. thaliana
  misc_feature: MA Experiment 20000445 PARAMETER Experiment Name: At_100uM_NAA__P Parameter: Plant Line Value: WS
  misc_feature: MA Experiment 20000445 PARAMETER Experiment Name: At_100uM_NAA__P Parameter: Timepoint (hr) Value: 6
  misc_feature: MA Experiment 20000445 PARAMETER Experiment Name: At_100uM_NAA__P Parameter: Tissue Value: Aerial
  misc_feature: MA Experiment 20000445 PARAMETER Experiment Name: At_100uM_NAA__P Parameter: Treatment Value: 100uM NAA vs. No Treatment
  misc_feature: MA Experiment ID: 20000451 Result: Down-regulated in Transcription
  misc_feature: MA Experiment 20000451 PARAMETER Experiment Name: At_CS6879_Shoots-Roots_P Parameter: Age (day) Value: 14
  misc_feature: MA Experiment 20000451 PARAMETER Experiment Name: At_CS6879_Shoots-Roots_P Parameter: Organism Value: A. thaliana
  misc_feature: MA Experiment 20000451 PARAMETER Experiment Name: At_CS6879_Shoots-Roots_P Parameter: Plant Line Value: CS6879 vs. WS
  misc_feature: MA Experiment 20000451 PARAMETER Experiment Name: At_CS6879_Shoots-Roots_P Parameter: Tissue Value: Roots
  misc_feature: MA Experiment ID: 20000460 Result: Down-regulated in Transcription
  misc_feature: MA Experiment 20000460 PARAMETER Experiment Name: At_10percent_PEG_P Parameter: Age (day) Value: 12
  misc_feature: MA Experiment 20000460 PARAMETER Experiment Name: At_10percent_PEG_P Parameter: Organism Value: A. thaliana
  misc_feature: MA Experiment 20000460 PARAMETER Experiment Name: At_10percent_PEG_P Parameter: Plant Line Value: WS
  misc_feature: MA Experiment 20000460 PARAMETER Experiment Name: At_10percent_PEG_P Parameter: Timepoint (day) Value: 12
  misc_feature: MA Experiment 20000460 PARAMETER Experiment Name: At_10percent_PEG_P Parameter: Tissue Value: Whole Plant
  misc_feature: MA Experiment 20000460 PARAMETER Experiment Name: At_10percent_PEG_P Parameter: Treatment Value: 10percent PEG vs. No Treatment
  misc_feature: MA Experiment ID: 20000495 Result: Up-regulated in Transcription
  misc_feature: MA Experiment 20000495 PARAMETER Experiment Name: At_Guard_Cells_P Parameter: Harvest Date Value: 8/2/2002
  misc_feature: MA Experiment 20000495 PARAMETER Experiment Name: At_Guard_Cells_P Parameter: Organism Value: A. thaliana
  misc_feature: MA Experiment 20000495 PARAMETER Experiment Name: At_Guard_Cells_P Parameter: Tissue Value: Guard Cells vs. Leaves
  misc_feature: MA Experiment ID: 20000527 Result: Down-regulated in Transcription
  misc_feature: MA Experiment 20000527 PARAMETER Experiment Name: At_10percent_PEG_P Parameter: Age (day) Value: 20
  misc_feature: MA Experiment 20000527 PARAMETER Experiment Name: At_10percent_PEG_P Parameter: Organism Value: A. thaliana
  misc_feature: MA Experiment 20000527 PARAMETER Experiment Name: At_10percent_PEG_P Parameter: Plant Line Value: WS
  misc_feature: MA Experiment 20000527 PARAMETER Experiment Name: At_10percent_PEG_P Parameter: Timepoint (day) Value: 20
  misc_feature: MA Experiment 20000527 PARAMETER Experiment Name: At_10percent_PEG_P Parameter: Tissue Value: Whole Plant
  misc_feature: MA Experiment 20000527 PARAMETER Experiment Name: At_10percent_PEG_P Parameter: Treatment Value: 10percent PEG vs. No Treatment
  misc_feature: MA Experiment ID: 20000575 Result: Down-regulated in Transcription
  misc_feature: MA Experiment 20000575 PARAMETER Experiment Name: At_100uM_ABA_Mutants__P Parameter: Organism Value: A. thaliana
  misc_feature: MA Experiment 20000575 PARAMETER Experiment Name: At_100uM_ABA_Mutants__P Parameter: Plant Line Value: CS22
  misc_feature: MA Experiment 20000575 PARAMETER Experiment Name: At_100uM_ABA_Mutants__P Parameter: Timepoint (hr) Value: 6
  misc_feature: MA Experiment 20000575 PARAMETER Experiment Name: At_100uM_ABA_Mutants__P Parameter: Tissue Value: Whole Plant
  misc_feature: MA Experiment 20000575 PARAMETER Experiment Name: At_100uM_ABA_Mutants__P Parameter: Treatment Value: 1uM ABA vs. No Treatment
  misc_feature: MA Experiment ID: 20000576 Result: Down-regulated in Transcription
  misc_feature: MA Experiment 20000576 PARAMETER Experiment Name: At_100uM_ABA_Mutants__P Parameter: Organism Value: A. thaliana
  misc_feature: MA Experiment 20000576 PARAMETER Experiment Name: At_100uM_ABA_Mutants__P Parameter: Plant Line Value: CS23
  misc_feature: MA Experiment 20000576 PARAMETER Experiment Name: At_100uM_ABA_Mutants__P Parameter: Timepoint (hr) Value: 6
  misc_feature: MA Experiment 20000576 PARAMETER Experiment Name: At_100uM_ABA_Mutants__P Parameter: Tissue Value: Whole Plant
  misc_feature: MA Experiment 20000576 PARAMETER Experiment Name: At_100uM_ABA_Mutants__P Parameter: Treatment Value: 1uM ABA vs. No Treatment
  misc_feature: MA Experiment ID: 20000794 Result: Down-regulated in Transcription
  misc_feature: MA Experiment 20000794 PARAMETER Experiment Name: At_Petals_P Parameter: Age (day) Value: 23-25 days
  misc_feature: MA Experiment 20000794 PARAMETER Experiment Name: At_Petals_P Parameter: Plant Line Value: WS
  misc_feature: MA Experiment 20000794 PARAMETER Experiment Name: At_Petals_P Parameter: Tissue Value: Petals vs. Whole plant
  misc_feature: MA Experiment ID: 20001555 Result: Down-regulated in Transcription
  misc_feature: MA Experiment 20001555 PARAMETER Experiment Name: At_Drought_Soil_Dry_P Parameter: Age (day) Value: 24
  misc_feature: MA Experiment 20001555 PARAMETER Experiment Name: At_Drought_Soil_Dry_P Parameter: Organism Value: A. thaliana
  misc_feature: MA Experiment 20001555 PARAMETER Experiment Name: At_Drought_Soil_Dry_P Parameter: Plant Line Value: WS
  misc_feature: MA Experiment 20001555 PARAMETER Experiment Name: At_Drought_Soil_Dry_P Parameter: Post Timepoint (hr) Value: None
  misc_feature: MA Experiment 20001555 PARAMETER Experiment Name: At_Drought_Soil_Dry_P Parameter: Post-Treatment Value: None
  misc_feature: MA Experiment 20001555 PARAMETER Experiment Name: At_Drought_Soil_Dry_P Parameter: Timepoint (day) Value: 10
  misc_feature: MA Experiment 20001555 PARAMETER Experiment Name: At_Drought_Soil_Dry_P Parameter: Treatment Value: Drought vs. No Drought
  misc_feature: MA Experiment ID: 20001556 Result: Down-regulated in Transcription
  misc_feature: MA Experiment 20001556 PARAMETER Experiment Name: At_Drought_Soil_Dry_P Parameter: Age (day) Value: 26
  misc_feature: MA Experiment 20001556 PARAMETER Experiment Name: At_Drought_Soil_Dry_P Parameter: Organism Value: A. thaliana
  misc_feature: MA Experiment 20001556 PARAMETER Experiment Name: At_Drought_Soil_Dry_P Parameter: Plant Line Value: WS
  misc_feature: MA Experiment 20001556 PARAMETER Experiment Name: At_Drought_Soil_Dry_P Parameter: Post Timepoint (hr) Value: None
  misc_feature: MA Experiment 20001556 PARAMETER Experiment Name: At_Drought_Soil_Dry_P Parameter: Post-Treatment Value: None
  misc_feature: MA Experiment 20001556 PARAMETER Experiment Name: At_Drought_Soil_Dry_P Parameter: Timepoint (day) Value: 12
  misc_feature: MA Experiment 20001556 PARAMETER Experiment Name: At_Drought_Soil_Dry_P Parameter: Treatment Value: Drought vs. No Drought
  misc_feature: MA Experiment ID: 20001557 Result: Down-regulated in Transcription
  misc_feature: MA Experiment 20001557 PARAMETER Experiment Name: At_Drought_Soil_Dry_P Parameter: Age (day) Value: 27
  misc_feature: MA Experiment 20001557 PARAMETER Experiment Name: At_Drought_Soil_Dry_P Parameter: Organism Value: A. thaliana
  misc_feature: MA Experiment 20001557 PARAMETER Experiment Name: At_Drought_Soil_Dry_P Parameter: Plant Line Value: WS
  misc_feature: MA Experiment 20001557 PARAMETER Experiment Name: At_Drought_Soil_Dry_P Parameter: Post Timepoint (hr) Value: 3
  misc_feature: MA Experiment 20001557 PARAMETER Experiment Name: At_Drought_Soil_Dry_P Parameter: Post-Treatment Value: Re-Water vs. No Drought
  misc_feature: MA Experiment 20001557 PARAMETER Experiment Name: At_Drought_Soil_Dry_P Parameter: Timepoint (day) Value: 13
  misc_feature: MA Experiment 20001557 PARAMETER Experiment Name: At_Drought_Soil_Dry_P Parameter: Treatment Value: Drought vs. No Drought
  misc_feature: MA Experiment ID: 20001558 Result: Down-regulated in Transcription
  misc_feature: MA Experiment 20001558 PARAMETER Experiment Name: At_Drought_Soil_Dry_P Parameter: Age (day) Value: 27
  misc_feature: MA Experiment 20001558 PARAMETER Experiment Name: At_Drought_Soil_Dry_P Parameter: Organism Value: A. thaliana
  misc_feature: MA Experiment 20001558 PARAMETER Experiment Name: At_Drought_Soil_Dry_P Parameter: Plant Line Value: WS
  misc_feature: MA Experiment 20001558 PARAMETER Experiment Name: At_Drought_Soil_Dry_P Parameter: Post Timepoint (hr) Value: 6
  misc_feature: MA Experiment 20001558 PARAMETER Experiment Name: At_Drought_Soil_Dry_P Parameter: Post-Treatment Value: Re-Water vs. No Drought
  misc_feature: MA Experiment 20001558 PARAMETER Experiment Name: At_Drought_Soil_Dry_P Parameter: Timepoint (day) Value: 13
  misc_feature: MA Experiment 20001558 PARAMETER Experiment Name: At_Drought_Soil_Dry_P Parameter: Treatment Value: Drought vs. No Drought
  misc_feature: MA Experiment ID: 20001559 Result: Down-regulated in Transcription
  misc_feature: MA Experiment 20001559 PARAMETER Experiment Name: At_Drought_Soil_Dry_P Parameter: Age (day) Value: 28
  misc_feature: MA Experiment 20001559 PARAMETER Experiment Name: At_Drought_Soil_Dry_P Parameter: Organism Value: A. thaliana
  misc_feature: MA Experiment 20001559 PARAMETER Experiment Name: At_Drought_Soil_Dry_P Parameter: Plant Line Value: WS
  misc_feature: MA Experiment 20001559 PARAMETER Experiment Name: At_Drought_Soil_Dry_P Parameter: Post Timepoint (hr) Value: 29
  misc_feature: MA Experiment 20001559 PARAMETER Experiment Name: At_Drought_Soil_Dry_P Parameter: Post-Treatment Value: Re-Water vs. No Drought
  misc_feature: MA Experiment 20001559 PARAMETER Experiment Name: At_Drought_Soil_Dry_P Parameter: Timepoint (day) Value: 14
  misc_feature: MA Experiment 20001559 PARAMETER Experiment Name: At_Drought_Soil_Dry_P Parameter: Treatment Value: Drought vs. No Drought
  misc_feature: MA Experiment ID: 20001768 Result: Down-regulated in Transcription
  misc_feature: MA Experiment 20001768 PARAMETER Experiment Name: At_Far-red-enriched-adult_P Parameter: Age (day) Value: 28
  misc_feature: MA Experiment 20001768 PARAMETER Experiment Name: At_Far-red-enriched-adult_P Parameter: Light Value: Far-red enriched vs. White
  misc_feature: MA Experiment 20001768 PARAMETER Experiment Name: At_Far-red-enriched-adult_P Parameter: Organism Value: A. thaliana
  misc_feature: MA Experiment 20001768 PARAMETER Experiment Name: At_Far-red-enriched-adult_P Parameter: Plant Line Value: Columbia
  misc_feature: MA Experiment 20001768 PARAMETER Experiment Name: At_Far-red-enriched-adult_P Parameter: Timepoint (hr) Value: 1
  misc_feature: MA Experiment 20001768 PARAMETER Experiment Name: At_Far-red-enriched-adult_P Parameter: Tissue Value: Aerial
  misc_feature: MA Experiment ID: 20001904 Result: Down-regulated in Transcription
  misc_feature: MA Experiment 20001904 PARAMETER Experiment Name: At_Drought_Reproduction_P Parameter: Age (day) Value: 37
  misc_feature: MA Experiment 20001904 PARAMETER Experiment Name: At_Drought_Reproduction_P Parameter: Organism Value: A. thaliana
  misc_feature: MA Experiment 20001904 PARAMETER Experiment Name: At_Drought_Reproduction_P Parameter: Plant Line Value: WS
  misc_feature: MA Experiment 20001904 PARAMETER Experiment Name: At_Drought_Reproduction_P Parameter: Timepoint (day) Value: 7
  misc_feature: MA Experiment 20001904 PARAMETER Experiment Name: At_Drought_Reproduction_P Parameter: Tissue Value: Rosettes
  misc_feature: MA Experiment 20001904 PARAMETER Experiment Name: At_Drought_Reproduction_P Parameter: Treatment Value: Drought vs. No Drought
  misc_feature: MA Experiment ID: 20001906 Result: Up-regulated in Transcription
  misc_feature: MA Experiment 20001906 PARAMETER Experiment Name: At_Drought_Reproduction_P Parameter: Age (day) Value: 35
  misc_feature: MA Experiment 20001906 PARAMETER Experiment Name: At_Drought_Reproduction_P Parameter: Organism Value: A. thaliana
  misc_feature: MA Experiment 20001906 PARAMETER Experiment Name: At_Drought_Reproduction_P Parameter: Plant Line Value: WS
  misc_feature: MA Experiment 20001906 PARAMETER Experiment Name: At_Drought_Reproduction_P Parameter: Timepoint (day) Value: 5
  misc_feature: MA Experiment 20001906 PARAMETER Experiment Name: At_Drought_Reproduction_P Parameter: Tissue Value: Siliques
  misc_feature: MA Experiment 20001906 PARAMETER Experiment Name: At_Drought_Reproduction_P Parameter: Treatment Value: Drought vs. No Drought
  misc_feature: MA Experiment ID: 20001908 Result: Up-regulated in Transcription
  misc_feature: MA Experiment 20001908 PARAMETER Experiment Name: At_Drought_Reproduction_P Parameter: Age (day) Value: 40
  misc_feature: MA Experiment 20001908 PARAMETER Experiment Name: At_Drought_Reproduction_P Parameter: Organism Value: A. thaliana
  misc_feature: MA Experiment 20001908 PARAMETER Experiment Name: At_Drought_Reproduction_P Parameter: Plant Line Value: WS
  misc_feature: MA Experiment 20001908 PARAMETER Experiment Name: At_Drought_Reproduction_P Parameter: Timepoint (day) Value: 10
  misc_feature: MA Experiment 20001908 PARAMETER Experiment Name: At_Drought_Reproduction_P Parameter: Tissue Value: Siliques
  misc_feature: MA Experiment 20001908 PARAMETER Experiment Name: At_Drought_Reproduction_P Parameter: Treatment Value: Drought vs. No Drought
  misc_feature: MA Experiment ID: 20001911 Result: Down-regulated in Transcription
  misc_feature: MA Experiment 20001911 PARAMETER Experiment Name: At_Drought_Reproduction_P Parameter: Age (day) Value: 40
  misc_feature: MA Experiment 20001911 PARAMETER Experiment Name: At_Drought_Reproduction_P Parameter: Organism Value: A. thaliana
  misc_feature: MA Experiment 20001911 PARAMETER Experiment Name: At_Drought_Reproduction_P Parameter: Plant Line Value: WS
  misc_feature: MA Experiment 20001911 PARAMETER Experiment Name: At_Drought_Reproduction_P Parameter: Timepoint (day) Value: 10
  misc_feature: MA Experiment 20001911 PARAMETER Experiment Name: At_Drought_Reproduction_P Parameter: Tissue Value: Flowers
  misc_feature: MA Experiment 20001911 PARAMETER Experiment Name: At_Drought_Reproduction_P Parameter: Treatment Value: Drought vs. No Drought
acataacacaaaatcctcttctcttctttaataacttttagaaacacaaataaaagtttaattacttttaagcccaacaaaaatgggttatgctaaatcagccatgctgatcttcttactagcattggtcatcgcatcttgtgccacggccatggacatgtccgttgtttcctccaacgataaccaccacgtgaccgccggtcccggccgccgtcagggtattttcgacgctgaagccaccttgatgttcgagtcatggatggtcaaacatgggaaagtgtacgactccgttgccgagaaggaacggcgtttaactatttttgaggacaacctccgttttatcactaaccggaacgctgagaatctcagttaccggcttggtttgaatcggtttgcggatttatctctccatgaatacggagaaatttgccatggggctgatccaagacctcctaggaaccacgtcttcatgactagcagcaaccgatacaagactagtgatggtgatgttcttcctaagtccgttgactggagaaacgaaggcgcagtgactgaagtcaaagatcaaggcctttgcaggagttgttgggctttctccactgtgggagcagtggaaggcttaaacaagattgtgactggagagctagtaactttgtctgagcaagatttgatcaattgtaacaaagaaaacaatggttgcggaggaggcaaagtcgagacagcctatgagttcatcatgaacaatggtggtcttggtaccgacaacgattatccttacaaagctctcaatggagtctgcgaaggccgcctcaaggaagacaacaagaatgttatgattgatgggtatgagaatttgcctgcaaacgatgaagccgctctcatgaaagcggttgctcaccagcctgtgactgccgttgtcgattccagcagccgagagtttcagctttatgaatcgggagtgtttgacggaacttgcggaacaaacctaaaccatggtgttgttgtggtcgggtatggaaccgagaatggtcgtgactactggattgtgaaaaactcgaggggcgacacatggggggaggctggctacatgaagatggctcgcaacattgccaatccaagaggcctatgtggcatcgcaatgcgagcttcataccctctcaagaactcgttttctacggataaagtttcggttgcctaataatatgaactaaatgtatgccatggaacggatcggttaagccattatcgttattcgactttgaaggaaactaaaaaataatgtggtcgattggtttggttttgttatatattatgcatttgtatgggggtcagtcaatgtttgaactttgtataatatttctttgggtctagtgataaatattttcccttttgc

SEQ ID NO: 105535 - protein, 371 aa, Arabidopsis thaliana; identical to SEQ ID NO: 24326
  peptide (1)..(371): Ceres Seq. ID no. 13617419
  misc_feature (144)..(359): Pfam Name: Papain family cysteine protease Pfam Description: Papain family cysteine protease
  misc_feature (1)..(371): Homolog of NCBI NO: 18413507 NR Description: cysteine proteinase [Arabidopsis thaliana]
  misc_feature (1)..(371): Homolog of NCBI NO: 18413505 NR Description: cysteine proteinase [Arabidopsis thaliana]
  misc_feature (8)..(371): Homolog of NCBI NO: 20260334 NR Description: drought-inducible cysteine proteinase RD21A
  misc_feature (1)..(360): Homolog of NCBI NO: 18422289 NR Description: cysteine proteinase RD21A [Arabidopsis thaliana]
  misc_feature (1)..(361): Homolog of NCBI NO: 18141285 NR Description: senescence-associated cysteine protease [Brassica
  misc_feature (1)..(361): Homolog of NCBI NO: 14517542 NR Description: F2G19.31/F2G19.31 [Arabidopsis thaliana]
  misc_feature (1)..(361): Homolog of NCBI NO: 18401614 NR Description: cysteine proteinase RD21A [Arabidopsis thaliana]
  misc_feature (1)..(360): Homolog of NCBI NO: 18141283 NR Description: senescence-associated cysteine protease [Brassica
  misc_feature (1)..(364): Homolog of NCBI NO: 18416165 NR Description: cysteine proteinase [Arabidopsis thaliana]
  misc_feature (7)..(361): Homolog of NCBI NO: 30141019 NR Description: cysteine protease-1 [Helianthus annuus]

SEQ ID NO: 105536 - protein, 364 aa, Arabidopsis thaliana; identical to SEQ ID NO: 24327
  peptide (1)..(364): Ceres Seq. ID no. 13617420
  misc_feature (137)..(352): Pfam Name: Papain family cysteine protease Pfam Description: Papain family cysteine protease
  misc_feature (1)..(364): Homolog of NCBI NO: 18413507 NR Description: cysteine proteinase [Arabidopsis thaliana]
  misc_feature (1)..(364): Homolog of NCBI NO: 18413505 NR Description: cysteine proteinase [Arabidopsis thaliana]
  misc_feature (1)..(364): Homolog of NCBI NO: 20260334 NR Description: drought-inducible cysteine proteinase RD21A
  misc_feature (1)..(353): Homolog of NCBI NO: 18422289 NR Description: cysteine proteinase RD21A [Arabidopsis thaliana]
  misc_feature (1)..(354): Homolog of NCBI NO: 18141285 NR Description: senescence-associated cysteine protease [Brassica
  misc_feature (1)..(354): Homolog of NCBI NO: 14517542 NR Description: F2G19.31/F2G19.31 [Arabidopsis thaliana]
  misc_feature (1)..(354): Homolog of NCBI NO: 18401614 NR Description: cysteine proteinase RD21A [Arabidopsis thaliana]
  misc_feature (1)..(353): Homolog of NCBI NO: 18141283 NR Description: senescence-associated cysteine protease [Brassica
  misc_feature (1)..(357): Homolog of NCBI NO: 18416165 NR Description: cysteine proteinase [Arabidopsis thaliana]
  misc_feature (1)..(354): Homolog of NCBI NO: 30141019 NR Description: cysteine protease-1 [Helianthus annuus]

SEQ ID NO: 105537 - protein, 348 aa, Arabidopsis thaliana; identical to SEQ ID NO: 24328
  peptide (1)..(348): Ceres Seq. ID no. 13617421
  misc_feature (121)..(336): Pfam Name: Papain family cysteine protease Pfam Description: Papain family cysteine protease
  misc_feature (1)..(348): Homolog of NCBI NO: 18413507 NR Description: cysteine proteinase [Arabidopsis thaliana]
  misc_feature (1)..(348): Homolog of NCBI NO: 18413505 NR Description: cysteine proteinase [Arabidopsis thaliana]
  misc_feature (1)..(348): Homolog of NCBI NO: 20260334 NR Description: drought-inducible cysteine proteinase RD21A
  misc_feature (1)..(337): Homolog of NCBI NO: 18422289 NR Description: cysteine proteinase RD21A [Arabidopsis thaliana]
  misc_feature (1)..(338): Homolog of NCBI NO: 18141285 NR Description: senescence-associated cysteine protease [Brassica
  misc_feature (1)..(338): Homolog of NCBI NO: 14517542 NR Description: F2G19.31/F2G19.31 [Arabidopsis thaliana]
  misc_feature (1)..(338): Homolog of NCBI NO: 18401614 NR Description: cysteine proteinase RD21A [Arabidopsis thaliana]
  misc_feature (1)..(337): Homolog of NCBI NO: 18141283 NR Description: senescence-associated cysteine protease [Brassica
  misc_feature (1)..(341): Homolog of NCBI NO: 18416165 NR Description: cysteine proteinase [Arabidopsis thaliana]
  misc_feature (1)..(338): Homolog of NCBI NO: 30141019 NR Description: cysteine protease-1 [Helianthus annuus]

SEQ ID NO: 105538 - DNA, 738 bp, Arabidopsis thaliana
  misc_feature (1)..(738): Ceres Seq. ID no. 13617422
  misc_feature: MA Experiment ID: 108434 Result: Down-regulated in Transcription
  misc_feature: MA Experiment 108434 PARAMETER Experiment Name: At_Root_Tips_cDNA_P Parameter: Tissue Value: Root Tips
  misc_feature: MA Experiment ID: 108464 Result: Up-regulated in Transcription
  misc_feature: MA Experiment 108464 PARAMETER Experiment Name: At_Germinating_Seeds_cDNA_P Parameter: Age (day) Value: 4 vs. 0
  misc_feature: MA Experiment 108464 PARAMETER Experiment Name: At_Germinating_Seeds_cDNA_P Parameter: Tissue Value: Germinating Seeds
  misc_feature: MA Experiment ID: 108488 Result: Down-regulated in Transcription
  misc_feature: MA Experiment ID: 108489 Result: Down-regulated in Transcription
  misc_feature: MA Experiment ID: 108573 Result: Up-regulated in Transcription
  misc_feature: MA Experiment 108573 PARAMETER Experiment Name: At_Drought_cDNA_P Parameter: Timepoint (hr) Value: 6
  misc_feature: MA Experiment 108573 PARAMETER Experiment Name: At_Drought_cDNA_P Parameter: Tissue Value: Aerial
  misc_feature: MA Experiment 108573 PARAMETER Experiment Name: At_Drought_cDNA_P Parameter: Treatment Value: Drought vs. No Drought
  misc_feature: MA Experiment ID: 108576 Result: Down-regulated in Transcription
  misc_feature: MA Experiment 108576 PARAMETER Experiment Name: At_42deg_Heat_cDNA_P Parameter: Temperature (deg C) Value: 42 vs. 22
  misc_feature: MA Experiment 108576 PARAMETER Experiment Name: At_42deg_Heat_cDNA_P Parameter: Timepoint (hr) Value: 1
  misc_feature: MA Experiment 108576 PARAMETER Experiment Name: At_42deg_Heat_cDNA_P Parameter: Tissue Value: Aerial
  misc_feature: MA Experiment ID: 108577 Result: Down-regulated in Transcription
  misc_feature: MA Experiment 108577 PARAMETER Experiment Name: At_42deg_Heat_cDNA_P Parameter: Temperature (deg C) Value: 42 vs. 22
  misc_feature: MA Experiment 108577 PARAMETER Experiment Name: At_42deg_Heat_cDNA_P Parameter: Timepoint (hr) Value: 6
  misc_feature: MA Experiment 108577 PARAMETER Experiment Name: At_42deg_Heat_cDNA_P Parameter: Tissue Value: Aerial
  misc_feature: MA Experiment ID: 108579 Result: Down-regulated in Transcription
  misc_feature: MA Experiment 108579 PARAMETER Experiment Name: At_4deg_Cold_cDNA_P Parameter: Temperature (deg C) Value: 4 vs. 22
  misc_feature: MA Experiment 108579 PARAMETER Experiment Name: At_4deg_Cold_cDNA_P Parameter: Timepoint (hr) Value: 6
  misc_feature: MA Experiment 108579 PARAMETER Experiment Name: At_4deg_Cold_cDNA_P Parameter: Tissue Value: Aerial
  misc_feature: MA Experiment ID: 108595 Result: Down-regulated in Transcription
  misc_feature: MA Experiment 108595 PARAMETER Experiment Name: At_Ler-pi_Ovule_cDNA_P Parameter: Plant Line Value: null
  misc_feature: MA Experiment ID: 20000069 Result: Up-regulated in Transcription
  misc_feature: MA Experiment 20000069 PARAMETER Experiment Name: At_100uM_ABA_Mutants_cDNA_P Parameter: Plant Line Value: CS23
  misc_feature: MA Experiment 20000069 PARAMETER Experiment Name: At_100uM_ABA_Mutants_cDNA_P Parameter: Timepoint (hr) Value: 6
  misc_feature: MA Experiment 20000069 PARAMETER Experiment Name: At_100uM_ABA_Mutants_cDNA_P Parameter: Tissue Value: Aerial
  misc_feature: MA Experiment 20000069 PARAMETER Experiment Name: At_100uM_ABA_Mutants_cDNA_P Parameter: Treatment Value: 100uM ABA vs. No Treatment
  misc_feature: MA Experiment ID: 20000071 Result: Up-regulated in Transcription
  misc_feature: MA Experiment 20000071 PARAMETER Experiment Name: At_100uM_ABA_Mutants_cDNA_P Parameter: Plant Line Value: CS8104
  misc_feature: MA Experiment 20000071 PARAMETER Experiment Name: At_100uM_ABA_Mutants_cDNA_P Parameter: Timepoint (hr) Value: 6
  misc_feature: MA Experiment 20000071 PARAMETER Experiment Name: At_100uM_ABA_Mutants_cDNA_P Parameter: Tissue Value: Aerial
  misc_feature: MA Experiment 20000071 PARAMETER Experiment Name: At_100uM_ABA_Mutants_cDNA_P Parameter: Treatment Value: 100uM ABA vs. No Treatment
  misc_feature: MA Experiment ID: 20000089 Result: Up-regulated in Transcription
  misc_feature: MA Experiment ID: 20000111 Result: Down-regulated in Transcription
  misc_feature: MA Experiment 20000111 PARAMETER Experiment Name: At_42deg_Heat_cDNA_P Parameter: Temperature (deg C) Value: 42 vs. 22
  misc_feature: MA Experiment 20000111 PARAMETER Experiment Name: At_42deg_Heat_cDNA_P Parameter: Timepoint (hr) Value: 6
  misc_feature: MA Experiment 20000111 PARAMETER Experiment Name: At_42deg_Heat_cDNA_P Parameter: Tissue Value: Aerial
  misc_feature: MA Experiment ID: 20000113 Result: Down-regulated in Transcription
  misc_feature: MA Experiment 20000113 PARAMETER Experiment Name: At_42deg_Heat_cDNA_P Parameter: Temperature (deg C) Value: 42 vs. 22
  misc_feature: MA Experiment 20000113 PARAMETER Experiment Name: At_42deg_Heat_cDNA_P Parameter: Timepoint (hr) Value: 8
  misc_feature: MA Experiment 20000113 PARAMETER Experiment Name: At_42deg_Heat_cDNA_P Parameter: Tissue Value: Aerial
  misc_feature: MA Experiment ID: 20000117 Result: Up-regulated in Transcription
  misc_feature: MA Experiment 20000117 PARAMETER Experiment Name: At_100uM_ABA_Mutants_cDNA_P Parameter: Plant Line Value: Columbia
  misc_feature: MA Experiment 20000117 PARAMETER Experiment Name: At_100uM_ABA_Mutants_cDNA_P Parameter: Timepoint (hr) Value: 6
  misc_feature: MA Experiment 20000117 PARAMETER Experiment Name: At_100uM_ABA_Mutants_cDNA_P Parameter: Tissue Value: Aerial
  misc_feature: MA Experiment 20000117 PARAMETER Experiment Name: At_100uM_ABA_Mutants_cDNA_P Parameter: Treatment Value: 100uM ABA vs. No Treatment
  misc_feature: MA Experiment ID: 20000328 Result: Down-regulated in Transcription
  misc_feature: MA Experiment 20000328 PARAMETER Experiment Name: At_42deg_Heat_Sub_P Parameter: Age (day) Value: 14
  misc_feature: MA Experiment 20000328 PARAMETER Experiment Name: At_42deg_Heat_Sub_P Parameter: Organism Value: A. thaliana
  misc_feature: MA Experiment 20000328 PARAMETER Experiment Name: At_42deg_Heat_Sub_P Parameter: Plant Line Value: WS
  misc_feature: MA Experiment 20000328 PARAMETER Experiment Name: At_42deg_Heat_Sub_P Parameter: Temperature (deg C) Value: 42 vs. 22
  misc_feature: MA Experiment 20000328 PARAMETER Experiment Name: At_42deg_Heat_Sub_P Parameter: Timepoint (hr) Value: 6
  misc_feature: MA Experiment 20000328 PARAMETER Experiment Name: At_42deg_Heat_Sub_P Parameter: Tissue Value: Aerial
  misc_feature: MA Experiment ID: 20000332 Result: Down-regulated in Transcription
  misc_feature: MA Experiment 20000332 PARAMETER Experiment Name: At_4deg_Cold_Sub_P Parameter: Age (day) Value: 14
  misc_feature: MA Experiment 20000332 PARAMETER Experiment Name: At_4deg_Cold_Sub_P Parameter: Organism Value: A. thaliana
  misc_feature: MA Experiment 20000332 PARAMETER Experiment Name: At_4deg_Cold_Sub_P Parameter: Plant Line Value: WS
  misc_feature: MA Experiment 20000332 PARAMETER Experiment Name: At_4deg_Cold_Sub_P Parameter: Temperature (deg C) Value: 4 vs. 22
  misc_feature: MA Experiment 20000332 PARAMETER Experiment Name: At_4deg_Cold_Sub_P Parameter: Timepoint (hr) Value: 2
  misc_feature: MA Experiment 20000332 PARAMETER Experiment Name: At_4deg_Cold_Sub_P Parameter: Tissue Value: Aerial
  misc_feature: MA Experiment ID: 20000355 Result: Down-regulated in Transcription
  misc_feature: MA Experiment 20000355 PARAMETER Experiment Name: At_Siliques_Sub_P Parameter: Age (day) Value: 21
  misc_feature: MA Experiment 20000355 PARAMETER Experiment Name: At_Siliques_Sub_P Parameter: Organism Value: A. thaliana
  misc_feature: MA Experiment 20000355 PARAMETER Experiment Name: At_Siliques_Sub_P Parameter: Plant Line Value: WS
  misc_feature: MA Experiment 20000355 PARAMETER Experiment Name: At_Siliques_Sub_P Parameter: Tissue Value: Less Than 5mm Siliques vs. Whole Plant
  misc_feature: MA Experiment ID: 20000440 Result: Down-regulated in Transcription
  misc_feature: MA Experiment 20000440 PARAMETER Experiment Name: At_Closed-Flower__Sub_P Parameter: Tissue Value: Closed Flower vs. Whole Plant
ttcaagctttatctctttctttctctcctctctatctttctctcacactcatgggtcttccaacagatttcaaagagcttcagattccaggttacgtactaaaaacactttacgtcatcggtttctttagagacatggtcgatgctctttgtccttacatcggtctaccaagttttcttgaccacaacgagacctctcgatccgacccgacccgactcgctctctccacgtcagcaactcttgccaacgagttaatcccggtggttcgtttctccgatcttttaaccgatccggaagattgctgcacggtttgcttatccgattttgtatccgacgataagattagacagctgccgaagtgtggacacgtgtttcatcatcgttgtttagaccgttggatcgttgactgtaataagataacgtgcccgatttgtcggaaccggttcttaccggaggaaaagtccacgccgtttgattggggtacttcagattggtttagagatgaagtggagagtaccaactaataatgatggttttacttttactttttacttttttcacggtaatatttttctactgtataattctttcttccaaactactgtataattcaagtataagattatgtaattgtgtatattagcatcaatcatctttctttgttaaagaaccgtctgtataaaatcttccaatgtaatctgcttttcttttatttgaataaaaaagtggacaaataaa

SEQ ID NO: 105539 - protein, 173 aa, Arabidopsis thaliana
  peptide (1)..(173): Ceres Seq. ID no. 13617423
  misc_feature (101)..(144): Pfam Name: Zinc finger, C3HC4 type (RING finger) Pfam Description: Zinc finger, C3HC4 type (RING finger)
  misc_feature (17)..(173): Homolog of NCBI NO: 15233350 NR Description: RING-H2 finger protein RHA1b [Arabidopsis
  misc_feature (17)..(173): Homolog of NCBI NO: 11358777 NR Description: RING-H2 finger protein RHA1b [imported] -
  misc_feature (17)..(173): Homolog of NCBI NO: 11358776 NR Description: RING-H2 finger protein RHA1a [imported] -
  misc_feature (17)..(173): Homolog of NCBI NO: 15233352 NR Description: RING-H2 finger protein, putative [Arabidopsis
  misc_feature (17)..(162): Homolog of NCBI NO: 15222553 NR Description: RING-H2 finger protein, putative [Arabidopsis >gi|25404448|pir||E96663 probable RING zinc finger protein
  misc_feature (17)..(162): Homolog of NCBI NO: 15233117 NR Description: BRH1 RING finger protein [Arabidopsis thaliana]
  misc_feature (51)..(163): Homolog of NCBI NO: 15238072 NR Description: RING-H2 zinc finger protein, putative
  misc_feature (51)..(163): Homolog of NCBI NO: 21554155 NR Description: RING zinc finger protein-like [Arabidopsis
  misc_feature (78)..(162): Homolog of NCBI NO: 32488512 NR Description: OSJNBa0011J08.19 [Oryza sativa (japonica
  misc_feature (69)..(151): Homolog of NCBI NO: 15234956 NR Description: zinc finger (C3HC4-type RING finger) protein
QALSLSFSPLYLSLTLMGLPTDFKELQIPGYVLKTLYVIGFFRDMVDALCPYIGLPSFLDHNETSRSDPTRLALSTSATLANELIPVVRFSDLLTDPEDCCTVCLSDFVSDDKIRQLPKCGHVFHHRCLDRWIVDCNKITCPICRNRFLPEEKSTPFDWGTSDWFRDEVESTN

SEQ ID NO: 105540 - protein, 157 aa, Arabidopsis thaliana; identical to SEQ ID NO: 23791
  peptide (1)..(157): Ceres Seq. ID no. 13617424
  misc_feature (85)..(128): Pfam Name: Zinc finger, C3HC4 type (RING finger) Pfam Description: Zinc finger, C3HC4 type (RING finger)
  misc_feature (1)..(157): Homolog of NCBI NO: 15233350 NR Description: RING-H2 finger protein RHA1b [Arabidopsis
  misc_feature (1)..(157): Homolog of NCBI NO: 11358777 NR Description: RING-H2 finger protein RHA1b [imported] -
  misc_feature (1)..(157): Homolog of NCBI NO: 11358776 NR Description: RING-H2 finger protein RHA1a [imported] -
  misc_feature (1)..(157): Homolog of NCBI NO: 15233352 NR Description: RING-H2 finger protein, putative [Arabidopsis
  misc_feature (1)..(146): Homolog of NCBI NO: 15222553 NR Description: RING-H2 finger protein, putative [Arabidopsis >gi|25404448|pir||E96663 probable RING zinc finger protein
  misc_feature (1)..(146): Homolog of NCBI NO: 15233117 NR Description: BRH1 RING finger protein [Arabidopsis thaliana]
  misc_feature (35)..(147): Homolog of NCBI NO: 15238072 NR Description: RING-H2 zinc finger protein, putative
  misc_feature (35)..(147): Homolog of NCBI NO: 21554155 NR Description: RING zinc finger protein-like [Arabidopsis
  misc_feature (62)..(146): Homolog of NCBI NO: 32488512 NR Description: OSJNBa0011J08.19 [Oryza sativa (japonica
  misc_feature (53)..(135): Homolog of NCBI NO: 15234956 NR Description: zinc finger (C3HC4-type RING finger) protein

SEQ ID NO: 105541 - protein, 129 aa, Arabidopsis thaliana; identical to SEQ ID NO: 23792
  peptide (1)..(129): Ceres Seq. ID no. 13617425
  misc_feature (57)..(100): Pfam Name: Zinc finger, C3HC4 type (RING finger) Pfam Description: Zinc finger, C3HC4 type (RING finger)
  misc_feature (1)..(129): Homolog of NCBI NO: 15233350 NR Description: RING-H2 finger protein RHA1b [Arabidopsis
  misc_feature (1)..(129): Homolog of NCBI NO: 11358777 NR Description: RING-H2 finger protein RHA1b [imported] -
  misc_feature (1)..(129): Homolog of NCBI NO: 11358776 NR Description: RING-H2 finger protein RHA1a [imported] -
  misc_feature (1)..(129): Homolog of NCBI NO: 15233352 NR Description: RING-H2 finger protein, putative [Arabidopsis
  misc_feature (1)..(118): Homolog of NCBI NO: 15222553 NR Description: RING-H2 finger protein, putative [Arabidopsis >gi|25404448|pir||E96663 probable RING zinc finger protein
  misc_feature (1)..(118): Homolog of NCBI NO: 15233117 NR Description: BRH1 RING finger protein [Arabidopsis thaliana]
  misc_feature (7)..(119): Homolog of NCBI NO: 15238072 NR Description: RING-H2 zinc finger protein, putative
  misc_feature (7)..(119): Homolog of NCBI NO: 21554155 NR Description: RING zinc finger protein-like [Arabidopsis
  misc_feature (34)..(118): Homolog of NCBI NO: 32488512 NR Description: OSJNBa0011J08.19 [Oryza sativa (japonica
  misc_feature (25)..(107): Homolog of NCBI NO: 15234956 NR Description: zinc finger (C3HC4-type RING finger) protein

SEQ ID NO: 105542 - DNA, 710 bp, Arabidopsis thaliana
  misc_feature (1)..(710): Ceres Seq. ID no. 13617426
  misc_feature: MA Experiment ID: 108433 Result: Up-regulated in Transcription
  misc_feature: MA Experiment 108433 PARAMETER Experiment Name: At_rhl_Mutant2_cDNA_P Parameter: Age (day) Value: 7
  misc_feature: MA Experiment 108433 PARAMETER Experiment Name: At_rhl_Mutant2_cDNA_P Parameter: Organism Value: A. thaliana
  misc_feature: MA Experiment 108433 PARAMETER Experiment Name: At_rhl_Mutant2_cDNA_P Parameter: Plant Line Value: rhl Mutant vs. wt landsburg
  misc_feature: MA Experiment 108433 PARAMETER Experiment Name: At_rhl_Mutant2_cDNA_P Parameter: Tissue Value: Roots
  misc_feature: MA Experiment ID: 108434 Result: Down-regulated in Transcription
  misc_feature: MA Experiment 108434 PARAMETER Experiment Name: At_Root_Tips_cDNA_P Parameter: Tissue Value: Root Tips
  misc_feature: MA Experiment ID: 108462 Result: Up-regulated in Transcription
  misc_feature: MA Experiment 108462 PARAMETER Experiment Name: At_Germinating_Seeds_cDNA_P Parameter: Age (day) Value: 2 vs. 0
  misc_feature: MA Experiment 108462 PARAMETER Experiment Name: At_Germinating_Seeds_cDNA_P Parameter: Tissue Value: Germinating Seeds
  misc_feature: MA Experiment ID: 108464 Result: Up-regulated in Transcription
  misc_feature: MA Experiment 108464 PARAMETER Experiment Name: At_Germinating_Seeds_cDNA_P Parameter: Age (day) Value: 4 vs. 0
  misc_feature: MA Experiment 108464 PARAMETER Experiment Name: At_Germinating_Seeds_cDNA_P Parameter: Tissue Value: Germinating Seeds
  misc_feature: MA Experiment ID: 108585 Result: Up-regulated in Transcription
  misc_feature: MA Experiment 108585 PARAMETER Experiment Name: At_5mM_NaNP_cDNA_P Parameter: Timepoint (hr) Value: 6
  misc_feature: MA Experiment 108585 PARAMETER Experiment Name: At_5mM_NaNP_cDNA_P Parameter: Tissue Value: Aerial
  misc_feature: MA Experiment 108585 PARAMETER Experiment Name: At_5mM_NaNP_cDNA_P Parameter: Treatment Value: null
  misc_feature: MA Experiment ID: 20000071 Result: Up-regulated in Transcription
  misc_feature: MA Experiment 20000071 PARAMETER Experiment Name: At_100uM_ABA_Mutants_cDNA_P Parameter: Plant Line Value: CS8104
  misc_feature: MA Experiment 20000071 PARAMETER Experiment Name: At_100uM_ABA_Mutants_cDNA_P Parameter: Timepoint (hr) Value: 6
  misc_feature: MA Experiment 20000071 PARAMETER Experiment Name: At_100uM_ABA_Mutants_cDNA_P Parameter: Tissue Value: Aerial
  misc_feature: MA Experiment 20000071 PARAMETER Experiment Name: At_100uM_ABA_Mutants_cDNA_P Parameter: Treatment Value: 100uM ABA vs. No Treatment
  misc_feature: MA Experiment ID: 20000090 Result: Up-regulated in Transcription
  misc_feature: MA Experiment ID: 20000111 Result: Down-regulated in Transcription
  misc_feature: MA Experiment 20000111 PARAMETER Experiment Name: At_42deg_Heat_cDNA_P Parameter: Temperature (deg C) Value: 42 vs. 22
  misc_feature: MA Experiment 20000111 PARAMETER Experiment Name: At_42deg_Heat_cDNA_P Parameter: Timepoint (hr) Value: 6
  misc_feature: MA Experiment 20000111 PARAMETER Experiment Name: At_42deg_Heat_cDNA_P Parameter: Tissue Value: Aerial
  misc_feature: MA Experiment ID: 20000166 Result: Up-regulated in Transcription
  misc_feature: MA Experiment 20000166 PARAMETER Experiment Name: At_100uM_ABA_P Parameter: Age (day) Value: 14
  misc_feature: MA Experiment 20000166 PARAMETER Experiment Name: At_100uM_ABA_P Parameter: Organism Value: A. thaliana
  misc_feature: MA Experiment 20000166 PARAMETER Experiment Name: At_100uM_ABA_P Parameter: Plant Line Value: WS
  misc_feature: MA Experiment 20000166 PARAMETER Experiment Name: At_100uM_ABA_P Parameter: Timepoint (hr) Value: 1
  misc_feature: MA Experiment 20000166 PARAMETER Experiment Name: At_100uM_ABA_P Parameter: Tissue Value: Aerial
  misc_feature: MA Experiment 20000166 PARAMETER Experiment Name: At_100uM_ABA_P Parameter: Treatment Value: 100uM ABA vs. No Treatment
  misc_feature: MA Experiment ID: 20000173 Result: Down-regulated in Transcription
  misc_feature: MA Experiment 20000173 PARAMETER Experiment Name: At_42deg_Heat_P Parameter: Age (day) Value: 14
  misc_feature: MA Experiment 20000173 PARAMETER Experiment Name: At_42deg_Heat_P Parameter: Organism Value: A. thaliana
  misc_feature: MA Experiment 20000173 PARAMETER Experiment Name: At_42deg_Heat_P Parameter: Plant Line Value: WS
  misc_feature: MA Experiment 20000173 PARAMETER Experiment Name: At_42deg_Heat_P Parameter: Temperature (deg C) Value: 42 vs. 22
  misc_feature: MA Experiment 20000173 PARAMETER Experiment Name: At_42deg_Heat_P Parameter: Timepoint (hr) Value: 6
  misc_feature: MA Experiment 20000173 PARAMETER Experiment Name: At_42deg_Heat_P Parameter: Tissue Value: Aerial
  misc_feature: MA Experiment ID: 20000185 Result: Down-regulated in Transcription
  misc_feature: MA Experiment 20000185 PARAMETER Experiment Name: At_Roots__P Parameter: Age (day) Value: 7 vs. 21
  misc_feature: MA Experiment 20000185 PARAMETER Experiment Name: At_Roots__P Parameter: Organism Value: A. thaliana
  misc_feature: MA Experiment 20000185 PARAMETER Experiment Name: At_Roots__P Parameter: Tissue Value: Roots vs. Whole Plant
  misc_feature: MA Experiment ID: 20000264 Result: Up-regulated in Transcription
  misc_feature: MA Experiment 20000264 PARAMETER Experiment Name: At_Open_Flower_P Parameter: Age (day) Value: 21
  misc_feature: MA Experiment 20000264 PARAMETER Experiment Name: At_Open_Flower_P Parameter: Plant Line Value: WS
  misc_feature: MA Experiment 20000264 PARAMETER Experiment Name: At_Open_Flower_P Parameter: Tissue Value: Open Flower vs. Whole Plant
  misc_feature: MA Experiment ID: 20000438 Result: Down-regulated in Transcription
  misc_feature: MA Experiment 20000438 PARAMETER Experiment Name: At_Shoots__P Parameter: Age (day) Value: 14
  misc_feature: MA Experiment 20000438 PARAMETER Experiment Name: At_Shoots__P Parameter: Tissue Value: Shoots vs. Whole Plant
  misc_feature: MA Experiment ID: 20000439 Result: Down-regulated in Transcription
  misc_feature: MA Experiment 20000439 PARAMETER Experiment Name: At_Roots__P Parameter: Age (day) Value: 14 vs. 21
  misc_feature: MA Experiment 20000439 PARAMETER Experiment Name: At_Roots__P Parameter: Organism Value: A. thaliana
  misc_feature: MA Experiment 20000439 PARAMETER Experiment Name: At_Roots__P Parameter: Tissue Value: Roots vs. Whole Plant
  misc_feature: MA Experiment ID: 20000709 Result: Up-regulated in Transcription
  misc_feature: MA Experiment 20000709 PARAMETER Experiment Name: At_15mM_NH4NO3_L-to-H_P Parameter: Age (hr) Value: 14
  misc_feature: MA Experiment 20000709 PARAMETER Experiment Name: At_15mM_NH4NO3_L-to-H_P Parameter: Organism Value: A. thaliana
  misc_feature: MA Experiment 20000709 PARAMETER Experiment Name: At_15mM_NH4NO3_L-to-H_P Parameter: Plant Line Value: WS
  misc_feature: MA Experiment 20000709 PARAMETER Experiment Name: At_15mM_NH4NO3_L-to-H_P Parameter: Timepoint (hr) Value: 4
  misc_feature: MA Experiment 20000709 PARAMETER Experiment Name: At_15mM_NH4NO3_L-to-H_P Parameter: Tissue Value: Aerial
  misc_feature: MA Experiment 20000709 PARAMETER Experiment Name: At_15mM_NH4NO3_L-to-H_P Parameter: Treatment Value: 15mM NH4NO3 vs. 30mM Mannitol
  misc_feature: MA Experiment ID: 20001905 Result: Up-regulated in Transcription
  misc_feature: MA Experiment 20001905 PARAMETER Experiment Name: At_Drought_Reproduction_P Parameter: Age (day) Value: 40
  misc_feature: MA Experiment 20001905 PARAMETER Experiment Name: At_Drought_Reproduction_P Parameter: Organism Value: A. thaliana
  misc_feature: MA Experiment 20001905 PARAMETER Experiment Name: At_Drought_Reproduction_P Parameter: Plant Line Value: WS
  misc_feature: MA Experiment 20001905 PARAMETER Experiment Name: At_Drought_Reproduction_P Parameter: Timepoint (day) Value: 10
  misc_feature: MA Experiment 20001905 PARAMETER Experiment Name: At_Drought_Reproduction_P Parameter: Tissue Value: Rosettes
  misc_feature: MA Experiment 20001905 PARAMETER Experiment Name: At_Drought_Reproduction_P Parameter: Treatment Value: Drought vs. No Drought
aaacacaattataaatctcaccattttttattatacacactttattcttgtctctatagttccacatctcaatctagctctcttctctatctttctctaaatcatgggtcttcctgaagatttcatcaccgagcttcagattccaagttacatattaaagatactttacgtcatcggtttctttagagacatcgtcgatgctctttgtccttacattggtctacctcgttttctagaccacaacgagacctctgcacccgatctgacccgacacgctctctctacgtcagcgagtcttgctaacgagttgatcccggtggttcggttctcggatcttccgaccgatccggaagattgttgtacggtttgtttgtcagattttgagtccgacgataaggttaggcagctacccaagtgtggacacgtgtttcatcattattgtttagaccgttggatcgttgactacaacaagatgaaatgtccggtttgtcggcaccggttcttaccgaaagaaaagtacacgcaatctgattggggttctggttcagattggtttagtgatgaagtggaaagtaccaactaattggtttaatctatgtcggcagaatatttgttgtatcaattccagtataactctatgtatattaacatagatcatctttttgaaggaacaacactatatatatctttatacaaaaacaacactatat

SEQ ID NO: 105543 - protein, 159 aa, Arabidopsis thaliana
  peptide (1)..(159): Ceres Seq. ID no. 13617427
  misc_feature (86)..(129): Pfam Name: Zinc finger, C3HC4 type (RING finger) Pfam Description: Zinc finger, C3HC4 type (RING finger)
  misc_feature (1)..(159): Homolog of NCBI NO: 15233352 NR Description: RING-H2 finger protein, putative [Arabidopsis
  misc_feature (1)..(159): Homolog of NCBI NO: 11358776 NR Description: RING-H2 finger protein RHA1a [imported] -
  misc_feature (1)..(159): Homolog of NCBI NO: 11358777 NR Description: RING-H2 finger protein RHA1b [imported] -
  misc_feature (1)..(159): Homolog of NCBI NO: 15233350 NR Description: RING-H2 finger protein RHA1b [Arabidopsis
  misc_feature (1)..(148): Homolog of NCBI NO: 15222553 NR Description: RING-H2 finger protein, putative [Arabidopsis >gi|25404448|pir||E96663 probable RING zinc finger protein
  misc_feature (1)..(146): Homolog of NCBI NO: 15233117 NR Description: BRH1 RING finger protein [Arabidopsis thaliana]
  misc_feature (62)..(144): Homolog of NCBI NO: 15238072 NR Description: RING-H2 zinc finger protein, putative
  misc_feature (62)..(144): Homolog of NCBI NO: 21554155 NR Description: RING zinc finger protein-like [Arabidopsis
  misc_feature (17)..(159): Homolog of NCBI NO: 15234956 NR Description: zinc finger (C3HC4-type RING finger) protein
  misc_feature (35)..(159): Homolog of NCBI NO: 30685065 NR Description: unknown protein [Arabidopsis thaliana] contains similarity to RING zinc finger protein~gene_id:MVE11.14 thaliana] >gi|21592532|gb|AAM64481.1| contains similarity to RING
MGLPEDFITELQIPSYILKILYVIGFFRDIVDALCPYIGLPRFLDHNETSAPDLTRHALSTSASLANELIPVVRFSDLPTDPEDCCTVCLSDFESDDKVRQLPKCGHVFHHYCLDRWIVDYNKMKCPVCRHRFLPKEKYTQSDWGSGSDWFSDEVESTN

SEQ ID NO: 105544 - DNA, 904 bp, Arabidopsis thaliana
  misc_feature (1)..(904): Ceres Seq. ID no. 13617428
  misc_feature: MA Experiment ID: 108463 Result: Up-regulated in Transcription
  misc_feature: MA Experiment 108463 PARAMETER Experiment Name: At_Germinating_Seeds_cDNA_P Parameter: Age (day) Value: 3 vs. 0
  misc_feature: MA Experiment 108463 PARAMETER Experiment Name: At_Germinating_Seeds_cDNA_P Parameter: Tissue Value: Germinating Seeds
  misc_feature: MA Experiment ID: 108464 Result: Up-regulated in Transcription
  misc_feature: MA Experiment 108464 PARAMETER Experiment Name: At_Germinating_Seeds_cDNA_P Parameter: Age (day) Value: 4 vs. 0
  misc_feature: MA Experiment 108464 PARAMETER Experiment Name: At_Germinating_Seeds_cDNA_P Parameter: Tissue Value: Germinating Seeds
  misc_feature: MA Experiment ID: 108572 Result: Up-regulated in Transcription
  misc_feature: MA Experiment 108572 PARAMETER Experiment Name: At_Drought_cDNA_P Parameter: Timepoint (hr) Value: 1
  misc_feature: MA Experiment 108572 PARAMETER Experiment Name: At_Drought_cDNA_P Parameter: Tissue Value: Aerial
  misc_feature: MA Experiment 108572 PARAMETER Experiment Name: At_Drought_cDNA_P Parameter: Treatment Value: Drought vs. No Drought
  misc_feature: MA Experiment ID: 108594 Result: Down-regulated in Transcription
  misc_feature: MA Experiment 108594 PARAMETER Experiment Name: At_Ler-rhl_Root_cDNA_P Parameter: Plant Line Value: null
  misc_feature: MA Experiment ID: 20000068 Result: Up-regulated in Transcription
  misc_feature: MA Experiment ID: 20000070 Result: Up-regulated in Transcription
  misc_feature: MA Experiment 20000070 PARAMETER Experiment Name: At_100uM_ABA_Mutants_cDNA_P Parameter: Plant Line Value: CS24
  misc_feature: MA Experiment 20000070 PARAMETER Experiment Name: At_100uM_ABA_Mutants_cDNA_P Parameter: Timepoint (hr) Value: 6
  misc_feature: MA Experiment 20000070 PARAMETER Experiment Name: At_100uM_ABA_Mutants_cDNA_P Parameter: Tissue Value: Aerial
  misc_feature: MA Experiment 20000070 PARAMETER Experiment Name: At_100uM_ABA_Mutants_cDNA_P Parameter: Treatment Value: 100uM ABA vs. No Treatment
  misc_feature: MA Experiment ID: 20000182 Result: Up-regulated in Transcription
  misc_feature: MA Experiment 20000182 PARAMETER Experiment Name: At_2mM_SA_P Parameter: Age (day) Value: 14
  misc_feature: MA Experiment 20000182 PARAMETER Experiment Name: At_2mM_SA_P Parameter: Organism Value: A. thaliana
  misc_feature: MA Experiment 20000182 PARAMETER Experiment Name: At_2mM_SA_P Parameter: Plant Line Value: WS
  misc_feature: MA Experiment 20000182 PARAMETER Experiment Name: At_2mM_SA_P Parameter: Timepoint (hr) Value: 6
  misc_feature: MA Experiment 20000182 PARAMETER Experiment Name: At_2mM_SA_P Parameter: Tissue Value: Aerial
  misc_feature: MA Experiment 20000182 PARAMETER Experiment Name: At_2mM_SA_P Parameter: Treatment Value: 2mM SA vs. No Treatment
  misc_feature: MA Experiment ID: 20000227 Result: Down-regulated in Transcription
  misc_feature: MA Experiment 20000227 PARAMETER Experiment Name: At_Root-Tips-vs-Tops_P Parameter: Tissue Value: Root Tips vs. Root Tops
  misc_feature: MA Experiment ID: 20000235 Result: Down-regulated in Transcription
  misc_feature: MA Experiment 20000235 PARAMETER Experiment Name: At_Siliques_P Parameter: Age (day) Value: 21
  misc_feature: MA Experiment 20000235 PARAMETER Experiment Name: At_Siliques_P Parameter: Organism Value: A. thaliana
  misc_feature: MA Experiment 20000235 PARAMETER Experiment Name: At_Siliques_P Parameter: Plant Line Value: WS
  misc_feature: MA Experiment 20000235 PARAMETER Experiment Name: At_Siliques_P Parameter: Tissue Value: 5-10mm Siliques vs. Whole Plant
  misc_feature: MA Experiment ID: 20000308 Result: Up-regulated in Transcription
  misc_feature: MA Experiment 20000308 PARAMETER Experiment Name: At_100mM_NaCl__P Parameter: Age (day) Value: 17
  misc_feature: MA Experiment 20000308 PARAMETER Experiment Name: At_100mM_NaCl__P Parameter: Organism Value: A. thaliana
  misc_feature: MA Experiment 20000308 PARAMETER Experiment Name: At_100mM_NaCl__P Parameter: Plant Line Value: WS
  misc_feature: MA Experiment 20000308 PARAMETER Experiment Name: At_100mM_NaCl__P Parameter: Timepoint (hr) Value: 72
  misc_feature: MA Experiment 20000308 PARAMETER Experiment Name: At_100mM_NaCl__P Parameter: Tissue Value: Whole Plant
  misc_feature: MA Experiment 20000308 PARAMETER Experiment Name: At_100mM_NaCl__P Parameter: Treatment Value: 100mM NaCl vs. No Treatment
  misc_feature: MA Experiment ID: 20000436 Result: Up-regulated in Transcription
  misc_feature: MA Experiment 20000436 PARAMETER Experiment Name: At_Drought_P Parameter: Age (day) Value: 7
  misc_feature: MA Experiment 20000436 PARAMETER Experiment Name: At_Drought_P Parameter: Organism Value: A. thaliana
  misc_feature: MA Experiment 20000436 PARAMETER Experiment Name: At_Drought_P Parameter: Plant Line Value: WS
  misc_feature: MA Experiment 20000436 PARAMETER Experiment Name: At_Drought_P Parameter: Timepoint (hr) Value: 12
  misc_feature: MA Experiment 20000436 PARAMETER Experiment Name: At_Drought_P Parameter: Tissue Value: Whole Plant
  misc_feature: MA Experiment 20000436 PARAMETER Experiment Name: At_Drought_P Parameter: Treatment Value: Drought vs. No Drought
  misc_feature: MA Experiment ID: 20000439 Result: Up-regulated in Transcription
  misc_feature: MA Experiment 20000439 PARAMETER Experiment Name: At_Roots__P Parameter: Age (day) Value: 14 vs. 21
  misc_feature: MA Experiment 20000439 PARAMETER Experiment Name: At_Roots__P Parameter: Organism Value: A. thaliana
  misc_feature: MA Experiment 20000439 PARAMETER Experiment Name: At_Roots__P Parameter: Tissue Value: Roots vs. Whole Plant
  misc_feature: MA Experiment ID: 20000453 Result: Up-regulated in Transcription
  misc_feature: MA Experiment 20000453 PARAMETER Experiment Name: At_100uM_ABA_P Parameter: Age (day) Value: 15
  misc_feature: MA Experiment 20000453 PARAMETER Experiment Name: At_100uM_ABA_P Parameter: Organism Value: A. thaliana
  misc_feature: MA Experiment 20000453 PARAMETER Experiment Name: At_100uM_ABA_P Parameter: Plant Line Value: WS
  misc_feature: MA Experiment 20000453 PARAMETER Experiment Name: At_100uM_ABA_P Parameter: Timepoint (hr) Value: 24
  misc_feature: MA Experiment 20000453 PARAMETER Experiment Name: At_100uM_ABA_P Parameter: Tissue Value: Aerial
  misc_feature: MA Experiment 20000453 PARAMETER Experiment Name: At_100uM_ABA_P Parameter: Treatment Value: 100uM ABA vs. No Treatment
  misc_feature: MA Experiment ID: 20000527 Result: Down-regulated in Transcription
  misc_feature: MA Experiment 20000527 PARAMETER Experiment Name: At_10percent_PEG_P Parameter: Age (day) Value: 20
  misc_feature: MA Experiment 20000527 PARAMETER Experiment Name: At_10percent_PEG_P Parameter: Organism Value: A. thaliana
  misc_feature: MA Experiment 20000527 PARAMETER Experiment Name: At_10percent_PEG_P Parameter: Plant Line Value: WS
  misc_feature: MA Experiment 20000527 PARAMETER Experiment Name: At_10percent_PEG_P Parameter: Timepoint (day) Value: 20
  misc_feature: MA Experiment 20000527 PARAMETER Experiment Name: At_10percent_PEG_P Parameter: Tissue Value: Whole Plant
  misc_feature: MA Experiment 20000527 PARAMETER Experiment Name: At_10percent_PEG_P Parameter: Treatment Value: 10percent PEG vs. No Treatment
  misc_feature: MA Experiment ID: 20000794 Result: Down-regulated in Transcription
  misc_feature: MA Experiment 20000794 PARAMETER Experiment Name: At_Petals_P Parameter: Age (day) Value: 23-25 days
  misc_feature: MA Experiment 20000794 PARAMETER Experiment Name: At_Petals_P Parameter: Plant Line Value: WS
  misc_feature: MA Experiment 20000794 PARAMETER Experiment Name: At_Petals_P Parameter: Tissue Value: Petals vs. Whole plant
  misc_feature: MA Experiment ID: 20001556 Result: Down-regulated in Transcription
  misc_feature: MA Experiment 20001556 PARAMETER Experiment Name: At_Drought_Soil_Dry_P Parameter: Age (day) Value: 26
  misc_feature: MA Experiment 20001556 PARAMETER Experiment Name: At_Drought_Soil_Dry_P Parameter: Organism Value: A. thaliana
  misc_feature: MA Experiment 20001556 PARAMETER Experiment Name: At_Drought_Soil_Dry_P Parameter: Plant Line Value: WS
  misc_feature: MA Experiment 20001556 PARAMETER Experiment Name: At_Drought_Soil_Dry_P Parameter: Post Timepoint (hr) Value: None
  misc_feature: MA Experiment 20001556 PARAMETER Experiment Name: At_Drought_Soil_Dry_P Parameter: Post-Treatment Value: None
  misc_feature: MA Experiment 20001556 PARAMETER Experiment Name: At_Drought_Soil_Dry_P Parameter: Timepoint (day) Value: 12
  misc_feature: MA Experiment 20001556 PARAMETER Experiment Name: At_Drought_Soil_Dry_P Parameter: Treatment Value: Drought vs. No Drought
  misc_feature: MA Experiment ID: 20001557 Result: Down-regulated in Transcription
  misc_feature: MA Experiment 20001557 PARAMETER Experiment Name: At_Drought_Soil_Dry_P Parameter: Age (day) Value: 27
  misc_feature: MA Experiment 20001557 PARAMETER Experiment Name: At_Drought_Soil_Dry_P Parameter: Organism Value: A. thaliana
  misc_feature: MA Experiment 20001557 PARAMETER Experiment Name: At_Drought_Soil_Dry_P Parameter: Plant Line Value: WS
  misc_feature: MA Experiment 20001557 PARAMETER Experiment Name: At_Drought_Soil_Dry_P Parameter: Post Timepoint (hr) Value: 3
  misc_feature: MA Experiment 20001557 PARAMETER Experiment Name: At_Drought_Soil_Dry_P Parameter: Post-Treatment Value: Re-Water vs. No Drought
  misc_feature: MA Experiment 20001557 PARAMETER Experiment Name: At_Drought_Soil_Dry_P Parameter: Timepoint (day) Value: 13
  misc_feature: MA Experiment 20001557 PARAMETER Experiment Name: At_Drought_Soil_Dry_P Parameter: Treatment Value: Drought vs. No Drought
  misc_feature: MA Experiment ID: 20001558 Result: Down-regulated in Transcription
  misc_feature: MA Experiment 20001558 PARAMETER Experiment Name: At_Drought_Soil_Dry_P Parameter: Age (day) Value: 27
  misc_feature: MA Experiment 20001558 PARAMETER Experiment Name: At_Drought_Soil_Dry_P Parameter: Organism Value: A. thaliana
  misc_feature: MA Experiment 20001558 PARAMETER Experiment Name: At_Drought_Soil_Dry_P Parameter: Plant Line Value: WS
  misc_feature: MA Experiment 20001558 PARAMETER Experiment Name: At_Drought_Soil_Dry_P Parameter: Post Timepoint (hr) Value: 6
  misc_feature: MA Experiment 20001558 PARAMETER Experiment Name: At_Drought_Soil_Dry_P Parameter: Post-Treatment Value: Re-Water vs. No Drought
  misc_feature: MA Experiment 20001558 PARAMETER Experiment Name: At_Drought_Soil_Dry_P Parameter: Timepoint (day) Value: 13
  misc_feature: MA Experiment 20001558 PARAMETER Experiment Name: At_Drought_Soil_Dry_P Parameter: Treatment Value: Drought vs. No Drought
  misc_feature: MA Experiment ID: 20001560 Result: Down-regulated in Transcription
  misc_feature: MA Experiment 20001560 PARAMETER Experiment Name: At_Drought_Soil_Dry_P Parameter: Age (day) Value: 28
  misc_feature: MA Experiment 20001560 PARAMETER Experiment Name: At_Drought_Soil_Dry_P Parameter: Organism Value: A. thaliana
  misc_feature: MA Experiment 20001560 PARAMETER Experiment Name: At_Drought_Soil_Dry_P Parameter: Plant Line Value: WS
  misc_feature: MA Experiment 20001560 PARAMETER Experiment Name: At_Drought_Soil_Dry_P Parameter: Post Timepoint (hr) Value: None
  misc_feature: MA Experiment 20001560 PARAMETER Experiment Name: At_Drought_Soil_Dry_P Parameter: Post-Treatment Value: None
  misc_feature: MA Experiment 20001560 PARAMETER Experiment Name: At_Drought_Soil_Dry_P Parameter: Timepoint (day) Value: 14
  misc_feature: MA Experiment 20001560 PARAMETER Experiment Name: At_Drought_Soil_Dry_P Parameter: Treatment Value: Drought vs. No Drought
  misc_feature: MA Experiment ID: 20001757 Result: Up-regulated in Transcription
  misc_feature: MA Experiment 20001757 PARAMETER Experiment Name: At_50mM_NH4NO3_L-to-H_P Parameter: Timepoint (hr) Value: 6
  misc_feature: MA Experiment 20001757 PARAMETER Experiment Name: At_50mM_NH4NO3_L-to-H_P Parameter: Tissue Value: Leaf
  misc_feature: MA Experiment 20001757 PARAMETER Experiment Name: At_50mM_NH4NO3_L-to-H_P Parameter: Treatment Value: 50mM NH4NO3 vs 100mM Mannitol
cacacatacataaaagtagtagaactaaaaaatggcaaacctcttggtctctactttcatattttccgcacttttgctcatctccaccgcaacagccgccacattcgaaatcctaaaccaatgtagttacaccgtgtgggctgccgcaagccctggaggtggccgacgtctagatgctggccaatcatggaggctagatgtcgcggcgggcactaaaatggcacggatttggggtaggaccaattgtaactttgactcctcaggtcgtggccgatgccaaactggtgactgcagtggtggactccaatgtactggctggggacagccaccaaacacgttggctgagtacgctttgaaccaattcaacaacttagacttctacgatatctcacttgtcgatggatttaacatacctatggagtttagcccaactagttcgaactgccatcggatactatgtaccgcagacataaacggacaatgtccaaacgtgttgagagccccaggtggatgcaacaacccgtgtactgtatttcagacgaaccaatactgttgtacgaacggtcagggatcatgtagcgatactgagtactcaagattctttaagcagagatgccctgacgcttacagctatccacaagatgacccgactagcactttcacttgcaccaacactaactacagggtcgtgttttgtccaaggtctaggctcggtgctactggatcccaccagctcccgatcaagatggtcaccgaggagaattaatagactcgtatctactgtatgtgtgtgtgtgtgagggtgtacgtagatatgcgtacgtgtgacgtgatcatatatacgttaccataaacacttaatggattataataaggcatgcaataataattacgttagtcgacc

SEQ ID NO: 105545 - protein, 244 aa, Arabidopsis thaliana
  peptide (1)..(244): Ceres Seq. ID no. 13617429
  misc_feature (29)..(223): Pfam Name: Thaumatin family Pfam Description: Thaumatin family
  misc_feature (1)..(244): Homolog of NCBI NO: 15234263 NR Description: osmotin-like protein (OSM34) [Arabidopsis
  misc_feature (1)..(244): Homolog of NCBI NO: 33589680 NR Description: At4g11650 [Arabidopsis thaliana]
  misc_feature (1)..(244): Homolog of NCBI NO: 887390 NR Description: osmotin [Arabidopsis thaliana]
  misc_feature (1)..(244): Homolog of NCBI NO: 21537409 NR Description: osmotin precursor [Arabidopsis thaliana]
  misc_feature (5)..(229): Homolog of NCBI NO: 3549691 NR Description: thaumatin-like protein PR-5b [Cicer arietinum]
  misc_feature (1)..(223): Homolog of NCBI NO: 5881239 NR Description: thaumatin [Vitis riparia]
  misc_feature (1)..(223): Homolog of NCBI NO: 14290147 NR Description: thaumatin-like protein [Sambucus nigra]
  misc_feature (5)..(239): Homolog of NCBI NO: 15419836 NR Description: thaumatin-like protein [Capsicum annuum]
  misc_feature (1)..(223): Homolog of NCBI NO: 14290151 NR Description: thaumatin-like protein [Sambucus nigra]
  misc_feature (5)..(239): Homolog of NCBI NO: 1709493 NR Description: OSMOTIN-LIKE PROTEIN OSML13 PRECURSOR (PA13)
MANLLVSTFIFSALLLISTATAATFEILNQCSYTVWAAASPGGGRRLDAGQSWRLDVAAGTKMARIWGRTNCNFDSSGRGRCQTGDCSGGLQCTGWGQPPNTLAEYALNQFNNLDFYDISLVDGFNIPMEFSPTSSNCHRILCTADINGQCPNVLRAPGGCNNPCTVFQTNQYCCTNGQGSCSDTEYSRFFKQRCPDAYSYPQDDPTSTFTCTNTNYRVVFCPRSRLGATGSHQLPIKMVTEEN

SEQ ID NO: 105546 - protein, 182 aa, Arabidopsis thaliana
  peptide (1)..(182): Ceres Seq. ID no. 13617430
  misc_feature (1)..(161): Pfam Name: Thaumatin family Pfam Description: Thaumatin family
  misc_feature (1)..(182): Homolog of NCBI NO: 15234263 NR Description: osmotin-like protein (OSM34) [Arabidopsis
  misc_feature (1)..(182): Homolog of NCBI NO: 33589680 NR Description: At4g11650 [Arabidopsis thaliana]
  misc_feature (1)..(182): Homolog of NCBI NO: 887390 NR Description: osmotin [Arabidopsis thaliana]
  misc_feature (1)..(182): Homolog of NCBI NO: 21537409 NR Description: osmotin precursor [Arabidopsis thaliana]
  misc_feature (1)..(167): Homolog of NCBI NO: 3549691 NR Description: thaumatin-like protein PR-5b [Cicer arietinum]
  misc_feature (1)..(161): Homolog of NCBI NO: 5881239 NR Description: thaumatin [Vitis riparia]
  misc_feature (1)..(161): Homolog of NCBI NO: 14290147 NR Description: thaumatin-like protein [Sambucus nigra]
  misc_feature (1)..(177): Homolog of NCBI NO: 15419836 NR Description: thaumatin-like protein [Capsicum annuum]
  misc_feature (1)..(161): Homolog of NCBI NO: 14290151 NR Description: thaumatin-like protein [Sambucus nigra]
  misc_feature (1)..(177): Homolog of NCBI NO: 1709493 NR Description: OSMOTIN-LIKE PROTEIN OSML13 PRECURSOR (PA13)
MARIWGRTNCNFDSSGRGRCQTGDCSGGLQCTGWGQPPNTLAEYALNQFNNLDFYDISLVDGFNIPMEFSPTSSNCHRILCTADINGQCPNVLRAPGGCNNPCTVFQTNQYCCTNGQGSCSDTEYSRFFKQRCPDAYSYPQDDPTSTFTCTNTNYRVVFCPRSRLGATGSHQLPIKMVTEEN

SEQ ID NO: 105547 - DNA, 825 bp, Arabidopsis thaliana
  misc_feature (1)..(825): Ceres Seq. ID no. 13617435
  misc_feature: MA Experiment ID: 20000794 Result: Up-regulated in Transcription
  misc_feature: MA Experiment 20000794 PARAMETER Experiment Name: At_Petals_P Parameter: Age (day) Value: 23-25 days
  misc_feature: MA Experiment 20000794 PARAMETER Experiment Name: At_Petals_P Parameter: Plant Line Value: WS
  misc_feature: MA Experiment 20000794 PARAMETER Experiment Name: At_Petals_P Parameter: Tissue Value: Petals vs. Whole plant
attcaattcatttccgtttgaaggaggtagtcggagactgagaatcatctgagatcggaaacgacaaacctaattttcccgaagaatcgagaccattatgtggaggagaatcgtttcatcgcatcttaaatccatctccgccgtcgggtcctgcgcggctccgtcgtgcaggcacgccgtcgtagagtccactcacctttctctctcgactcgtgcatcctccattcccgcatattcctccatattctctcgtttaatcggctccgctgcagcggatactgctgtgaagaagcgtgttgaagatgtgatgcctattgcaaccggtcacgagaaagaggaactacaagccgaattggaggggaggaagctggacgatatagactttcctgaagggccttttggaacaaaggaagctcctgctgtagtcaaatcctactacgacatgagaatagttggttgccctggaggtgaaggagaggatgagcatgatgttgtctggttttggctggagaaaggcaagtcttttgaatgccctgtgtgtacacagtacttcaagcttgaagtggtcggccctggaggacctcctgacggacatggtgatgaccatcactgatccaaggaaaacaatctattgtaataagaaatagtgtggcttctgctaaatgtgaagcagcctcgtcttgttttttttttttggttttaattctaccctcagttctctaccaattgcttcagtgattgccttaaaccgccgaaaatagatggtccatcttcaggctctcgtcgccattttttgccaaataattgagatgctacctttgttct

SEQ ID NO: 105548 - protein, 171 aa, Arabidopsis thaliana
  peptide (1)..(171): Ceres Seq. ID no. 13617436
  misc_feature (62)..(160): Pfam Name: Cytochrome c oxidase subunit Vb Pfam Description: Cytochrome c oxidase subunit Vb
  misc_feature (1)..(171): Homolog of NCBI NO: 15220092 NR Description: cytochrome c oxidase subunit -related
  misc_feature (1)..(171): Homolog of NCBI NO: 21592567 NR Description: cytochrome c oxidase subunit, putative
  misc_feature (1)..(171): Homolog of NCBI NO: 15232644 NR Description: cytochrome c oxidase subunit Vb -related thaliana] >gi|11994336|dbj|BAB02295.1| cytochrome c oxidase
  misc_feature (33)..(171): Homolog of NCBI NO: 5803264 NR Description: ESTs AU057456(S21460),AU057455(S21460) correspond a region of the predicted gene.~Similar to cytochrome c oxidase
  misc_feature (1)..(171): Homolog of NCBI NO: 34912592 NR Description: cytochrome c oxidase subunit Vb precursor [Oryza
  misc_feature (1)..(113): Homolog of NCBI NO: 7484634 NR Description: probable cytochrome-c oxidase (EC 1.9.3.1) Vb
  misc_feature (127)..(171): Homolog of NCBI NO: 5903035 NR Description: Similar to gb|D85381 cytochrome c oxidase subunit precursor from Oryza sativa. ESTs gb|R30504 and gb|AA598195 come
  misc_feature (20)..(171): Homolog of NCBI NO: 32410127 NR Description: hypothetical protein [Neurospora crassa]
  misc_feature (33)..(159): Homolog of NCBI NO: 31211731 NR Description: ENSANGP00000011122 [Anopheles gambiae]
  misc_feature (74)..(154): Homolog of NCBI NO: 223590 NR Description: oxidase IV,cytochrome
MWRRIVSSHLKSISAVGSCAAPSCRHAVVESTHLSLSTRASSIPAYSSIFSRLIGSAAADTAVKKRVEDVMPIATGHEKEELQAELEGRKLDDIDFPEGPFGTKEAPAVVKSYYDMRIVGCPGGEGEDEHDVVWFWLEKGKSFECPVCTQYFKLEVVGPGGPPDGHGDDHH

SEQ ID NO: 105549 - protein, 101 aa, Arabidopsis thaliana; identical to SEQ ID NO: 21415
  peptide (1)..(101): Ceres Seq. ID no. 13617437
  misc_feature (1)..(90): Pfam Name: Cytochrome c oxidase subunit Vb Pfam Description: Cytochrome c oxidase subunit Vb
  misc_feature (1)..(101): Homolog of NCBI NO: 15220092 NR Description: cytochrome c oxidase subunit -related
  misc_feature (1)..(101): Homolog of NCBI NO: 21592567 NR Description: cytochrome c oxidase subunit, putative
  misc_feature (1)..(101): Homolog of NCBI NO: 15232644 NR Description: cytochrome c oxidase subunit Vb -related thaliana] >gi|11994336|dbj|BAB02295.1| cytochrome c oxidase
  misc_feature (1)..(101): Homolog of NCBI NO: 5803264 NR Description: ESTs AU057456(S21460),AU057455(S21460) correspond a region of the predicted gene.~Similar to cytochrome c oxidase
  misc_feature (1)..(101): Homolog of NCBI NO: 34912592 NR Description: cytochrome c oxidase subunit Vb precursor [Oryza
  misc_feature (1)..(43): Homolog of NCBI NO: 7484634 NR Description: probable cytochrome-c oxidase (EC 1.9.3.1) Vb
  misc_feature (57)..(101): Homolog of NCBI NO: 5903035 NR Description: Similar to gb|D85381 cytochrome c oxidase subunit precursor from Oryza sativa. ESTs gb|R30504 and gb|AA598195 come
  misc_feature (1)..(101): Homolog of NCBI NO: 32410127 NR Description: hypothetical protein [Neurospora crassa]
  misc_feature (1)..(89): Homolog of NCBI NO: 31211731 NR Description: ENSANGP00000011122 [Anopheles gambiae]
  misc_feature (4)..(84): Homolog of NCBI NO: 223590 NR Description: oxidase IV,cytochrome

SEQ ID NO: 105550 - DNA, 1295 bp, Arabidopsis thaliana
  misc_feature (1)..(1295): Ceres Seq. ID no. 13617471
  misc_feature: MA Experiment ID: 108434 Result: Up-regulated in Transcription
  misc_feature: MA Experiment 108434 PARAMETER Experiment Name: At_Root_Tips_cDNA_P Parameter: Tissue Value: Root Tips
  misc_feature: MA Experiment ID: 108488 Result: Down-regulated in Transcription
  misc_feature: MA Experiment ID: 20000112 Result: Up-regulated in Transcription
  misc_feature: MA Experiment 20000112 PARAMETER Experiment Name: At_42deg_Heat_cDNA_P Parameter: Temperature (deg C) Value: 42 vs. 22
  misc_feature: MA Experiment 20000112 PARAMETER Experiment Name: At_42deg_Heat_cDNA_P Parameter: Timepoint (hr) Value: 2
  misc_feature: MA Experiment 20000112 PARAMETER Experiment Name: At_42deg_Heat_cDNA_P Parameter: Tissue Value: Aerial
  misc_feature: MA Experiment ID: 20000113 Result: Up-regulated in Transcription
  misc_feature: MA Experiment 20000113 PARAMETER Experiment Name: At_42deg_Heat_cDNA_P Parameter: Temperature (deg C) Value: 42 vs. 22
  misc_feature: MA Experiment 20000113 PARAMETER Experiment Name: At_42deg_Heat_cDNA_P Parameter: Timepoint (hr) Value: 8
  misc_feature: MA Experiment 20000113 PARAMETER Experiment Name: At_42deg_Heat_cDNA_P Parameter: Tissue Value: Aerial
aattcgttttccctcctcttctgcttaccggaaaagtctatatctccgacggaccttcttctctctagttaatcagacctcgcgctcgtgataatggcaacttttggtgcgcctgctaccgccaacagtaaccctaacaaatcctacgaggttactccatcaccggcagattctatttcgagcttaagttttagtccaagagctgatatacttgtggccacttcatgggacaatcaggtgaggtgttgggaaatatcccgtagtggagcctctctagccagtgctcctaaagcatcaatatcacatgatcagccggttttatgttctgcttggaaagatgatggaaccacagtctttagcggtggatgtgataagcaagcaaaaatgtggcccttgttgtctggtggtcaacctgtaactgttgctatgcatgagggtcctatcgcagctatggcttggatcccgggaatgaatctccttgcaactggaagttgggataaaactttgaaatattgggacacaagacagcaaaatcctgtacatacccaacagcttccagacaaatgttatacattgtctgtgaaacatcctctgatggttgtcgggactgccgatagaaatctgatagtcttcaacttgcaaaatcctcagactgagtttaagagaatccaatccccactgaagtaccagacgaggtgtgttactgccttccctgatcagcaaggttttttggttggttcaattgaggggcgggttggtgttcatcatctggatgattctcaacagagcaaaaacttcacattcaaatgccacagagatggaaatgatatatattctgtcaactctctgaatttccacccggtacatggcacttttgcaactgctgggtcagatggtgctttcaatttctgggacaaagatagtaaacaaagactcaaggccatgtcgaggtgcaatcagccaattccatgcagctcgttcaaccacgatggatcgatatatgcatatgcggcttgctatgactggagcaaaggtgcagaaaatcacaacccggcgactgcaaaaagcagcattttcttgcacctgccacaggaaagcgaggttaaggccaagccaagagttggagcaaccggcagaaaatgagcgttgcttagtctgatttcttcgctagtgattttttttttttttttagcttgtggacttcgttgggctttgttatctactttagttcatgacattttgaatatacattaggagtcttgtctaaaagactaaaagtaaatctctaatgtttc

SEQ ID NO: 105551 - protein, 349 aa, Arabidopsis thaliana; identical to SEQ ID NO: 24088
  peptide (1)..(349): Ceres Seq. ID no. 13617472
  misc_feature (1)..(349): Homolog of NCBI NO: 15220198 NR Description: transducin / WD-40 repeat protein family
  misc_feature (1)..(349): Homolog of NCBI NO: 38636797 NR Description: putative RAE1 (RNA export 1, S.pombe) homolog
  misc_feature (1)..(343): Homolog of NCBI NO: 34913020 NR Description: putative mRNA export protein [Oryza sativa
  misc_feature (1)..(213): Homolog of NCBI NO: 3122671 NR Description: Hypothetical RAE1-like protein At1g80670
  misc_feature (4)..(342): Homolog of NCBI NO: 4506399 NR Description: RAE1 (RNA export 1, S.pombe) homolog; homolog of
  misc_feature (4)..(342): Homolog of NCBI NO: 28201956 NR Description: RAE1 RNA export 1 homolog; DNA segment, Chr 2, Doi 342, expressed [Mus musculus] >gi|26347957|dbj|BAC37627.1|
  misc_feature (4)..(342): Homolog of NCBI NO: 34860864 NR Description: similar to RAE1 RNA export 1 homolog; DNA
  misc_feature (4)..(342): Homolog of NCBI NO: 2231592 NR Description: mRNA-associated protein mrnp41 [Homo sapiens]
  misc_feature (4)..(342): Homolog of NCBI NO: 29436458 NR Description: Similar to RAE1 RNA export 1 homolog (S. pombe)
  misc_feature (4)..(342): Homolog of NCBI NO: 30039225 NR Description: Rae1/Gle2 [Xenopus laevis]

SEQ ID NO: 105552 - protein, 252 aa, Arabidopsis thaliana; identical to SEQ ID NO: 24089
  peptide (1)..(252): Ceres Seq. ID no. 13617473
  misc_feature (1)..(252): Homolog of NCBI NO: 15220198 NR Description: transducin / WD-40 repeat protein family
  misc_feature (1)..(252): Homolog of NCBI NO: 38636797 NR Description: putative RAE1 (RNA export 1, S.pombe) homolog
  misc_feature (1)..(246): Homolog of NCBI NO: 34913020 NR Description: putative mRNA export protein [Oryza sativa
  misc_feature (1)..(116): Homolog of NCBI NO: 3122671 NR Description: Hypothetical RAE1-like protein At1g80670
  misc_feature (1)..(245): Homolog of NCBI NO: 4506399 NR Description: RAE1 (RNA export 1, S.pombe) homolog; homolog of
  misc_feature (1)..(245): Homolog of NCBI NO: 28201956 NR Description: RAE1 RNA export 1 homolog; DNA segment, Chr 2, Doi 342, expressed [Mus musculus] >gi|26347957|dbj|BAC37627.1|
  misc_feature (1)..(245): Homolog of NCBI NO: 34860864 NR Description: similar to RAE1 RNA export 1 homolog; DNA
  misc_feature (1)..(245): Homolog of NCBI NO: 2231592 NR Description: mRNA-associated protein mrnp41 [Homo sapiens]
  misc_feature (1)..(245): Homolog of NCBI NO: 29436458 NR Description: Similar to RAE1 RNA export 1 homolog (S. pombe)
  misc_feature (1)..(245): Homolog of NCBI NO: 30039225 NR Description: Rae1/Gle2 [Xenopus laevis]

SEQ ID NO: 105553 - protein, 238 aa, Arabidopsis thaliana; identical to SEQ ID NO: 24090
  peptide (1)..(238): Ceres Seq. ID no. 13617474
  misc_feature (1)..(238): Homolog of NCBI NO: 15220198 NR Description: transducin / WD-40 repeat protein family
  misc_feature (1)..(238): Homolog of NCBI NO: 38636797 NR Description: putative RAE1 (RNA export 1, S.pombe) homolog
  misc_feature (1)..(232): Homolog of NCBI NO: 34913020 NR Description: putative mRNA export protein [Oryza sativa
  misc_feature (1)..(102): Homolog of NCBI NO: 3122671 NR Description: Hypothetical RAE1-like protein At1g80670
  misc_feature (1)..(231): Homolog of NCBI NO: 4506399 NR Description: RAE1 (RNA export 1, S.pombe) homolog; homolog of
  misc_feature (1)..(231): Homolog of NCBI NO: 28201956 NR Description: RAE1 RNA export 1 homolog; DNA segment, Chr 2, Doi 342, expressed [Mus musculus] >gi|26347957|dbj|BAC37627.1|
  misc_feature (1)..(231): Homolog of NCBI NO: 34860864 NR Description: similar to RAE1 RNA export 1 homolog; DNA
  misc_feature (1)..(231): Homolog of NCBI NO: 2231592 NR Description: mRNA-associated protein mrnp41 [Homo sapiens]
  misc_feature (1)..(231): Homolog of NCBI NO: 29436458 NR Description: Similar to RAE1 RNA export 1 homolog (S. pombe)
  misc_feature (1)..(231): Homolog of NCBI NO: 30039225 NR Description: Rae1/Gle2 [Xenopus laevis]

SEQ ID NO: 105554 - DNA, 1271 bp, Arabidopsis thaliana
  misc_feature (1)..(1271): Ceres Seq. ID no. 13617475
  misc_feature: MA Experiment ID: 108434 Result: Down-regulated in Transcription
  misc_feature: MA Experiment 108434 PARAMETER Experiment Name: At_Root_Tips_cDNA_P Parameter: Tissue Value: Root Tips
  misc_feature: MA Experiment ID: 108574 Result: Up-regulated in Transcription
  misc_feature: MA Experiment 108574 PARAMETER Experiment Name: At_Wounding__cDNA_P Parameter: Timepoint (hr) Value: 1
  misc_feature: MA Experiment 108574 PARAMETER Experiment Name: At_Wounding__cDNA_P Parameter: Tissue Value: Aerial
  misc_feature: MA Experiment 108574 PARAMETER Experiment Name: At_Wounding__cDNA_P Parameter: Treatment Value: Wounding vs. No Wounding
  misc_feature: MA Experiment ID: 108595 Result: Up-regulated in Transcription
  misc_feature: MA Experiment 108595 PARAMETER Experiment Name: At_Ler-pi_Ovule_cDNA_P Parameter: Plant Line Value: null
  misc_feature: MA Experiment ID: 108605 Result: Up-regulated in Transcription
  misc_feature: MA Experiment 108605 PARAMETER Experiment Name: At_100uM_ABA_cDNA_P Parameter: Timepoint (hr) Value: 6
  misc_feature: MA Experiment 108605 PARAMETER Experiment Name: At_100uM_ABA_cDNA_P Parameter: Tissue Value: Aerial
  misc_feature: MA Experiment 108605 PARAMETER Experiment Name: At_100uM_ABA_cDNA_P Parameter: Treatment Value: 100uM ABA vs. No Treatment
  misc_feature: MA Experiment ID: 108607 Result: Up-regulated in Transcription
  misc_feature: MA Experiment 108607 PARAMETER Experiment Name: At_100uM_ABA_cDNA_P Parameter: Timepoint (hr) Value: 4
  misc_feature: MA Experiment 108607 PARAMETER Experiment Name: At_100uM_ABA_cDNA_P Parameter: Tissue Value: Aerial
  misc_feature: MA Experiment 108607 PARAMETER Experiment Name: At_100uM_ABA_cDNA_P Parameter: Treatment Value: 100uM ABA vs. No Treatment
  misc_feature: MA Experiment ID: 108609 Result: Up-regulated in Transcription
  misc_feature: MA Experiment 108609 PARAMETER Experiment Name: At_100uM_ABA_cDNA_P Parameter: Timepoint (hr) Value: 24
  misc_feature: MA Experiment 108609 PARAMETER Experiment Name: At_100uM_ABA_cDNA_P Parameter: Tissue Value: Aerial
  misc_feature: MA Experiment 108609 PARAMETER Experiment Name: At_100uM_ABA_cDNA_P Parameter: Treatment Value: 100uM ABA vs. No Treatment
  misc_feature: MA Experiment ID: 108668 Result: Up-regulated in Transcription
  misc_feature: MA Experiment 108668 PARAMETER Experiment Name: At_2mM_SA_cDNA_P Parameter: Plant Line Value: WS
  misc_feature: MA Experiment 108668 PARAMETER Experiment Name: At_2mM_SA_cDNA_P Parameter: Timepoint (hr) Value: 6
  misc_feature: MA Experiment 108668 PARAMETER Experiment Name: At_2mM_SA_cDNA_P Parameter: Treatment Value: 2mM SA vs. No Treatment
  misc_feature: MA Experiment ID: 20000070 Result: Up-regulated in Transcription
  misc_feature: MA Experiment 20000070 PARAMETER Experiment Name: At_100uM_ABA_Mutants_cDNA_P Parameter: Plant Line Value: CS24
  misc_feature: MA Experiment 20000070 PARAMETER Experiment Name: At_100uM_ABA_Mutants_cDNA_P Parameter: Timepoint (hr) Value: 6
  misc_feature: MA Experiment 20000070 PARAMETER Experiment Name: At_100uM_ABA_Mutants_cDNA_P Parameter: Tissue Value: Aerial
  misc_feature: MA Experiment 20000070 PARAMETER Experiment Name: At_100uM_ABA_Mutants_cDNA_P Parameter: Treatment Value: 100uM ABA vs. No Treatment
  misc_feature: MA Experiment ID: 20000307 Result: Down-regulated in Transcription
  misc_feature: MA Experiment 20000307 PARAMETER Experiment Name: At_Germinating_Seeds_Sub_P Parameter: Age (hr) Value: 24 vs. 0
  misc_feature: MA Experiment 20000307 PARAMETER Experiment Name: At_Germinating_Seeds_Sub_P Parameter: Organism Value: A. thaliana
  misc_feature: MA Experiment 20000307 PARAMETER Experiment Name: At_Germinating_Seeds_Sub_P Parameter: Plant Line Value: WS
  misc_feature: MA Experiment 20000307 PARAMETER Experiment Name: At_Germinating_Seeds_Sub_P Parameter: Tissue Value: Germinating Seeds
  misc_feature: MA Experiment ID: 20000314 Result: Up-regulated in Transcription
  misc_feature: MA Experiment 20000314 PARAMETER Experiment Name: At_14day_Shoots-Roots_Sub_P Parameter: Age (day) Value: 14
  misc_feature: MA Experiment 20000314 PARAMETER Experiment Name: At_14day_Shoots-Roots_Sub_P Parameter: Organism Value: A. thaliana
  misc_feature: MA Experiment 20000314 PARAMETER Experiment Name: At_14day_Shoots-Roots_Sub_P Parameter: Plant Line Value: WS
  misc_feature: MA Experiment 20000314 PARAMETER Experiment Name: At_14day_Shoots-Roots_Sub_P Parameter: Tissue Value: Roots vs. Whole Plant
  misc_feature: MA Experiment ID: 20000346 Result: Up-regulated in Transcription
  misc_feature: MA Experiment 20000346 PARAMETER Experiment Name: At_2mM_SA_Sub_P Parameter: Age (day) Value: 14
  misc_feature: MA Experiment 20000346 PARAMETER Experiment Name: At_2mM_SA_Sub_P Parameter: Organism Value: A. thaliana
  misc_feature: MA Experiment 20000346 PARAMETER Experiment Name: At_2mM_SA_Sub_P Parameter: Plant Line Value: WS
  misc_feature: MA Experiment 20000346 PARAMETER Experiment Name: At_2mM_SA_Sub_P Parameter: Timepoint (hr) Value: 1
  misc_feature: MA Experiment 20000346 PARAMETER Experiment Name: At_2mM_SA_Sub_P Parameter: Tissue Value: Aerial
  misc_feature: MA Experiment 20000346 PARAMETER Experiment Name: At_2mM_SA_Sub_P Parameter: Treatment Value: 2mM SA vs. No Treatment
  misc_feature: MA Experiment ID: 20000347 Result: Up-regulated in Transcription
  misc_feature: MA Experiment 20000347 PARAMETER Experiment Name: At_2mM_SA_Sub_P Parameter: Age (day) Value: 14
  misc_feature: MA Experiment 20000347 PARAMETER Experiment Name: At_2mM_SA_Sub_P Parameter: Organism Value: A. thaliana
  misc_feature: MA Experiment 20000347 PARAMETER Experiment Name: At_2mM_SA_Sub_P Parameter: Plant Line Value: WS
  misc_feature: MA Experiment 20000347 PARAMETER Experiment Name: At_2mM_SA_Sub_P Parameter: Timepoint (hr) Value: 6
  misc_feature: MA Experiment 20000347 PARAMETER Experiment Name: At_2mM_SA_Sub_P Parameter: Tissue Value: Aerial
  misc_feature: MA Experiment 20000347 PARAMETER Experiment Name: At_2mM_SA_Sub_P Parameter: Treatment Value: 2mM SA vs. No Treatment
  misc_feature: MA Experiment ID: 20000348 Result: Up-regulated in Transcription
  misc_feature: MA Experiment 20000348 PARAMETER Experiment Name: At_100uM_ABA_Sub_P Parameter: Age (day) Value: 14
  misc_feature: MA Experiment 20000348 PARAMETER Experiment Name: At_100uM_ABA_Sub_P Parameter: Organism Value: A. thaliana
  misc_feature: MA Experiment 20000348 PARAMETER Experiment Name: At_100uM_ABA_Sub_P Parameter: Plant Line Value: WS
  misc_feature: MA Experiment 20000348 PARAMETER Experiment Name: At_100uM_ABA_Sub_P Parameter: Timepoint (hr) Value: 1
  misc_feature: MA Experiment 20000348 PARAMETER Experiment Name: At_100uM_ABA_Sub_P Parameter: Tissue Value: Aerial
  misc_feature: MA Experiment 20000348 PARAMETER Experiment Name: At_100uM_ABA_Sub_P Parameter: Treatment Value: 100uM ABA vs. No Treatment
  misc_feature: MA Experiment ID: 20000349 Result: Up-regulated in Transcription
  misc_feature: MA Experiment 20000349 PARAMETER Experiment Name: At_100uM_ABA_Sub_P Parameter: Age (day) Value: 14
  misc_feature: MA Experiment 20000349 PARAMETER Experiment Name: At_100uM_ABA_Sub_P Parameter: Organism Value: A. thaliana
  misc_feature: MA Experiment 20000349 PARAMETER Experiment Name: At_100uM_ABA_Sub_P Parameter: Plant Line Value: WS
  misc_feature: MA Experiment 20000349 PARAMETER Experiment Name: At_100uM_ABA_Sub_P Parameter: Timepoint (hr) Value: 6
  misc_feature: MA Experiment 20000349 PARAMETER Experiment Name: At_100uM_ABA_Sub_P Parameter: Tissue Value: Aerial
  misc_feature: MA Experiment 20000349 PARAMETER Experiment Name: At_100uM_ABA_Sub_P Parameter: Treatment Value: 100uM ABA vs. No Treatment
  misc_feature: MA Experiment ID: 20000352 Result: Up-regulated in Transcription
  misc_feature: MA Experiment 20000352 PARAMETER Experiment Name: At_Drought_Sub_P Parameter: Age (day) Value: 7
  misc_feature: MA Experiment 20000352 PARAMETER Experiment Name: At_Drought_Sub_P Parameter: Organism Value: A. thaliana
  misc_feature: MA Experiment 20000352 PARAMETER Experiment Name: At_Drought_Sub_P Parameter: Plant Line Value: WS
  misc_feature: MA Experiment 20000352 PARAMETER Experiment Name: At_Drought_Sub_P Parameter: Timepoint (hr) Value: 6
  misc_feature: MA Experiment 20000352 PARAMETER Experiment Name: At_Drought_Sub_P Parameter: Tissue Value: Whole Plant
  misc_feature: MA Experiment 20000352 PARAMETER Experiment Name: At_Drought_Sub_P Parameter: Treatment Value: Drought vs. No Drought
  misc_feature: MA Experiment ID: 20000355 Result: Down-regulated in Transcription
  misc_feature: MA Experiment 20000355 PARAMETER Experiment Name: At_Siliques_Sub_P Parameter: Age (day) Value: 21
  misc_feature: MA Experiment 20000355 PARAMETER Experiment Name: At_Siliques_Sub_P Parameter: Organism Value: A. thaliana
  misc_feature: MA Experiment 20000355 PARAMETER Experiment Name: At_Siliques_Sub_P Parameter: Plant Line Value: WS
  misc_feature: MA Experiment 20000355 PARAMETER Experiment Name: At_Siliques_Sub_P Parameter: Tissue Value: Less Than 5mm Siliques vs. Whole Plant
actactctcttaagccctttcataaccttgtaaaccattaagaggctttgctcaattacaagaagaagaaaaaatgcttgtcgacgggaaactcgtctgcgtcaccggagccggcggctacattgcttcttggatcgttaagttactcttagagagaggctacaccgttagaggaaccgtaaggaacccaactgatcccaagaacaaccatctcagagagcttcaaggagccaaggaaagactcactcttcacagtgcagatcttctcgactacgaagctctctgtgccacaatcgacggttgcgatggcgttttccacactgcctctccgatgaccgacgatcccgagacaatgttggagccggcggtgaacggagccaagttcgtgattgacgcagcggctaaagccaaggtcaagcgcgtggttttcacgtcatcaattggtgcagtttacatgaaccctaaccgtgacactcaagccattgttgacgaaaactgctggagtgatcttgatttctgcaaaaacactaagaattggtattgctacgggaagatgttggcggaacaatcggcatgggagacggccaaagcaaaaggtgtggacttagtggtgctaaatccggttttggttctcggaccaccgctccagtcagcgatcaacgctagtctagtccatattctcaagtacctcaccggctcagccaagacctacgctaacttgactcaggtctacgtggacgtccgtgacgtggcactaggccatgttctggtctacgaagcaccctccgcctcaggccgttacatcctcgccgagaccgcacttcaccgcggagaggttgttgagattctggccaaattcttcccggagtatccacttcccaccaagtgttcggacgagaagaatccgagggctaagccatacaagtttactacccaaaagataaaagacttaggcttggaatttaaacccatcaagcaatctctttacgaatctgtcaagagcttgcaagagaaaggccatcttcctctacctcaagattcgaaccaaaacgaagtcatcatcgaatcttaggacacgatccacgaccctagaatctgatcatacctacatgaaaagctttattcttaagtaatacatacgttttgattttgactaaagtattgttaaatcttaaatcattatatatagctgattgttctttctttctttggttgtaattgagaatatgttacgcatatgtattatacgataatggaagcaatggttttat

SEQ ID NO: 105555 - protein, 332 aa, Arabidopsis thaliana
  peptide (1)..(332): Ceres Seq. ID no. 13617476
  misc_feature (10)..(189): Pfam Name: NAD dependent epimerase/dehydratase family Pfam Description: NAD dependent epimerase/dehydratase family
  misc_feature (1)..(332): Homolog of NCBI NO: 15220833 NR Description: cinnamoyl-CoA reductase, putative [Arabidopsis
  misc_feature (1)..(332): Homolog of NCBI NO: 12407990 NR Description: cinnamoyl CoA reductase CCR2 [Arabidopsis
  misc_feature (1)..(331): Homolog of NCBI NO: 21592757 NR Description: cinnamoyl CoA reductase, putative [Arabidopsis
  misc_feature (5)..(328): Homolog of NCBI NO: 15218377 NR Description: cinnamoyl-CoA reductase, putative [Arabidopsis
  misc_feature (5)..(328): Homolog of NCBI NO: 12034897 NR Description: cinnamoyl CoA reductase isoform 1 [Arabidopsis
  misc_feature (5)..(331): Homolog of NCBI NO: 9998901 NR Description: cinnamoyl-CoA reductase [Populus balsamifera
  misc_feature (5)..(331): Homolog of NCBI NO: 2960364 NR Description: cinnamoyl CoA reductase [Populus balsamifera
  misc_feature (9)..(331): Homolog of NCBI NO: 7239228 NR Description: cinnamoyl CoA reductase; CCR [Populus tremuloides]
  misc_feature (5)..(325): Homolog of NCBI NO: 25140434 NR Description: cinnamoyl CoA reductase [Solanum tuberosum]
  misc_feature (5)..(331): Homolog of NCBI NO: 31414896 NR Description: cinnamoyl CoA reductase [Fragaria x ananassa]
MLVDGKLVCVTGAGGYIASWIVKLLLERGYTVRGTVRNPTDPKNNHLRELQGAKERLTLHSADLLDYEALCATIDGCDGVFHTASPMTDDPETMLEPAVNGAKFVIDAAAKAKVKRVVFTSSIGAVYMNPNRDTQAIVDENCWSDLDFCKNTKNWYCYGKMLAEQSAWETAKAKGVDLVVLNPVLVLGPPLQSAINASLVHILKYLTGSAKTYANLTQVYVDVRDVALGHVLVYEAPSASGRYILAETALHRGEVVEILAKFFPEYPLPTKCSDEKNPRAKPYKFTTQKIKDLGLEFKPIKQSLYESVKSLQEKGHLPLPQDSNQNEVIIES

SEQ ID NO: 105556 - protein, 246 aa, Arabidopsis thaliana
  peptide (1)..(246): Ceres Seq. ID no. 13617477
  misc_feature (1)..(103): Pfam Name: NAD dependent epimerase/dehydratase family Pfam Description: NAD dependent epimerase/dehydratase family
  misc_feature (1)..(246): Homolog of NCBI NO: 15220833 NR Description: cinnamoyl-CoA reductase, putative [Arabidopsis
  misc_feature (1)..(246): Homolog of NCBI NO: 12407990 NR Description: cinnamoyl CoA reductase CCR2 [Arabidopsis
  misc_feature (1)..(245): Homolog of NCBI NO: 21592757 NR Description: cinnamoyl CoA reductase, putative [Arabidopsis
  misc_feature (1)..(242): Homolog of NCBI NO: 15218377 NR Description: cinnamoyl-CoA reductase, putative [Arabidopsis
  misc_feature (1)..(242): Homolog of NCBI NO: 12034897 NR Description: cinnamoyl CoA reductase isoform 1 [Arabidopsis
  misc_feature (1)..(245): Homolog of NCBI NO: 9998901 NR Description: cinnamoyl-CoA reductase [Populus balsamifera
  misc_feature (1)..(245): Homolog of NCBI NO: 2960364 NR Description: cinnamoyl CoA reductase [Populus balsamifera
  misc_feature (1)..(245): Homolog of NCBI NO: 7239228 NR Description: cinnamoyl CoA reductase; CCR [Populus tremuloides]
  misc_feature (1)..(239): Homolog of NCBI NO: 25140434 NR Description: cinnamoyl CoA reductase [Solanum tuberosum]
  misc_feature (1)..(245): Homolog of NCBI NO: 31414896 NR Description: cinnamoyl CoA reductase [Fragaria x ananassa]
MTDDPETMLEPAVNGAKFVIDAAAKAKVKRVVFTSSIGAVYMNPNRDTQAIVDENCWSDLDFCKNTKNWYCYGKMLAEQSAWETAKAKGVDLVVLNPVLVLGPPLQSAINASLVHILKYLTGSAKTYANLTQVYVDVRDVALGHVLVYEAPSASGRYILAETALHRGEVVEILAKFFPEYPLPTKCSDEKNPRAKPYKFTTQKIKDLGLEFKPIKQSLYESVKSLQEKGHLPLPQDSNQNEVIIES

SEQ ID NO: 105557 - protein, 239 aa, Arabidopsis thaliana
  peptide (1)..(239): Ceres Seq. ID no. 13617478
  misc_feature (1)..(96): Pfam Name: NAD dependent epimerase/dehydratase family Pfam Description: NAD dependent epimerase/dehydratase family
  misc_feature (1)..(239): Homolog of NCBI NO: 15220833 NR Description: cinnamoyl-CoA reductase, putative [Arabidopsis
  misc_feature (1)..(239): Homolog of NCBI NO: 12407990 NR Description: cinnamoyl CoA reductase CCR2 [Arabidopsis
  misc_feature (1)..(238): Homolog of NCBI NO: 21592757 NR Description: cinnamoyl CoA reductase, putative [Arabidopsis
  misc_feature (1)..(235): Homolog of NCBI NO: 15218377 NR Description: cinnamoyl-CoA reductase, putative [Arabidopsis
  misc_feature (1)..(235): Homolog of NCBI NO: 12034897 NR Description: cinnamoyl CoA reductase isoform 1 [Arabidopsis
  misc_feature (1)..(238): Homolog of NCBI NO: 9998901 NR Description: cinnamoyl-CoA reductase [Populus balsamifera
  misc_feature (1)..(238): Homolog of NCBI NO: 2960364 NR Description: cinnamoyl CoA reductase [Populus balsamifera
  misc_feature (1)..(238): Homolog of NCBI NO: 7239228 NR Description: cinnamoyl CoA reductase; CCR [Populus tremuloides]
  misc_feature (1)..(232): Homolog of NCBI NO: 25140434 NR Description: cinnamoyl CoA reductase [Solanum tuberosum]
  misc_feature (1)..(238): Homolog of NCBI NO: 31414896 NR Description: cinnamoyl CoA reductase [Fragaria x ananassa]
MLEPAVNGAKFVIDAAAKAKVKRVVFTSSIGAVYMNPNRDTQAIVDENCWSDLDFCKNTKNWYCYGKMLAEQSAWETAKAKGVDLVVLNPVLVLGPPLQSAINASLVHILKYLTGSAKTYANLTQVYVDVRDVALGHVLVYEAPSASGRYILAETALHRGEVVEILAKFFPEYPLPTKCSDEKNPRAKPYKFTTQKIKDLGLEFKPIKQSLYESVKSLQEKGHLPLPQDSNQNEVIIES

SEQ ID NO: 105558 - DNA, 1189 bp, Arabidopsis thaliana
  misc_feature (1)..(1189): Ceres Seq. ID no. 13617483
  misc_feature: MA Experiment ID: 108434 Result: Down-regulated in Transcription
  misc_feature: MA Experiment 108434 PARAMETER Experiment Name: At_Root_Tips_cDNA_P Parameter: Tissue Value: Root Tips
  misc_feature: MA Experiment ID: 108463 Result: Up-regulated in Transcription
  misc_feature: MA Experiment 108463 PARAMETER Experiment Name: At_Germinating_Seeds_cDNA_P Parameter: Age (day) Value: 3 vs. 0
  misc_feature: MA Experiment 108463 PARAMETER Experiment Name: At_Germinating_Seeds_cDNA_P Parameter: Tissue Value: Germinating Seeds
  misc_feature: MA Experiment ID: 108469 Result: Up-regulated in Transcription
  misc_feature: MA Experiment ID: 108488 Result: Down-regulated in Transcription
  misc_feature: MA Experiment ID: 108501 Result: Down-regulated in Transcription
  misc_feature: MA Experiment 108501 PARAMETER Experiment Name: At_ap2_floral_buds_cDNA_P Parameter: Plant Line Value: ap2 (Ler.)
  misc_feature: MA Experiment 108501 PARAMETER Experiment Name: At_ap2_floral_buds_cDNA_P Parameter: Tissue Value: Closed Flower
  misc_feature: MA Experiment ID: 108574 Result: Up-regulated in Transcription
  misc_feature: MA Experiment 108574 PARAMETER Experiment Name: At_Wounding__cDNA_P Parameter: Timepoint (hr) Value: 1
  misc_feature: MA Experiment 108574 PARAMETER Experiment Name: At_Wounding__cDNA_P Parameter: Tissue Value: Aerial
  misc_feature: MA Experiment 108574 PARAMETER Experiment Name: At_Wounding__cDNA_P Parameter: Treatment Value: Wounding vs. No Wounding
  misc_feature: MA Experiment ID: 108579 Result: Up-regulated in Transcription
  misc_feature: MA Experiment 108579 PARAMETER Experiment Name: At_4deg_Cold_cDNA_P Parameter: Temperature (deg C) Value: 4 vs. 22
  misc_feature: MA Experiment 108579 PARAMETER Experiment Name: At_4deg_Cold_cDNA_P Parameter: Timepoint (hr) Value: 6
  misc_feature: MA Experiment 108579 PARAMETER Experiment Name: At_4deg_Cold_cDNA_P Parameter: Tissue Value: Aerial
  misc_feature: MA Experiment ID: 108585 Result: Up-regulated in Transcription
  misc_feature: MA Experiment 108585 PARAMETER Experiment Name: At_5mM_NaNP_cDNA_P Parameter: Timepoint (hr) Value: 6
  misc_feature: MA Experiment 108585 PARAMETER Experiment Name: At_5mM_NaNP_cDNA_P Parameter: Tissue Value: Aerial
  misc_feature: MA Experiment 108585 PARAMETER Experiment Name: At_5mM_NaNP_cDNA_P Parameter: Treatment Value: null
  misc_feature: MA Experiment ID: 108594 Result: Up-regulated in Transcription
  misc_feature: MA Experiment 108594 PARAMETER Experiment Name: At_Ler-rhl_Root_cDNA_P Parameter: Plant Line Value: null
  misc_feature: MA Experiment ID: 108595 Result: Up-regulated in Transcription
  misc_feature: MA Experiment 108595 PARAMETER Experiment Name: At_Ler-pi_Ovule_cDNA_P Parameter: Plant Line Value: null
  misc_feature: MA Experiment ID: 108667 Result: Up-regulated in Transcription
  misc_feature: MA Experiment 108667 PARAMETER Experiment Name: At_2mM_SA_cDNA_P Parameter: Plant Line Value: WS
  misc_feature: MA Experiment 108667 PARAMETER Experiment Name: At_2mM_SA_cDNA_P Parameter: Timepoint (hr) Value: 1
  misc_feature: MA Experiment 108667 PARAMETER Experiment Name: At_2mM_SA_cDNA_P Parameter: Treatment Value: 2mM SA vs. No Treatment
  misc_feature: MA Experiment ID: 20000069 Result: Up-regulated in Transcription
  misc_feature: MA Experiment 20000069 PARAMETER Experiment Name: At_100uM_ABA_Mutants_cDNA_P Parameter: Plant Line Value: CS23
  misc_feature: MA Experiment 20000069 PARAMETER Experiment Name: At_100uM_ABA_Mutants_cDNA_P Parameter: Timepoint (hr) Value: 6
  misc_feature: MA Experiment 20000069 PARAMETER Experiment Name: At_100uM_ABA_Mutants_cDNA_P Parameter: Tissue Value: Aerial
  misc_feature: MA Experiment 20000069 PARAMETER Experiment Name: At_100uM_ABA_Mutants_cDNA_P Parameter: Treatment Value: 100uM ABA vs. No Treatment
  misc_feature: MA Experiment ID: 20000090 Result: Up-regulated in Transcription
  misc_feature: MA Experiment ID: 20000111 Result: Down-regulated in Transcription
  misc_feature: MA Experiment 20000111 PARAMETER Experiment Name: At_42deg_Heat_cDNA_P Parameter: Temperature (deg C) Value: 42 vs. 22
  misc_feature: MA Experiment 20000111 PARAMETER Experiment Name: At_42deg_Heat_cDNA_P Parameter: Timepoint (hr) Value: 6
  misc_feature: MA Experiment 20000111 PARAMETER Experiment Name: At_42deg_Heat_cDNA_P Parameter: Tissue Value: Aerial
  misc_feature: MA Experiment ID: 20000144 Result: Down-regulated in Transcription
  misc_feature: MA Experiment 20000144 PARAMETER Experiment Name: At_42deg_Heat_cDNA_P Parameter: Temperature (deg C) Value: 42 vs. 22
  misc_feature: MA Experiment 20000144 PARAMETER Experiment Name: At_42deg_Heat_cDNA_P Parameter: Timepoint (hr) Value: 1
  misc_feature: MA Experiment 20000144 PARAMETER Experiment Name: At_42deg_Heat_cDNA_P Parameter: Tissue Value: Aerial
  misc_feature: MA Experiment ID: 20000224 Result: Up-regulated in Transcription
acaatcccaccattaaaaaagaagaacccaagatcgactcttacttcgaatctctctcaactttcttcctcagcttacgggaacttccacacatatacatccacaagaacccatatcgaagattcatcctacatatatttacatggatcagtactcatcctctttggtcgatacttcattagatctcactattggcgttactcgtatgcgagttgaagaagatccaccgacaagtgctttggtggaagaattaaaccgagttagtgctgagaacaagaagctctcggagatgctaactttgatgtgtgacaactacaacgtcttgaggaagcaacttatggaatatgttaacaagagcaacataaccgagagggatcaaatcagccctcccaagaaacgcaaatccccggcgagagaggacgcattcagctgcgcggttattggcggagtgtcggagagtagctcaacggatcaagatgagtatttgtgtaagaagcagagagaagagactgtcgtgaaggagaaagtctcaagggtctattacaagaccgaagcttctgacactaccctcgttgtgaaagatgggtatcaatggaggaaatatggacagaaagtgactagagacaatccatctccaagagcttacttcaaatgtgcttgtgctccaagctgttctgtcaaaaagaaggttcagagaagtgtggaggatcagtccgtgttagttgcaacttatgagggtgaacacaaccatccaatgccatcgcagatcgattcaaacaatggcttaaaccgccacatctctcatggtggttcagcttcaacacccgttgcagcaaacagaagaagtagcttgactgtgccggtgactaccgtagatatgattgaatcgaagaaagtgacgagcccaacgtcaagaatcgattttccccaagttcagaaacttttggtggagcaaatggcttcttccttaaccaaagatcctaactttacagcagctttagcagcagctgttaccggaaaattgtatcaacagaatcataccgagaaatagtttagcttcaaattccgttagagtttttagatttgaatttgtcatgagtaagagaaagagagtagattataatccattgtgatactgaaaatgtaacatgtaatcgtttttcatacaatctccaatacattcggcttt

SEQ ID NO: 105559 - protein, 302 aa, Arabidopsis thaliana; identical to SEQ ID NO: 27413
  peptide (1)..(302): Ceres Seq. ID no. 13617484
  misc_feature (145)..(205): Pfam Name: WRKY DNA -binding domain Pfam Description: WRKY DNA -binding domain
  misc_feature (1)..(302): Homolog of NCBI NO: 15220859 NR Description: WRKY family transcription factor [Arabidopsis >gi|20978791|sp|Q9SAH7|WR40_ARATH Probable WRKY transcription
  misc_feature (1)..(302): Homolog of NCBI NO: 21594015 NR Description: transcription factor, putative [Arabidopsis
  misc_feature (1)..(302): Homolog of NCBI NO: 40060529 NR Description: putative WRKY4 transcription factor [Vitis
  misc_feature (21)..(298): Homolog of NCBI NO: 11493822 NR Description: transcription factor WRKY4 [Petroselinum crispum]
  misc_feature (18)..(252): Homolog of NCBI NO: 6472585 NR Description: WIZZ [Nicotiana tabacum]
  misc_feature (249)..(299): Homolog of NCBI NO: 6472585 NR Description: WIZZ [Nicotiana tabacum]
  misc_feature (30)..(257): Homolog of NCBI NO: 40645752 NR Description: WRKY transcription factor 1 [Spinacia oleracea]
  misc_feature (262)..(301): Homolog of NCBI NO: 40645752 NR Description: WRKY transcription factor 1 [Spinacia oleracea]
  misc_feature (21)..(226): Homolog of NCBI NO: 18417877 NR Description: WRKY family transcription factor [Arabidopsis
  misc_feature (214)..(300): Homolog of NCBI NO: 18417877 NR Description: WRKY family transcription factor [Arabidopsis

SEQ ID NO: 105560 - protein, 281 aa, Arabidopsis thaliana; identical to SEQ ID NO: 27414
  peptide (1)..(281): Ceres Seq. ID no. 13617485
  misc_feature (124)..(184): Pfam Name: WRKY DNA -binding domain Pfam Description: WRKY DNA -binding domain
  misc_feature (1)..(281): Homolog of NCBI NO: 15220859 NR Description: WRKY family transcription factor [Arabidopsis >gi|20978791|sp|Q9SAH7|WR40_ARATH Probable WRKY transcription
  misc_feature (1)..(281): Homolog of NCBI NO: 21594015 NR Description: transcription factor, putative [Arabidopsis
  misc_feature (1)..(281): Homolog of NCBI NO: 40060529 NR Description: putative WRKY4 transcription factor [Vitis
  misc_feature (1)..(277): Homolog of NCBI NO: 11493822 NR Description: transcription factor WRKY4 [Petroselinum crispum]
  misc_feature (1)..(231): Homolog of NCBI NO: 6472585 NR Description: WIZZ [Nicotiana tabacum]
  misc_feature (228)..(278): Homolog of NCBI NO: 6472585 NR Description: WIZZ [Nicotiana tabacum]
  misc_feature (9)..(236): Homolog of NCBI NO: 40645752 NR Description: WRKY transcription factor 1 [Spinacia oleracea]
  misc_feature (241)..(280): Homolog of NCBI NO: 40645752 NR Description: WRKY transcription factor 1 [Spinacia oleracea]
  misc_feature (1)..(205): Homolog of NCBI NO: 18417877 NR Description: WRKY family transcription factor [Arabidopsis
  misc_feature (193)..(279): Homolog of NCBI NO: 18417877 NR Description: WRKY family transcription factor [Arabidopsis

SEQ ID NO: 105561 - protein, 253 aa, Arabidopsis thaliana; identical to SEQ ID NO: 27415
  peptide (1)..(253): Ceres Seq. ID no. 13617486
  misc_feature (96)..(156): Pfam Name: WRKY DNA -binding domain Pfam Description: WRKY DNA -binding domain
  misc_feature (1)..(253): Homolog of NCBI NO: 15220859 NR Description: WRKY family transcription factor [Arabidopsis >gi|20978791|sp|Q9SAH7|WR40_ARATH Probable WRKY transcription
  misc_feature (1)..(253): Homolog of NCBI NO: 21594015 NR Description: transcription factor, putative [Arabidopsis
  misc_feature (1)..(253): Homolog of NCBI NO: 40060529 NR Description: putative WRKY4 transcription factor [Vitis
  misc_feature (1)..(249): Homolog of NCBI NO: 11493822 NR Description: transcription factor WRKY4 [Petroselinum crispum]
  misc_feature (1)..(203): Homolog of NCBI NO: 6472585 NR Description: WIZZ [Nicotiana tabacum]
  misc_feature (200)..(250): Homolog of NCBI NO: 6472585 NR Description: WIZZ [Nicotiana tabacum]
  misc_feature (1)..(208): Homolog of NCBI NO: 40645752 NR Description: WRKY transcription factor 1 [Spinacia oleracea]
  misc_feature (213)..(252): Homolog of NCBI NO: 40645752 NR Description: WRKY transcription factor 1 [Spinacia oleracea]
  misc_feature (1)..(177): Homolog of NCBI NO: 18417877 NR Description: WRKY family transcription factor [Arabidopsis
  misc_feature (165)..(251): Homolog of NCBI NO: 18417877 NR Description: WRKY family transcription factor [Arabidopsis

SEQ ID NO: 105562 - DNA, 681 bp, Arabidopsis thaliana
  misc_feature (1)..(681): Ceres Seq. ID no. 13617487
  misc_feature: MA Experiment ID: 108434 Result: Up-regulated in Transcription
  misc_feature: MA Experiment 108434 PARAMETER Experiment Name: At_Root_Tips_cDNA_P Parameter: Tissue Value: Root Tips
  misc_feature: MA Experiment ID: 108579 Result: Down-regulated in Transcription
  misc_feature: MA Experiment 108579 PARAMETER Experiment Name: At_4deg_Cold_cDNA_P Parameter: Temperature (deg C) Value: 4 vs. 22
  misc_feature: MA Experiment 108579 PARAMETER Experiment Name: At_4deg_Cold_cDNA_P Parameter: Timepoint (hr) Value: 6
  misc_feature: MA Experiment 108579 PARAMETER Experiment Name: At_4deg_Cold_cDNA_P Parameter: Tissue Value: Aerial
agaaaaaaagaaagcgaaatgggattattggccgcgatcggagttctgttgccatttccgttctactggtggctgtggacgaatgctcagtcatgggtcaatctctgcggccgagaaagagacccatcgacggtaatggcacgtgtttctcacgtgctcaaggctgctcaactcctttctctcttctccgttgcttctctctcctggccgcctccgctctacttctggcctctcatggcctttggccagtttctcaacttcagggtataccaattgttaggtgaagctgggacttattacggtgttcgattcgggaagaacataccatgggttacagagttcccatttggagtcattagagatccacagtatgttgggagtatcatgtctctattggcatgcctctcttgggttccatttcaatacattctcctctggtctctcggttatgttttcatgatgtttctcgagtcaaaggaggatccaaatgctcgtgccaaatccatctcatgattcctaagcataacccactagtcttagaagagctcaactcccatgaacgtcaggtcttgactgttttctttatgagtttgtattctcttttgtactcaaactgatgctacactttcatggataatgcagttaccttttctcgggttatcggtagtctacagaattgtc

SEQ ID NO: 105563 - protein, 170 aa, Arabidopsis thaliana
  peptide (1)..(170): Ceres Seq. ID no. 13617488
  misc_feature (7)..(170): Homolog of NCBI NO: 18412906 NR Description: expressed protein [Arabidopsis thaliana]
  misc_feature (7)..(170): Homolog of NCBI NO: 21593732 NR Description: unknown [Arabidopsis thaliana]
  misc_feature (46)..(170): Homolog of NCBI NO: 30699543 NR Description: expressed protein [Arabidopsis thaliana]
RKKESEMGLLAAIGVLLPFPFYWWLWTNAQSWVNLCGRERDPSTVMARVSHVLKAAQLLSLFSVASLSWPPPLYFWPLMAFGQFLNFRVYQLLGEAGTYYGVRFGKNIPWVTEFPFGVIRDPQYVGSIMSLLACLSWVPFQYILLWSLGYVFMMFLESKEDPNARAKSIS

SEQ ID NO: 105564 - protein, 164 aa, Arabidopsis thaliana
  peptide (1)..(164): Ceres Seq. ID no. 13617489
  misc_feature (1)..(164): Homolog of NCBI NO: 18412906 NR Description: expressed protein [Arabidopsis thaliana]
  misc_feature (1)..(164): Homolog of NCBI NO: 21593732 NR Description: unknown [Arabidopsis thaliana]
  misc_feature (40)..(164): Homolog of NCBI NO: 30699543 NR Description: expressed protein [Arabidopsis thaliana]
MGLLAAIGVLLPFPFYWWLWTNAQSWVNLCGRERDPSTVMARVSHVLKAAQLLSLFSVASLSWPPPLYFWPLMAFGQFLNFRVYQLLGEAGTYYGVRFGKNIPWVTEFPFGVIRDPQYVGSIMSLLACLSWVPFQYILLWSLGYVFMMFLESKEDPNARAKSIS

SEQ ID NO: 105565 - protein, 125 aa, Arabidopsis thaliana
  peptide (1)..(125): Ceres Seq. ID no. 13617490
  misc_feature (1)..(125): Homolog of NCBI NO: 18412906 NR Description: expressed protein [Arabidopsis thaliana]
  misc_feature (1)..(125): Homolog of NCBI NO: 21593732 NR Description: unknown [Arabidopsis thaliana]
  misc_feature (1)..(125): Homolog of NCBI NO: 30699543 NR Description: expressed protein [Arabidopsis thaliana]
MARVSHVLKAAQLLSLFSVASLSWPPPLYFWPLMAFGQFLNFRVYQLLGEAGTYYGVRFGKNIPWVTEFPFGVIRDPQYVGSIMSLLACLSWVPFQYILLWSLGYVFMMFLESKEDPNARAKSIS

SEQ ID NO: 105566 - DNA, 1614 bp, Arabidopsis thaliana
  misc_feature (1)..(1614): Ceres Seq. ID no. 13617491
  misc_feature: MA Experiment ID: 108579 Result: Down-regulated in Transcription
  misc_feature: MA Experiment 108579 PARAMETER Experiment Name: At_4deg_Cold_cDNA_P Parameter: Temperature (deg C) Value: 4 vs. 22
  misc_feature: MA Experiment 108579 PARAMETER Experiment Name: At_4deg_Cold_cDNA_P Parameter: Timepoint (hr) Value: 6
  misc_feature: MA Experiment 108579 PARAMETER Experiment Name: At_4deg_Cold_cDNA_P Parameter: Tissue Value: Aerial
  misc_feature: MA Experiment ID: 20000264 Result: Up-regulated in Transcription
  misc_feature: MA Experiment 20000264 PARAMETER Experiment Name: At_Open_Flower_P Parameter: Age (day) Value: 21
  misc_feature: MA Experiment 20000264 PARAMETER Experiment Name: At_Open_Flower_P Parameter: Plant Line Value: WS
  misc_feature: MA Experiment 20000264 PARAMETER Experiment Name: At_Open_Flower_P Parameter: Tissue Value: Open Flower vs. Whole Plant
  misc_feature: MA Experiment ID: 20000265 Result: Up-regulated in Transcription
  misc_feature: MA Experiment 20000265 PARAMETER Experiment Name: At_Open_Flower_P Parameter: Age (day) Value: 21
  misc_feature: MA Experiment 20000265 PARAMETER Experiment Name: At_Open_Flower_P Parameter: Plant Line Value: WS
  misc_feature: MA Experiment 20000265 PARAMETER Experiment Name: At_Open_Flower_P Parameter: Tissue Value: Closed Flower vs. Whole Plant
  misc_feature: MA Experiment ID: 20000286 Result: Up-regulated in Transcription
  misc_feature: MA Experiment 20000286 PARAMETER Experiment Name: At_Open_Flower_P Parameter: Age (day) Value: 21
  misc_feature: MA Experiment 20000286 PARAMETER Experiment Name: At_Open_Flower_P Parameter: Plant Line Value: WS
  misc_feature: MA Experiment 20000286 PARAMETER Experiment Name: At_Open_Flower_P Parameter: Tissue Value: Half Open vs. Whole Plant
  misc_feature: MA Experiment ID: 20000794 Result: Up-regulated in Transcription
  misc_feature: MA Experiment 20000794 PARAMETER Experiment Name: At_Petals_P Parameter: Age (day) Value: 23-25 days
  misc_feature: MA Experiment 20000794 PARAMETER Experiment Name: At_Petals_P Parameter: Plant Line Value: WS
  misc_feature: MA Experiment 20000794 PARAMETER Experiment Name: At_Petals_P Parameter: Tissue Value: Petals vs. Whole plant
  misc_feature: MA Experiment ID: 20001757 Result: Down-regulated in Transcription
  misc_feature: MA Experiment 20001757 PARAMETER Experiment Name: At_50mM_NH4NO3_L-to-H_P Parameter: Timepoint (hr) Value: 6
  misc_feature: MA Experiment 20001757 PARAMETER Experiment Name: At_50mM_NH4NO3_L-to-H_P Parameter: Tissue Value: Leaf
  misc_feature: MA Experiment 20001757 PARAMETER Experiment Name: At_50mM_NH4NO3_L-to-H_P Parameter: Treatment Value: 50mM NH4NO3 vs 100mM Mannitol
aacttttgcttcttcttcgcattcactcaaaccaaactagaagacggaatccggccaagtcacttccgcaatcctttcgaatttagattttagggttactttgtcggagattgttaatttggagtatctggagattggcaacaatgtctgaactcaaagagcgtttgcttcctccaagacctgcttcggctattaaccttagaggtgatgcaggctctcgtccttctccttcagggagacaaccactccttggagttgatgttttgggtctcaagaagcgtggacaaggccttaagtcgtggattcgtgttgatacttctgccaattctcaggtcattgaggttgataagttcactatgatgcgtagatgtgatttaccagcacgggatttaaggctgcttgatcctttgtttgtgtatccgtcaactattcttggtagagagaaggctattgttgttaacttagagcagatccgttgtattattactgcggatgaggttttgctcttgaattcccttgacaactatgtgcttcgctatgttgttgagctgcagcagagactaaaggcaagttctgttactgaggtttggaatcaggacagtctcgaattgagcaggaggaggagtaggagtttagacaatgtgcttcagaactcatcccctgattatttacctttcgagttcagggctcttgaagttgcacttgaagctgcttgtaccttccttgattcccaggcttcagagttagagattgaggcatacccattattggatgagcttacctcaaagatcagtactctaaacttggagcgtgctcgtagactaaagagcagacttgtagcattgacgagacgagttcagaaggttcgggatgagattgaacagctaatggacgatgatggggatatggcagaaatgtatctaacagagaagaagaagagaatggaaggatctttatatggtgatcaatctttacctgtttatcgaacaaatgattgtttttctctgtctgcgccagtttctcctgtttcttctcctcctgagtcccgtagacttgagaaaagcttgagcattgtaaggagccggcatgacagtgctaggagctcagaagacgcaaccgagaatatagaggagctagagatgttgctggaagcatactttgttgtcattgacagcactctcaacaagctaacctcgttaaaggagtacatcgatgataccgaagatttcatcaacattcaattggataacgtacggaatcagctgatccaattcgagctgctgctaactactgccacattcgttgtagccatcttcggggttgtagccgggatctttgggatgaattttgagatagacttctttgaaaagcctggtgctttcaaatgggttttagccattactggagtgtgtggccttgttgtatttttggcattcctctggtactacaaacgtagaagactcatgcctctgtgaagacataactaccctgacacgtagacgattgttttactgtttatgttgcttaaatctatacattaatcgcctgtgacctttacaagataaaaccccgtgtattttttttttgggttactgaaagattattaagcaaacc

SEQ ID NO: 105567 - protein, 443 aa, Arabidopsis thaliana
  peptide (1)..(443): Ceres Seq. ID no. 13617492
  misc_feature (1)..(443): Homolog of NCBI NO: 18412911 NR Description: expressed protein [Arabidopsis thaliana]
  misc_feature (1)..(443): Homolog of NCBI NO: 21553824 NR Description: unknown [Arabidopsis thaliana]
  misc_feature (1)..(443): Homolog of NCBI NO: 18394312 NR Description: expressed protein [Arabidopsis thaliana]
  misc_feature (155)..(443): Homolog of NCBI NO: 38345033 NR Description: OSJNBa0029H02.17 [Oryza sativa (japonica
  misc_feature (5)..(140): Homolog of NCBI NO: 38345033 NR Description: OSJNBa0029H02.17 [Oryza sativa (japonica
  misc_feature (19)..(441): Homolog of NCBI NO: 18411070 NR Description: expressed protein [Arabidopsis thaliana] AT3g58970/F17J16_20 [Arabidopsis thaliana]
  misc_feature (94)..(443): Homolog of NCBI NO: 15227679 NR Description: MRS2-5 protein [Arabidopsis thaliana]
  misc_feature (94)..(443): Homolog of NCBI NO: 25360882 NR Description: MRS2-5 [Arabidopsis thaliana]
  misc_feature (12)..(441): Homolog of NCBI NO: 11282358 NR Description: hypothetical protein F17J16.20 - Arabidopsis >gi|7529740|emb|CAB86925.1| putative protein [Arabidopsis
  misc_feature (40)..(410): Homolog of NCBI NO: 34908640 NR Description: P0677H08.20 [Oryza sativa (japonica
MSELKERLLPPRPASAINLRGDAGSRPSPSGRQPLLGVDVLGLKKRGQGLKSWIRVDTSANSQVIEVDKFTMMRRCDLPARDLRLLDPLFVYPSTILGREKAIVVNLEQIRCIITADEVLLLNSLDNYVLRYVVELQQRLKASSVTEVWNQDSLELSRRRSRSLDNVLQNSSPDYLPFEFRALEVALEAACTFLDSQASELEIEAYPLLDELTSKISTLNLERARRLKSRLVALTRRVQKVRDEIEQLMDDDGDMAEMYLTEKKKRMEGSLYGDQSLPVYRTNDCFSLSAPVSPVSSPPESRRLEKSLSIVRSRHDSARSSEDATENIEELEMLLEAYFVVIDSTLNKLTSLKEYIDDTEDFINIQLDNVRNQLIQFELLLTTATFVVAIFGVVAGIFGMNFEIDFFEKPGAFKWVLAITGVCGLVVFLAFLWYYKRRRLMPL

SEQ ID NO: 105568 - protein, 372 aa, Arabidopsis thaliana
  peptide (1)..(372): Ceres Seq. ID no. 13617493
  misc_feature (1)..(372): Homolog of NCBI NO: 18412911 NR Description: expressed protein [Arabidopsis thaliana]
  misc_feature (1)..(372): Homolog of NCBI NO: 21553824 NR Description: unknown [Arabidopsis thaliana]
  misc_feature (1)..(372): Homolog of NCBI NO: 18394312 NR Description: expressed protein [Arabidopsis thaliana]
  misc_feature (84)..(372): Homolog of NCBI NO: 38345033 NR Description: OSJNBa0029H02.17 [Oryza sativa (japonica
  misc_feature (1)..(69): Homolog of NCBI NO: 38345033 NR Description: OSJNBa0029H02.17 [Oryza sativa (japonica
  misc_feature (1)..(370): Homolog of NCBI NO: 18411070 NR Description: expressed protein [Arabidopsis thaliana] AT3g58970/F17J16_20 [Arabidopsis thaliana]
  misc_feature (23)..(372): Homolog of NCBI NO: 15227679 NR Description: MRS2-5 protein [Arabidopsis thaliana]
  misc_feature (23)..(372): Homolog of NCBI NO: 25360882 NR Description: MRS2-5 [Arabidopsis thaliana]
  misc_feature (1)..(370): Homolog of NCBI NO: 11282358 NR Description: hypothetical protein F17J16.20 - Arabidopsis >gi|7529740|emb|CAB86925.1| putative protein [Arabidopsis
  misc_feature (1)..(339): Homolog of NCBI NO: 34908640 NR Description: P0677H08.20 [Oryza sativa (japonica
MMRRCDLPARDLRLLDPLFVYPSTILGREKAIVVNLEQIRCIITADEVLLLNSLDNYVLRYVVELQQRLKASSVTEVWNQDSLELSRRRSRSLDNVLQNSSPDYLPFEFRALEVALEAACTFLDSQASELEIEAYPLLDELTSKISTLNLERARRLKSRLVALTRRVQKVRDEIEQLMDDDGDMAEMYLTEKKKRMEGSLYGDQSLPVYRTNDCFSLSAPVSPVSSPPESRRLEKSLSIVRSRHDSARSSEDATENIEELEMLLEAYFVVIDSTLNKLTSLKEYIDDTEDFINIQLDNVRNQLIQFELLLTTATFVVAIFGVVAGIFGMNFEIDFFEKPGAFKWVLAITGVCGLVVFLAFLWYYKRRRLMPL

SEQ ID NO: 105569 - protein, 371 aa, Arabidopsis thaliana
  peptide (1)..(371): Ceres Seq. ID no. 13617494
  misc_feature (1)..(371): Homolog of NCBI NO: 18412911 NR Description: expressed protein [Arabidopsis thaliana]
  misc_feature (1)..(371): Homolog of NCBI NO: 21553824 NR Description: unknown [Arabidopsis thaliana]
  misc_feature (1)..(371): Homolog of NCBI NO: 18394312 NR Description: expressed protein [Arabidopsis thaliana]
  misc_feature (83)..(371): Homolog of NCBI NO: 38345033 NR Description: OSJNBa0029H02.17 [Oryza sativa (japonica
  misc_feature (1)..(68): Homolog of NCBI NO: 38345033 NR Description: OSJNBa0029H02.17 [Oryza sativa (japonica
  misc_feature (1)..(369): Homolog of NCBI NO: 18411070 NR Description: expressed protein [Arabidopsis thaliana] AT3g58970/F17J16_20 [Arabidopsis thaliana]
  misc_feature (22)..(371): Homolog of NCBI NO: 15227679 NR Description: MRS2-5 protein [Arabidopsis thaliana]
  misc_feature (22)..(371): Homolog of NCBI NO: 25360882 NR Description: MRS2-5 [Arabidopsis thaliana]
  misc_feature (1)..(369): Homolog of NCBI NO: 11282358 NR Description: hypothetical protein F17J16.20 - Arabidopsis >gi|7529740|emb|CAB86925.1| putative protein [Arabidopsis
  misc_feature (1)..(338): Homolog of NCBI NO: 34908640 NR Description: P0677H08.20 [Oryza sativa (japonica
MRRCDLPARDLRLLDPLFVYPSTILGREKAIVVNLEQIRCIITADEVLLLNSLDNYVLRYVVELQQRLKASSVTEVWNQDSLELSRRRSRSLDNVLQNSSPDYLPFEFRALEVALEAACTFLDSQASELEIEAYPLLDELTSKISTLNLERARRLKSRLVALTRRVQKVRDEIEQLMDDDGDMAEMYLTEKKKRMEGSLYGDQSLPVYRTNDCFSLSAPVSPVSSPPESRRLEKSLSIVRSRHDSARSSEDATENIEELEMLLEAYFVVIDSTLNKLTSLKEYIDDTEDFINIQLDNVRNQLIQFELLLTTATFVVAIFGVVAGIFGMNFEIDFFEKPGAFKWVLAITGVCGLVVFLAFLWYYKRRRLMPL

SEQ ID NO: 105570 - DNA, 1467 bp, Arabidopsis thaliana
  misc_feature (1)..(1467): Ceres Seq. ID no. 13617495
  misc_feature: MA Experiment ID: 20000315 Result: Down-regulated in Transcription
  misc_feature: MA Experiment 20000315 PARAMETER Experiment Name: At_14day_Shoots-Roots_Sub_P Parameter: Age (day) Value: 14
  misc_feature: MA Experiment 20000315 PARAMETER Experiment Name: At_14day_Shoots-Roots_Sub_P Parameter: Organism Value: A. thaliana
  misc_feature: MA Experiment 20000315 PARAMETER Experiment Name: At_14day_Shoots-Roots_Sub_P Parameter: Plant Line Value: WS
  misc_feature: MA Experiment 20000315 PARAMETER Experiment Name: At_14day_Shoots-Roots_Sub_P Parameter: Tissue Value: Shoots vs. Whole Plant
  misc_feature: MA Experiment ID: 20000328 Result: Down-regulated in Transcription
  misc_feature: MA Experiment 20000328 PARAMETER Experiment Name: At_42deg_Heat_Sub_P Parameter: Age (day) Value: 14
  misc_feature: MA Experiment 20000328 PARAMETER Experiment Name: At_42deg_Heat_Sub_P Parameter: Organism Value: A. thaliana
  misc_feature: MA Experiment 20000328 PARAMETER Experiment Name: At_42deg_Heat_Sub_P Parameter: Plant Line Value: WS
  misc_feature: MA Experiment 20000328 PARAMETER Experiment Name: At_42deg_Heat_Sub_P Parameter: Temperature (deg C) Value: 42 vs. 22
  misc_feature: MA Experiment 20000328 PARAMETER Experiment Name: At_42deg_Heat_Sub_P Parameter: Timepoint (hr) Value: 6
  misc_feature: MA Experiment 20000328 PARAMETER Experiment Name: At_42deg_Heat_Sub_P Parameter: Tissue Value: Aerial
atgggaatggcgtccatgagctctggtactgaaagccttcgtctttgcgtgtttgacttaagaagaggccaacacgaaggacaggaactggacaagatcttgttcttctatcctcctgatctaaccttctccactcagctatcggttataggtctcagtgaagggcttatcacgttcacgagacttttctccccggaggcagcttgtgaggtaattgaagcagagagacattcccatgttttctatgaggccgagcccgatatctggatggtcatgattgtagagaaaaataaggagattgaagctgtatggaggattgatgcattgcggagagtgcttaaggaagtgcactctctctttgttatgtttcaagggtcaattagggcattgcttgagaaagaaccaactggaggacttgtaagatcgcacttgtatccattcatcacagactatttaaatgatcttttcgttgggaaaaaacaacagttaccttccttccgtgacactttgaaagagcgtggaacagttcagatgctaactttagctagagatgcggcacttgaagttcagtctctcgtcggagtgctagattcatgtgctgggaccgttcgatgccactctgtgattctatttcatgatctactggtgtcaacaactctctcacctgatgataccgtcgacttgtttgcattttctgtcatgagattaaccacaaacgcgctatcatctggcacaagttcctggtcatatctacgcaaaggatccggttcacctcaaatatcttctagatctactacggtgccccctcttggttcaggtggtacattgccttcgggaaatggtagtagcacaggtcgtgttattagacctttgcagcacgataagtggtcgaaggggaaagatgggtttcttgtaactgatatttggggtttagatgccaccccgacaattttgatacagaagacacaggaaagtttttaccttttgacttatcagtacaagagtctcaccttggttcttctcgtgcctatcgctgcaattgttaatggagagctagacatctcattcgtgaagcagcaagttattgaaaacgcatcgaccaaaatcttgaaagtcgaagagaagctatcgaaagggtggggcggtgagaatgcttaccatgtaagcggttaccgttacttactagttgataatgacatggaagtttccagagcttctccaccaggaaaggtagcaacactagcaaaggagtctttgcttgcactaaacaagctaagggaagaagtggatacagaaaaaaaccgctcgaagcaagagaaagacatggaaatatgcattcgagcgaagaacaacacatgggtcatcgcgcgtctaaacagaggtaaagagctttacatggctttagagaaagcaagtgaaactcttcttgatgctacagactctgtccaaagattcagcaacaggtaa

SEQ ID NO: 105571 - protein, 488 aa, Arabidopsis thaliana
  peptide (1)..(488): Ceres Seq. ID no. 13617496
  misc_feature (1)..(488): Homolog of NCBI NO: 15220866 NR Description: myrosinase precursor -related [Arabidopsis
  misc_feature (1)..(488): Homolog of NCBI NO: 25372816 NR Description: F23A5.27 [imported] - Arabidopsis thaliana
  misc_feature (3)..(488): Homolog of NCBI NO: 30684673 NR Description: expressed protein [Arabidopsis thaliana]
  misc_feature (1)..(488): Homolog of NCBI NO: 38175489 NR Description: putative myrosinase precursor [Oryza sativa
  misc_feature (234)..(488): Homolog of NCBI NO: 14517360 NR Description: At1g80910/F23A5_21 [Arabidopsis thaliana]
  misc_feature (125)..(488): Homolog of NCBI NO: 18394314 NR Description: expressed protein [Arabidopsis thaliana]
  misc_feature (125)..(488): Homolog of NCBI NO: 21618002 NR Description: unknown [Arabidopsis thaliana]
  misc_feature (3)..(312): Homolog of NCBI NO: 18394314 NR Description: expressed protein [Arabidopsis thaliana]
  misc_feature (3)..(312): Homolog of NCBI NO: 21618002 NR Description: unknown [Arabidopsis thaliana]
  misc_feature (192)..(488): Homolog of NCBI NO: 18266049 NR Description: myrosinase precursor [Brassica oleracea]
MGMASMSSGTESLRLCVFDLRRGQHEGQELDKILFFYPPDLTFSTQLSVIGLSEGLITFTRLFSPEAACEVIEAERHSHVFYEAEPDIWMVMIVEKNKEIEAVWRIDALRRVLKEVHSLFVMFQGSIRALLEKEPTGGLVRSHLYPFITDYLNDLFVGKKQQLPSFRDTLKERGTVQMLTLARDAALEVQSLVGVLDSCAGTVRCHSVILFHDLLVSTTLSPDDTVDLFAFSVMRLTTNALSSGTSSWSYLRKGSGSPQISSRSTTVPPLGSGGTLPSGNGSSTGRVIRPLQHDKWSKGKDGFLVTDIWGLDATPTILIQKTQESFYLLTYQYKSLTLVLLVPIAAIVNGELDISFVKQQVIENASTKILKVEEKLSKGWGGENAYHVSGYRYLLVDNDMEVSRASPPGKVATLAKESLLALNKLREEVDTEKNRSKQEKDMEICIRAKNNTWVIARLNRGKELYMALEKASETLLDATDSVQRFSNR

SEQ ID NO: 105572 - protein, 486 aa, Arabidopsis thaliana
  peptide (1)..(486): Ceres Seq. ID no. 13617497
  misc_feature (1)..(486): Homolog of NCBI NO: 15220866 NR Description: myrosinase precursor -related [Arabidopsis
  misc_feature (1)..(486): Homolog of NCBI NO: 25372816 NR Description: F23A5.27 [imported] - Arabidopsis thaliana
  misc_feature (1)..(486): Homolog of NCBI NO: 30684673 NR Description: expressed protein [Arabidopsis thaliana]
  misc_feature (1)..(486): Homolog of NCBI NO: 38175489 NR Description: putative myrosinase precursor [Oryza sativa
  misc_feature (232)..(486): Homolog of NCBI NO: 14517360 NR Description: At1g80910/F23A5_21 [Arabidopsis thaliana]
  misc_feature (123)..(486): Homolog of NCBI NO: 18394314 NR Description: expressed protein [Arabidopsis thaliana]
  misc_feature (123)..(486): Homolog of NCBI NO: 21618002 NR Description: unknown [Arabidopsis thaliana]
  misc_feature (1)..(310): Homolog of NCBI NO: 18394314 NR Description: expressed protein [Arabidopsis thaliana]
  misc_feature (1)..(310): Homolog of NCBI NO: 21618002 NR Description: unknown [Arabidopsis thaliana]
  misc_feature (190)..(486): Homolog of NCBI NO: 18266049 NR Description: myrosinase precursor [Brassica oleracea]
MASMSSGTESLRLCVFDLRRGQHEGQELDKILFFYPPDLTFSTQLSVIGLSEGLITFTRLFSPEAACEVIEAERHSHVFYEAEPDIWMVMIVEKNKEIEAVWRIDALRRVLKEVHSLFVMFQGSIRALLEKEPTGGLVRSHLYPFITDYLNDLFVGKKQQLPSFRDTLKERGTVQMLTLARDAALEVQSLVGVLDSCAGTVRCHSVILFHDLLVSTTLSPDDTVDLFAFSVMRLTTNALSSGTSSWSYLRKGSGSPQISSRSTTVPPLGSGGTLPSGNGSSTGRVIRPLQHDKWSKGKDGFLVTDIWGLDATPTILIQKTQESFYLLTYQYKSLTLVLLVPIAAIVNGELDISFVKQQVIENASTKILKVEEKLSKGWGGENAYHVSGYRYLLVDNDMEVSRASPPGKVATLAKESLLALNKLREEVDTEKNRSKQEKDMEICIRAKNNTWVIARLNRGKELYMALEKASETLLDATDSVQRFSNR

SEQ ID NO: 105573 - protein, 483 aa, Arabidopsis thaliana
  peptide (1)..(483): Ceres Seq. ID no. 13617498
  misc_feature (1)..(483): Homolog of NCBI NO: 15220866 NR Description: myrosinase precursor -related [Arabidopsis
  misc_feature (1)..(483): Homolog of NCBI NO: 25372816 NR Description: F23A5.27 [imported] - Arabidopsis thaliana
  misc_feature (1)..(483): Homolog of NCBI NO: 30684673 NR Description: expressed protein [Arabidopsis thaliana]
  misc_feature (1)..(483): Homolog of NCBI NO: 38175489 NR Description: putative myrosinase precursor [Oryza sativa
  misc_feature (229)..(483): Homolog of NCBI NO: 14517360 NR Description: At1g80910/F23A5_21 [Arabidopsis thaliana]
  misc_feature (120)..(483): Homolog of NCBI NO: 18394314 NR Description: expressed protein [Arabidopsis thaliana]
  misc_feature (120)..(483): Homolog of NCBI NO: 21618002 NR Description: unknown [Arabidopsis thaliana]
  misc_feature (1)..(307): Homolog of NCBI NO: 18394314 NR Description: expressed protein [Arabidopsis thaliana]
  misc_feature (1)..(307): Homolog of NCBI NO: 21618002 NR Description: unknown [Arabidopsis thaliana]
  misc_feature (187)..(483): Homolog of NCBI NO: 18266049 NR Description: myrosinase precursor [Brassica oleracea]
MSSGTESLRLCVFDLRRGQHEGQELDKILFFYPPDLTFSTQLSVIGLSEGLITFTRLFSPEAACEVIEAERHSHVFYEAEPDIWMVMIVEKNKEIEAVWRIDALRRVLKEVHSLFVMFQGSIRALLEKEPTGGLVRSHLYPFITDYLNDLFVGKKQQLPSFRDTLKERGTVQMLTLARDAALEVQSLVGVLDSCAGTVRCHSVILFHDLLVSTTLSPDDTVDLFAFSVMRLTTNALSSGTSSWSYLRKGSGSPQISSRSTTVPPLGSGGTLPSGNGSSTGRVIRPLQHDKWSKGKDGFLVTDIWGLDATPTILIQKTQESFYLLTYQYKSLTLVLLVPIAAIVNGELDISFVKQQVIENASTKILKVEEKLSKGWGGENAYHVSGYRYLLVDNDMEVSRASPPGKVATLAKESLLALNKLREEVDTEKNRSKQEKDMEICIRAKNNTWVIARLNRGKELYMALEKASETLLDATDSVQRFSNR

SEQ ID NO: 105574 - DNA, 1457 bp, Arabidopsis thaliana
  misc_feature (1)..(1457): Ceres Seq. ID no. 13617519
  misc_feature: MA Experiment ID: 108462 Result: Up-regulated in Transcription
  misc_feature: MA Experiment 108462 PARAMETER Experiment Name: At_Germinating_Seeds_cDNA_P Parameter: Age (day) Value: 2 vs. 0
  misc_feature: MA Experiment 108462 PARAMETER Experiment Name: At_Germinating_Seeds_cDNA_P Parameter: Tissue Value: Germinating Seeds
  misc_feature: MA Experiment ID: 108463 Result: Up-regulated in Transcription
  misc_feature: MA Experiment 108463 PARAMETER Experiment Name: At_Germinating_Seeds_cDNA_P Parameter: Age (day) Value: 3 vs. 0
  misc_feature: MA Experiment 108463 PARAMETER Experiment Name: At_Germinating_Seeds_cDNA_P Parameter: Tissue Value: Germinating Seeds
  misc_feature: MA Experiment ID: 108464 Result: Up-regulated in Transcription
  misc_feature: MA Experiment 108464 PARAMETER Experiment Name: At_Germinating_Seeds_cDNA_P Parameter: Age (day) Value: 4 vs. 0
  misc_feature: MA Experiment 108464 PARAMETER Experiment Name: At_Germinating_Seeds_cDNA_P Parameter: Tissue Value: Germinating Seeds
  misc_feature: MA Experiment ID: 108577 Result: Down-regulated in Transcription
  misc_feature: MA Experiment 108577 PARAMETER Experiment Name: At_42deg_Heat_cDNA_P Parameter: Temperature (deg C) Value: 42 vs. 22
  misc_feature: MA Experiment 108577 PARAMETER Experiment Name: At_42deg_Heat_cDNA_P Parameter: Timepoint (hr) Value: 6
  misc_feature: MA Experiment 108577 PARAMETER Experiment Name: At_42deg_Heat_cDNA_P Parameter: Tissue Value: Aerial
  misc_feature: MA Experiment ID: 108595 Result: Up-regulated in Transcription
  misc_feature: MA Experiment 108595 PARAMETER Experiment Name: At_Ler-pi_Ovule_cDNA_P Parameter: Plant Line Value: null
  misc_feature: MA Experiment ID: 108667 Result: Up-regulated in Transcription
  misc_feature: MA Experiment 108667 PARAMETER Experiment Name: At_2mM_SA_cDNA_P Parameter: Plant Line Value: WS
  misc_feature: MA Experiment 108667 PARAMETER Experiment Name: At_2mM_SA_cDNA_P Parameter: Timepoint (hr) Value: 1
  misc_feature: MA Experiment 108667 PARAMETER Experiment Name: At_2mM_SA_cDNA_P Parameter: Treatment Value: 2mM SA vs. No Treatment
  misc_feature: MA Experiment ID: 108668 Result: Up-regulated in Transcription
  misc_feature: MA Experiment 108668 PARAMETER Experiment Name: At_2mM_SA_cDNA_P Parameter: Plant Line Value: WS
  misc_feature: MA Experiment 108668 PARAMETER Experiment Name: At_2mM_SA_cDNA_P Parameter: Timepoint (hr) Value: 6
  misc_feature: MA Experiment 108668 PARAMETER Experiment Name: At_2mM_SA_cDNA_P Parameter: Treatment Value: 2mM SA vs. No Treatment
  misc_feature: MA Experiment ID: 20000224 Result: Down-regulated in Transcription
  misc_feature: MA Experiment ID: 20000227 Result: Down-regulated in Transcription
  misc_feature: MA Experiment 20000227 PARAMETER Experiment Name: At_Root-Tips-vs-Tops_P Parameter: Tissue Value: Root Tips vs. Root Tops
  misc_feature: MA Experiment ID: 20000234 Result: Down-regulated in Transcription
  misc_feature: MA Experiment 20000234 PARAMETER Experiment Name: At_Siliques_P Parameter: Age (day) Value: 21
  misc_feature: MA Experiment 20000234 PARAMETER Experiment Name: At_Siliques_P Parameter: Organism Value: A. thaliana
  misc_feature: MA Experiment 20000234 PARAMETER Experiment Name: At_Siliques_P Parameter: Plant Line Value: WS
  misc_feature: MA Experiment 20000234 PARAMETER Experiment Name: At_Siliques_P Parameter: Tissue Value: Less Than 5mm Siliques vs. Whole Plant
  misc_feature: MA Experiment ID: 20000235 Result: Down-regulated in Transcription
  misc_feature: MA Experiment 20000235 PARAMETER Experiment Name: At_Siliques_P Parameter: Age (day) Value: 21
  misc_feature: MA Experiment 20000235 PARAMETER Experiment Name: At_Siliques_P Parameter: Organism Value: A. thaliana
  misc_feature: MA Experiment 20000235 PARAMETER Experiment Name: At_Siliques_P Parameter: Plant Line Value: WS
  misc_feature: MA Experiment 20000235 PARAMETER Experiment Name: At_Siliques_P Parameter: Tissue Value: 5-10mm Siliques vs. Whole Plant
  misc_feature: MA Experiment ID: 20000264 Result: Down-regulated in Transcription
  misc_feature: MA Experiment 20000264 PARAMETER Experiment Name: At_Open_Flower_P Parameter: Age (day) Value: 21
  misc_feature: MA Experiment 20000264 PARAMETER Experiment Name: At_Open_Flower_P Parameter: Plant Line Value: WS
  misc_feature: MA Experiment 20000264 PARAMETER Experiment Name: At_Open_Flower_P Parameter: Tissue Value: Open Flower vs. Whole Plant
  misc_feature: MA Experiment ID: 20000265 Result: Down-regulated in Transcription
  misc_feature: MA Experiment 20000265 PARAMETER Experiment Name: At_Open_Flower_P Parameter: Age (day) Value: 21
  misc_feature: MA Experiment 20000265 PARAMETER Experiment Name: At_Open_Flower_P Parameter: Plant Line Value: WS
  misc_feature: MA Experiment 20000265 PARAMETER Experiment Name: At_Open_Flower_P Parameter: Tissue Value: Closed Flower vs. Whole Plant
  misc_feature: MA Experiment ID: 20000286 Result: Down-regulated in Transcription
  misc_feature: MA Experiment 20000286 PARAMETER Experiment Name: At_Open_Flower_P Parameter: Age (day) Value: 21
  misc_feature: MA Experiment 20000286 PARAMETER Experiment Name: At_Open_Flower_P Parameter: Plant Line Value: WS
  misc_feature: MA Experiment 20000286 PARAMETER Experiment Name: At_Open_Flower_P Parameter: Tissue Value: Half Open vs. Whole Plant
  misc_feature: MA Experiment ID: 20000438 Result: Down-regulated in Transcription
  misc_feature: MA Experiment 20000438 PARAMETER Experiment Name: At_Shoots__P Parameter: Age (day) Value: 14
  misc_feature: MA Experiment 20000438 PARAMETER Experiment Name: At_Shoots__P Parameter: Tissue Value: Shoots vs. Whole Plant
  misc_feature: MA Experiment ID: 20000460 Result: Up-regulated in Transcription
  misc_feature: MA Experiment 20000460 PARAMETER Experiment Name: At_10percent_PEG_P Parameter: Age (day) Value: 12
  misc_feature: MA Experiment 20000460 PARAMETER Experiment Name: At_10percent_PEG_P Parameter: Organism Value: A. thaliana
  misc_feature: MA Experiment 20000460 PARAMETER Experiment Name: At_10percent_PEG_P Parameter: Plant Line Value: WS
  misc_feature: MA Experiment 20000460 PARAMETER Experiment Name: At_10percent_PEG_P Parameter: Timepoint (day) Value: 12
  misc_feature: MA Experiment 20000460 PARAMETER Experiment Name: At_10percent_PEG_P Parameter: Tissue Value: Whole Plant
  misc_feature: MA Experiment 20000460 PARAMETER Experiment Name: At_10percent_PEG_P Parameter: Treatment Value: 10percent PEG vs. No Treatment
  misc_feature: MA Experiment ID: 20000527 Result: Up-regulated in Transcription
  misc_feature: MA Experiment 20000527 PARAMETER Experiment Name: At_10percent_PEG_P Parameter: Age (day) Value: 20
  misc_feature: MA Experiment 20000527 PARAMETER Experiment Name: At_10percent_PEG_P Parameter: Organism Value: A. thaliana
  misc_feature: MA Experiment 20000527 PARAMETER Experiment Name: At_10percent_PEG_P Parameter: Plant Line Value: WS
  misc_feature: MA Experiment 20000527 PARAMETER Experiment Name: At_10percent_PEG_P Parameter: Timepoint (day) Value: 20
  misc_feature: MA Experiment 20000527 PARAMETER Experiment Name: At_10percent_PEG_P Parameter: Tissue Value: Whole Plant
  misc_feature: MA Experiment 20000527 PARAMETER Experiment Name: At_10percent_PEG_P Parameter: Treatment Value: 10percent PEG vs. No Treatment
  misc_feature: MA Experiment ID: 20000794 Result: Down-regulated in Transcription
  misc_feature: MA Experiment 20000794 PARAMETER Experiment Name: At_Petals_P Parameter: Age (day) Value: 23-25 days
  misc_feature: MA Experiment 20000794 PARAMETER Experiment Name: At_Petals_P Parameter: Plant Line Value: WS
  misc_feature: MA Experiment 20000794 PARAMETER Experiment Name: At_Petals_P Parameter: Tissue Value: Petals vs. Whole plant
  misc_feature: MA Experiment ID: 20001247 Result: Up-regulated in Transcription
  misc_feature: MA Experiment 20001247 PARAMETER Experiment Name: At_Far-red-induction_P Parameter: Age (day) Value: 7
  misc_feature: MA Experiment 20001247 PARAMETER Experiment Name: At_Far-red-induction_P Parameter: Light Value: Far-red vs. White
  misc_feature: MA Experiment 20001247 PARAMETER Experiment Name: At_Far-red-induction_P Parameter: Organism Value: A. thaliana
  misc_feature: MA Experiment 20001247 PARAMETER Experiment Name: At_Far-red-induction_P Parameter: Plant Line Value: Columbia
  misc_feature: MA Experiment 20001247 PARAMETER Experiment Name: At_Far-red-induction_P Parameter: Timepoint (hr) Value: 1
  misc_feature: MA Experiment 20001247 PARAMETER Experiment Name: At_Far-red-induction_P Parameter: Tissue Value: Whole Plant
  misc_feature: MA Experiment ID: 20001905 Result: Up-regulated in Transcription
  misc_feature: MA Experiment 20001905 PARAMETER Experiment Name: At_Drought_Reproduction_P Parameter: Age (day) Value: 40
  misc_feature: MA Experiment 20001905 PARAMETER Experiment Name: At_Drought_Reproduction_P Parameter: Organism Value: A. thaliana
  misc_feature: MA Experiment 20001905 PARAMETER Experiment Name: At_Drought_Reproduction_P Parameter: Plant Line Value: WS
  misc_feature: MA Experiment 20001905 PARAMETER Experiment Name: At_Drought_Reproduction_P Parameter: Timepoint (day) Value: 10
  misc_feature: MA Experiment 20001905 PARAMETER Experiment Name: At_Drought_Reproduction_P Parameter: Tissue Value: Rosettes
  misc_feature: MA Experiment 20001905 PARAMETER Experiment Name: At_Drought_Reproduction_P Parameter: Treatment Value: Drought vs. No Drought
ttctatcaaaccgtcaagttgggaaacaaaacaaaactcgcaagtttaacaacgcgtcttctacctcctcctcatcggactatttatctatagtcttcgttagatcaattcctctgttttactcctaagtttcgagatccacatttctctttaacctcatctcatctcttagtcgagatcttcactttctgatgacaatagggtcgtttttctcttctctcttattctggcgcaattctcaggaccaggaggcgcagagagggaggatgcaggagatagatcttagtgttcacactataaagtcccatggaggaagagtcgcttctaaacacaagcacgattggatcatactcgtcatcttgattgccatcgagataggcttgaacctcatctctcctttctaccgctacgtgggaaaagacatgatgactgacctcaagtaccctttcaaggacaacaccgtacctatctggtctgtccctgtgtacgctgtgcttcttcccatcatagtgttcgtctgcttctacctgaagaggacatgtgtgtacgatctgcaccacagcatcctcgggctgctcttcgccgtcttgataactggtgtcatcactgactccatcaaggtagccaccggacgccctcgtcctaacttctactggcgctgcttccccgacggcaaagagctgtatgatgcgttgggaggtgtggtatgccacggcaaggcagctgaggtcaaggaaggccacaagagcttcccgagcggacacacttcctggtcctttgcggggcttacattcctttccctttacctctctggcaaaatcaaggccttcaacaatgaaggacatgtggcgaaactctgcctcgtgatcttccctctgcttgccgcttgtcttgtggggatatctcgtgtggatgactactggcaccactggcaagatgtcttcgcaggagctctcattggcacccttgtagccgccttctgctaccgtcagttctaccccaacccttaccacgaagaaggatggggtccctacgcctatttcaaggcagctcaagaacgaggagtccctgtgacctcctcccaaaacggagatgccttgagggctatgtctctgcagatggattcaacatctctcgaaaacatggaatctggcacttccaccgctcccagatgatcctcctctcttattatttgattcattatttggtttttcattttgatttggccgtcgtcgtgagattgtgaatggtgtagctacatactgtatgtgtattcaaaactctacttgtaccattacatttttgtaaatccactcttcatgaaattgacgtttttctggtgtccgagaggcttgggtcgctcgaataatctcgtccaatagactaatacggctctagtgaacacggtatttacatgtttgtgatctaaactgaaatcagttatttcttaattcgta

SEQ ID NO: 105575 - protein, 327 aa, Arabidopsis thaliana; identical to SEQ ID NO: 30793
  peptide (1)..(327): Ceres Seq. ID no. 13617520
  misc_feature (133)..(273): Pfam Name: PAP2 superfamily Pfam Description: PAP2 superfamily
  misc_feature (1)..(327): Homolog of NCBI NO: 18379166 NR Description: phosphatidic acid phosphatase (PAP2) family thaliana] >gi|14020927|dbj|BAB47575.1| phosphatidic acid [Arabidopsis thaliana] >gi|20197584|gb|AAD14518.2| putative
  misc_feature (1)..(327): Homolog of NCBI NO: 15724220 NR Description: At2g01180/F10A8.6 [Arabidopsis thaliana]
  misc_feature (1)..(327): Homolog of NCBI NO: 21554001 NR Description: putative phosphatidic acid phosphatase
  misc_feature (26)..(327): Homolog of NCBI NO: 25353094 NR Description: probable phosphatidic acid phosphatase [imported] Arabidopsis thaliana >gi|26005743|dbj|BAC41334.1| prenyl
  misc_feature (1)..(289): Homolog of NCBI NO: 9621903 NR Description: phosphatidic acid phosphatase alpha [Vigna
  misc_feature (18)..(300): Homolog of NCBI NO: 18396250 NR Description: phosphatidic acid phosphatase (PAP2) family thaliana] >gi|21537136|gb|AAM61477.1| putative phosphatidate
  misc_feature (26)..(300): Homolog of NCBI NO: 6957723 NR Description: putative phosphatidate phosphohydrolase
  misc_feature (26)..(312): Homolog of NCBI NO: 15218051 NR Description: phosphatidic acid phosphatase (PAP2) family
  misc_feature (26)..(315): Homolog of NCBI NO: 10673973 NR Description: phosphatidic acid phosphatase beta [Vigna
  misc_feature (26)..(300): Homolog of NCBI NO: 9279656 NR Description: phosphatidic acid phosphatase-like protein

SEQ ID NO: 105576 - protein, 302 aa, Arabidopsis thaliana; identical to SEQ ID NO: 30794
  peptide (1)..(302): Ceres Seq. ID no. 13617521
  misc_feature (108)..(248): Pfam Name: PAP2 superfamily Pfam Description: PAP2 superfamily
  misc_feature (1)..(302): Homolog of NCBI NO: 18379166 NR Description: phosphatidic acid phosphatase (PAP2) family thaliana] >gi|14020927|dbj|BAB47575.1| phosphatidic acid [Arabidopsis thaliana] >gi|20197584|gb|AAD14518.2| putative
  misc_feature (1)..(302): Homolog of NCBI NO: 15724220 NR Description: At2g01180/F10A8.6 [Arabidopsis thaliana]
  misc_feature (1)..(302): Homolog of NCBI NO: 21554001 NR Description: putative phosphatidic acid phosphatase
  misc_feature (1)..(302): Homolog of NCBI NO: 25353094 NR Description: probable phosphatidic acid phosphatase [imported] Arabidopsis thaliana >gi|26005743|dbj|BAC41334.1| prenyl
  misc_feature (1)..(264): Homolog of NCBI NO: 9621903 NR Description: phosphatidic acid phosphatase alpha [Vigna
  misc_feature (1)..(275): Homolog of NCBI NO: 18396250 NR Description: phosphatidic acid phosphatase (PAP2) family thaliana] >gi|21537136|gb|AAM61477.1| putative phosphatidate
  misc_feature (1)..(275): Homolog of NCBI NO: 6957723 NR Description: putative phosphatidate phosphohydrolase
  misc_feature (1)..(287): Homolog of NCBI NO: 15218051 NR Description: phosphatidic acid phosphatase (PAP2) family
  misc_feature (1)..(290): Homolog of NCBI NO: 10673973 NR Description: phosphatidic acid phosphatase beta [Vigna
  misc_feature (1)..(275): Homolog of NCBI NO: 9279656 NR Description: phosphatidic acid phosphatase-like protein

SEQ ID NO: 105577 - protein, 250 aa, Arabidopsis thaliana; identical to SEQ ID NO: 30795
  peptide (1)..(250): Ceres Seq. ID no. 13617522
  misc_feature (56)..(196): Pfam Name: PAP2 superfamily Pfam Description: PAP2 superfamily
  misc_feature (1)..(250): Homolog of NCBI NO: 18379166 NR Description: phosphatidic acid phosphatase (PAP2) family thaliana] >gi|14020927|dbj|BAB47575.1| phosphatidic acid [Arabidopsis thaliana] >gi|20197584|gb|AAD14518.2| putative
  misc_feature (1)..(250): Homolog of NCBI NO: 15724220 NR Description: At2g01180/F10A8.6 [Arabidopsis thaliana]
  misc_feature (1)..(250): Homolog of NCBI NO: 21554001 NR Description: putative phosphatidic acid phosphatase
  misc_feature (1)..(250): Homolog of NCBI NO: 25353094 NR Description: probable phosphatidic acid phosphatase [imported] Arabidopsis thaliana >gi|26005743|dbj|BAC41334.1| prenyl
  misc_feature (1)..(212): Homolog of NCBI NO: 9621903 NR Description: phosphatidic acid phosphatase alpha [Vigna
  misc_feature (1)..(223): Homolog of NCBI NO: 18396250 NR Description: phosphatidic acid phosphatase (PAP2) family thaliana] >gi|21537136|gb|AAM61477.1| putative phosphatidate
  misc_feature (1)..(223): Homolog of NCBI NO: 6957723 NR Description: putative phosphatidate phosphohydrolase
  misc_feature (1)..(235): Homolog of NCBI NO: 15218051 NR Description: phosphatidic acid phosphatase (PAP2) family
  misc_feature (1)..(238): Homolog of NCBI NO: 10673973 NR Description: phosphatidic acid phosphatase beta [Vigna
  misc_feature (1)..(223): Homolog of NCBI NO: 9279656 NR Description: phosphatidic acid phosphatase-like protein

SEQ ID NO: 105578 - DNA, 2535 bp, Arabidopsis thaliana
  misc_feature (1)..(2535): Ceres Seq. ID no. 13617523
  misc_feature: MA Experiment ID: 108434 Result: Down-regulated in Transcription
  misc_feature: MA Experiment 108434 PARAMETER Experiment Name: At_Root_Tips_cDNA_P Parameter: Tissue Value: Root Tips
  misc_feature: MA Experiment ID: 108469 Result: Up-regulated in Transcription
  misc_feature: MA Experiment ID: 20000070 Result: Up-regulated in Transcription
  misc_feature: MA Experiment 20000070 PARAMETER Experiment Name: At_100uM_ABA_Mutants_cDNA_P Parameter: Plant Line Value: CS24
  misc_feature: MA Experiment 20000070 PARAMETER Experiment Name: At_100uM_ABA_Mutants_cDNA_P Parameter: Timepoint (hr) Value: 6
  misc_feature: MA Experiment 20000070 PARAMETER Experiment Name: At_100uM_ABA_Mutants_cDNA_P Parameter: Tissue Value: Aerial
  misc_feature: MA Experiment 20000070 PARAMETER Experiment Name: At_100uM_ABA_Mutants_cDNA_P Parameter: Treatment Value: 100uM ABA vs. No Treatment
  misc_feature: MA Experiment ID: 20000180 Result: Down-regulated in Transcription
  misc_feature: MA Experiment 20000180 PARAMETER Experiment Name: At_Germinating_Seeds_P Parameter: Age (hr) Value: 24 vs. 0
  misc_feature: MA Experiment 20000180 PARAMETER Experiment Name: At_Germinating_Seeds_P Parameter: Tissue Value: Germinating Seeds
  misc_feature: MA Experiment ID: 20000264 Result: Down-regulated in Transcription
  misc_feature: MA Experiment 20000264 PARAMETER Experiment Name: At_Open_Flower_P Parameter: Age (day) Value: 21
  misc_feature: MA Experiment 20000264 PARAMETER Experiment Name: At_Open_Flower_P Parameter: Plant Line Value: WS
  misc_feature: MA Experiment 20000264 PARAMETER Experiment Name: At_Open_Flower_P Parameter: Tissue Value: Open Flower vs. Whole Plant
  misc_feature: MA Experiment ID: 20000265 Result: Down-regulated in Transcription
  misc_feature: MA Experiment 20000265 PARAMETER Experiment Name: At_Open_Flower_P Parameter: Age (day) Value: 21
  misc_feature: MA Experiment 20000265 PARAMETER Experiment Name: At_Open_Flower_P Parameter: Plant Line Value: WS
  misc_feature: MA Experiment 20000265 PARAMETER Experiment Name: At_Open_Flower_P Parameter: Tissue Value: Closed Flower vs. Whole Plant
  misc_feature: MA Experiment ID: 20000573 Result: Up-regulated in Transcription
  misc_feature: MA Experiment 20000573 PARAMETER Experiment Name: At_100uM_ABA_Mutants__P Parameter: Organism Value: A. thaliana
  misc_feature: MA Experiment 20000573 PARAMETER Experiment Name: At_100uM_ABA_Mutants__P Parameter: Plant Line Value: CS22 vs. Ler wt
  misc_feature: MA Experiment 20000573 PARAMETER Experiment Name: At_100uM_ABA_Mutants__P Parameter: Timepoint (hr) Value: N/A
  misc_feature: MA Experiment 20000573 PARAMETER Experiment Name: At_100uM_ABA_Mutants__P Parameter: Tissue Value: Whole Plant
  misc_feature: MA Experiment 20000573 PARAMETER Experiment Name: At_100uM_ABA_Mutants__P Parameter: Treatment Value: None
  misc_feature: MA Experiment ID: 20001247 Result: Up-regulated in Transcription
  misc_feature: MA Experiment 20001247 PARAMETER Experiment Name: At_Far-red-induction_P Parameter: Age (day) Value: 7
  misc_feature: MA Experiment 20001247 PARAMETER Experiment Name: At_Far-red-induction_P Parameter: Light Value: Far-red vs. White
  misc_feature: MA Experiment 20001247 PARAMETER Experiment Name: At_Far-red-induction_P Parameter: Organism Value: A. thaliana
  misc_feature: MA Experiment 20001247 PARAMETER Experiment Name: At_Far-red-induction_P Parameter: Plant Line Value: Columbia
  misc_feature: MA Experiment 20001247 PARAMETER Experiment Name: At_Far-red-induction_P Parameter: Timepoint (hr) Value: 1
  misc_feature: MA Experiment 20001247 PARAMETER Experiment Name: At_Far-red-induction_P Parameter: Tissue Value: Whole Plant
  misc_feature: MA Experiment ID: 20001248 Result: Up-regulated in Transcription
  misc_feature: MA Experiment 20001248 PARAMETER Experiment Name: At_Far-red-induction_P Parameter: Age (day) Value: 7
  misc_feature: MA Experiment 20001248 PARAMETER Experiment Name: At_Far-red-induction_P Parameter: Light Value: Far-red vs. White
  misc_feature: MA Experiment 20001248 PARAMETER Experiment Name: At_Far-red-induction_P Parameter: Organism Value: A. thaliana
  misc_feature: MA Experiment 20001248 PARAMETER Experiment Name: At_Far-red-induction_P Parameter: Plant Line Value: Columbia
  misc_feature: MA Experiment 20001248 PARAMETER Experiment Name: At_Far-red-induction_P Parameter: Timepoint (hr) Value: 4
  misc_feature: MA Experiment 20001248 PARAMETER Experiment Name: At_Far-red-induction_P Parameter: Tissue Value: Whole Plant
  misc_feature: MA Experiment ID: 20001450 Result: Up-regulated in Transcription
  misc_feature: MA Experiment 20001450 PARAMETER Experiment Name: At_Far-red-induction_P Parameter: Age (day) Value: 7
  misc_feature: MA Experiment 20001450 PARAMETER Experiment Name: At_Far-red-induction_P Parameter: Light Value: Far-red vs. White
  misc_feature: MA Experiment 20001450 PARAMETER Experiment Name: At_Far-red-induction_P Parameter: Organism Value: A. thaliana
  misc_feature: MA Experiment 20001450 PARAMETER Experiment Name: At_Far-red-induction_P Parameter: Plant Line Value: Columbia
  misc_feature: MA Experiment 20001450 PARAMETER Experiment Name: At_Far-red-induction_P Parameter: Timepoint (hr) Value: 8
  misc_feature: MA Experiment 20001450 PARAMETER Experiment Name: At_Far-red-induction_P Parameter: Tissue Value: Whole Plant
  misc_feature: MA Experiment ID: 20001557 Result: Up-regulated in Transcription
  misc_feature: MA Experiment 20001557 PARAMETER Experiment Name: At_Drought_Soil_Dry_P Parameter: Age (day) Value: 27
  misc_feature: MA Experiment 20001557 PARAMETER Experiment Name: At_Drought_Soil_Dry_P Parameter: Organism Value: A. thaliana
  misc_feature: MA Experiment 20001557 PARAMETER Experiment Name: At_Drought_Soil_Dry_P Parameter: Plant Line Value: WS
  misc_feature: MA Experiment 20001557 PARAMETER Experiment Name: At_Drought_Soil_Dry_P Parameter: Post Timepoint (hr) Value: 3
  misc_feature: MA Experiment 20001557 PARAMETER Experiment Name: At_Drought_Soil_Dry_P Parameter: Post-Treatment Value: Re-Water vs. No Drought
  misc_feature: MA Experiment 20001557 PARAMETER Experiment Name: At_Drought_Soil_Dry_P Parameter: Timepoint (day) Value: 13
  misc_feature: MA Experiment 20001557 PARAMETER Experiment Name: At_Drought_Soil_Dry_P Parameter: Treatment Value: Drought vs. No Drought
  misc_feature: MA Experiment ID: 20001560 Result: Down-regulated in Transcription
  misc_feature: MA Experiment 20001560 PARAMETER Experiment Name: At_Drought_Soil_Dry_P Parameter: Age (day) Value: 28
  misc_feature: MA Experiment 20001560 PARAMETER Experiment Name: At_Drought_Soil_Dry_P Parameter: Organism Value: A. thaliana
  misc_feature: MA Experiment 20001560 PARAMETER Experiment Name: At_Drought_Soil_Dry_P Parameter: Plant Line Value: WS
  misc_feature: MA Experiment 20001560 PARAMETER Experiment Name: At_Drought_Soil_Dry_P Parameter: Post Timepoint (hr) Value: None
  misc_feature: MA Experiment 20001560 PARAMETER Experiment Name: At_Drought_Soil_Dry_P Parameter: Post-Treatment Value: None
  misc_feature: MA Experiment 20001560 PARAMETER Experiment Name: At_Drought_Soil_Dry_P Parameter: Timepoint (day) Value: 14
  misc_feature: MA Experiment 20001560 PARAMETER Experiment Name: At_Drought_Soil_Dry_P Parameter: Treatment Value: Drought vs. No Drought
atcaaattcaatttaatttttcttctgcaaatggaaccaccgccttcttctctgtcctccaccgcggtggcttccacctccatctccgccgccactgctcctgttcctcctcctctacctcctcacgtgacttcttcttaccccgaatctctcgactcctcccctcgttctcgcaccaccgatggctgggatgaccttcctgctccttctggcggcggcggtggcggtggtggtagcgccgtctcttctaaacttcgttttatgtgtagctacggcggtcatatccttcctcgccctcacgataagtctctctgctacatgggcggtgacactcgcatcgttgtcgtcgaccgtaactcctctctcccttctctcatcgctcgtctctccaacacgcttctcgacggtcgttccttcaccctcaagtaccagttacctagcgaagaccttgactctctcatctccgtcactaccgacgaagatctcgacaacatgatcgaagagtatgaccgtaccatttccgcttccaattccaccaaaccttcgcgtctccggttgtttctattcacctccaagcctgaggctactcaatctatgggtcagatccttgagagctctgccaagagcgacgattggttcctcaacgcactcaatagcgccggtcttctcaatcgaggattctcagattctgatactaacgtcaatcgtttacttggtttggatgatgctcttgctctccgttctaattccggtgacaacaacaatcgagatggtgatgatggctctgttaaaagcgccaagcaacagcaacctccaccgccgcagcagcaagaacaacagcaaggaggccaagatgtgaactgcttaccggattctccgatgttagatacatcctcttctttcggctccacttcttcgtctccctcgctcgccaatttgcctccgatccgtgtccatgtagaggaaccaggcggagtaaggactttgccagatcagagaaatctgggaattgaagaacagttcgcacgattcaacgtcgggaacaagcatcagctacatgacgacggatttgctgcgatctcttcaccaccgccgatgcctgtcacaatcgcccttcctgctgcgcctgtgactgcagccaccgtctctaatgagttccaggccagggtttactcagatgacgagagatccgatcacggcgtgcaggctggatacaggaagcctccgactccgcgatcgcagccgcagaatctaccgcctcagcaggctcatcagctgaaatcaaatagcggtggtggacacgagctgccatcacccaattccgtttccagtgatagcagtatgagcaacccaatgtttcaccaaagaccatctgtctatcaagaaccaattgctcagataccttctggctctaccgttgttactggtatgatcaatccctcagatccaagcacacttttgtcacagcatcagaatcaggacccagcctatatccttcacccccagtttgagcaacaatctgcacaatctcagccacagcagcagttcatacacactgctgctcctcctcaatacattcatcaccatccgtctagcggccttcctgtcccgacttacatccaggtttacccttcgcaacagcctcaacagtccttccatcaacacgcaggtcgactggatcagcagccttatcctgtttattatgtcactgctcctgtcccacctaggccctacagtatgcctgtgccacaatctccaagtgtgagcgatgctgcagggtctatcccctctaaccatcccaactctaccatgatgcctccacctcctaacaaccacatgagaagtgttagcagtggcaaacctgagatgggacaggctggggtttacacaacagccccaggtgtgggcggtgctcagatggttcaccagattcccacaaaccagcagcaattcatggggtattcgcagatccgtcaccctcctcagtctggttcagctgggaatccaaactatggatatgaatatgtcgacaatgctcatacacagatatactacactcaacctatgggacatgcacagtaccagacaatgactgggcctccacctgccatggtgatgcctgatggttctgctgctgctaagcttccagctgagaacatgactcaacagatccggagttcacagccattgtgacacacacaaggaacacatgaagatgaaccacaaaattttggaggaagaaaaccccgggttggtttttaaacgtataaatatataacttttacttcttttttcttctcttcttttacaagttgctgcatcaaaaaaagagtctggtgtcatgttaagtttggtattatgggttgtgtttaaaagtgttgtgtgagtaaattaaaaaaacaaataaatagtgcttcttggtgggattttacattatatagttgcaattgatacatgtagtgctttaccattttcctggatcttatatcatattattatcattcatttcattttgtaaatgtatcacttttttga

SEQ ID NO: 105579 - protein, 730 aa, Arabidopsis thaliana; identical to SEQ ID NO: 30500
  peptide (1)..(730): Ceres Seq. ID no. 13617524
  misc_feature (99)..(191): Pfam Name: PB1 domain Pfam Description: PB1 domain
  misc_feature (483)..(730): Homolog of NCBI NO: 25410886 NR Description: hypothetical protein At2g01190 [imported] -
  misc_feature (88)..(238): Homolog of NCBI NO: 25410886 NR Description: hypothetical protein At2g01190 [imported] -
  misc_feature (45)..(703): Homolog of NCBI NO: 34895646 NR Description: P0480E02.2 [Oryza sativa (japonica
  misc_feature (11)..(557): Homolog of NCBI NO: 15229599 NR Description: octicosapeptide/Phox/Bem1p (PB1) protein [Arabidopsis thaliana] >gi|9279657|dbj|BAB01173.1| similarity to unknown protein~gb|AAD14519.1~gene_id:MIE15.2
  misc_feature (84)..(328): Homolog of NCBI NO: 18412822 NR Description: octicosapeptide/Phox/Bem1p (PB1) protein [Arabidopsis thaliana] >gi|15809940|gb|AAL06897.1|
  misc_feature (84)..(328): Homolog of NCBI NO: 25407315 NR Description: hypothetical protein AT4g05150 [imported] - thaliana >gi|7267274|emb|CAB81057.1| putative protein
  misc_feature (45)..(245): Homolog of NCBI NO: 15237703 NR Description: octicosapeptide/Phox/Bem1p (PB1) protein [Arabidopsis thaliana] >gi|10178224|dbj|BAB11604.1| similarity to unknown protein~gb|AAD14519.1~gene_id:T12B11.2
  misc_feature (45)..(239): Homolog of NCBI NO: 15242462 NR Description: octicosapeptide/Phox/Bem1p (PB1) protein [Arabidopsis thaliana] >gi|11357503|pir||T49936
  misc_feature (80)..(189): Homolog of NCBI NO: 15222547 NR Description: octicosapeptide/Phox/Bem1p (PB1)
  misc_feature (71)..(470): Homolog of NCBI NO: 15219183 NR Description: protein kinase family [Arabidopsis thaliana]

SEQ ID NO: 105580 - protein, 720 aa, Arabidopsis thaliana; identical to SEQ ID NO: 30501
  peptide (1)..(720): Ceres Seq. ID no. 13617525
  misc_feature (89)..(181): Pfam Name: PB1 domain Pfam Description: PB1 domain
  misc_feature (473)..(720): Homolog of NCBI NO: 25410886 NR Description: hypothetical protein At2g01190 [imported] -
  misc_feature (78)..(228): Homolog of NCBI NO: 25410886 NR Description: hypothetical protein At2g01190 [imported] -
  misc_feature (35)..(693): Homolog of NCBI NO: 34895646 NR Description: P0480E02.2 [Oryza sativa (japonica
  misc_feature (1)..(547): Homolog of NCBI NO: 15229599 NR Description: octicosapeptide/Phox/Bem1p (PB1) protein [Arabidopsis thaliana] >gi|9279657|dbj|BAB01173.1| similarity to unknown protein~gb|AAD14519.1~gene_id:MIE15.2
  misc_feature (74)..(318): Homolog of NCBI NO: 18412822 NR Description: octicosapeptide/Phox/Bem1p (PB1) protein [Arabidopsis thaliana] >gi|15809940|gb|AAL06897.1|
  misc_feature (74)..(318): Homolog of NCBI NO: 25407315 NR Description: hypothetical protein AT4g05150 [imported] - thaliana >gi|7267274|emb|CAB81057.1| putative protein
  misc_feature (35)..(235): Homolog of NCBI NO: 15237703 NR Description: octicosapeptide/Phox/Bem1p (PB1) protein [Arabidopsis thaliana] >gi|10178224|dbj|BAB11604.1| similarity to unknown protein~gb|AAD14519.1~gene_id:T12B11.2
  misc_feature (35)..(229): Homolog of NCBI NO: 15242462 NR Description: octicosapeptide/Phox/Bem1p (PB1) protein [Arabidopsis thaliana] >gi|11357503|pir||T49936
  misc_feature (70)..(179): Homolog of NCBI NO: 15222547 NR Description: octicosapeptide/Phox/Bem1p (PB1)
  misc_feature (61)..(460): Homolog of NCBI NO: 15219183 NR Description: protein kinase family [Arabidopsis thaliana]

SEQ ID NO: 105581 - protein, 643 aa, Arabidopsis thaliana; identical to SEQ ID NO: 30502
  peptide (1)..(643): Ceres Seq. ID no. 13617526
  misc_feature (12)..(104): Pfam Name: PB1 domain Pfam Description: PB1 domain
  misc_feature (396)..(643): Homolog of NCBI NO: 25410886 NR Description: hypothetical protein At2g01190 [imported] -
  misc_feature (1)..(151): Homolog of NCBI NO: 25410886 NR Description: hypothetical protein At2g01190 [imported] -
  misc_feature (1)..(616): Homolog of NCBI NO: 34895646 NR Description: P0480E02.2 [Oryza sativa (japonica
  misc_feature (1)..(470): Homolog of NCBI NO: 15229599 NR Description: octicosapeptide/Phox/Bem1p (PB1) protein [Arabidopsis thaliana] >gi|9279657|dbj|BAB01173.1| similarity to unknown protein~gb|AAD14519.1~gene_id:MIE15.2
  misc_feature (1)..(241): Homolog of NCBI NO: 18412822 NR Description: octicosapeptide/Phox/Bem1p (PB1) protein [Arabidopsis thaliana] >gi|15809940|gb|AAL06897.1|
  misc_feature (1)..(241): Homolog of NCBI NO: 25407315 NR Description: hypothetical protein AT4g05150 [imported] - thaliana >gi|7267274|emb|CAB81057.1| putative protein
  misc_feature (1)..(158): Homolog of NCBI NO: 15237703 NR Description: octicosapeptide/Phox/Bem1p (PB1) protein [Arabidopsis thaliana] >gi|10178224|dbj|BAB11604.1| similarity to unknown protein~gb|AAD14519.1~gene_id:T12B11.2
  misc_feature (1)..(152): Homolog of NCBI NO: 15242462 NR Description: octicosapeptide/Phox/Bem1p (PB1) protein [Arabidopsis thaliana] >gi|11357503|pir||T49936
  misc_feature (1)..(102): Homolog of NCBI NO: 15222547 NR Description: octicosapeptide/Phox/Bem1p (PB1)
  misc_feature (1)..(383): Homolog of NCBI NO: 15219183 NR Description: protein kinase family [Arabidopsis thaliana]

SEQ ID NO: 105582 - DNA, 1329 bp, Arabidopsis thaliana
  misc_feature (1)..(1329): Ceres Seq. ID no. 13617527
  misc_feature: MA Experiment ID: 108595 Result: Down-regulated in Transcription
  misc_feature: MA Experiment 108595 PARAMETER Experiment Name: At_Ler-pi_Ovule_cDNA_P Parameter: Plant Line Value: null
  misc_feature: MA Experiment ID: 20000179 Result: Up-regulated in Transcription
  misc_feature: MA Experiment 20000179 PARAMETER Experiment Name: At_Germinating_Seeds_P Parameter: Age (hr) Value: 6 vs. 0
  misc_feature: MA Experiment 20000179 PARAMETER Experiment Name: At_Germinating_Seeds_P Parameter: Tissue Value: Germinating Seeds
  misc_feature: MA Experiment ID: 20000265 Result: Up-regulated in Transcription
  misc_feature: MA Experiment 20000265 PARAMETER Experiment Name: At_Open_Flower_P Parameter: Age (day) Value: 21
  misc_feature: MA Experiment 20000265 PARAMETER Experiment Name: At_Open_Flower_P Parameter: Plant Line Value: WS
  misc_feature: MA Experiment 20000265 PARAMETER Experiment Name: At_Open_Flower_P Parameter: Tissue Value: Closed Flower vs. Whole Plant
  misc_feature: MA Experiment ID: 20000495 Result: Up-regulated in Transcription
  misc_feature: MA Experiment 20000495 PARAMETER Experiment Name: At_Guard_Cells_P Parameter: Harvest Date Value: 8/2/2002
  misc_feature: MA Experiment 20000495 PARAMETER Experiment Name: At_Guard_Cells_P Parameter: Organism Value: A. thaliana
  misc_feature: MA Experiment 20000495 PARAMETER Experiment Name: At_Guard_Cells_P Parameter: Tissue Value: Guard Cells vs. Leaves
gaggagacgaaaccgagagaaacaatgggagacgctgcgatccgtaccgtcgtcgaagccattcactcatctccgacgcaggccgtcgtctatctttgcggcggtgcctctctggctttaggttggttgatgtcggttcctggagcgtcgaacacgcttctcgagtccgtggttccttattcgagagtatctatggttcaattactcggcagggttccgagccaacactgtagccaagcattggccaaggagatggccttgttagcctacaatcgggcgcttaagctctctaaaccaggatatccggttctcggtgtcgggtttacgggatcattggtaacttctcgtcctaagcgtggagatcacaggttctttttgtctatgagagcatccgaccggattttggaatcttcagtcactctaactaagaacttacggagccgagaagaagaagataaggtgtcaagctgtgcactgatccaggctatggccaaggcatgccaagtttctgggacacttgactctggcttgaccgagtctgaggtgccttatgagtctgaaacccactttactgaagaacaagaactagagcagcttataaatgggcacttgtgctgtaagatttatccattttctggggcacacgggtctgatgaagacagaaagattatactacctggctcttttaacccattacatgaaggtcatctcaagctgttagaagttgctatgagtgtttgtgggggcggctacccatgttttgaaatatccgcaataaatgccgacaaaccaccgcttacaattgcacagattaaagatcgtgtcaagcaatttgaagtagttggaaagacgataatagtttcaaatcagccatacttctacaagaaagctgaactcttcccaggaagcagttttgtaattggcgctgacactgcagcgaggcttgtcaatccaaagtactatgaaggaagcatcaaaaggatgttggagatacttggtgattgcaaacggacaggttgcactttccttgttggtggccgcaatgtagatggtgtatttaaggttcttgaagatgttgatattccagaggaaataatcgacatgtttatttcaattccagcagatatattccggatggatatatcctctacagagataagaaaaaaacaagggggtggtacgaactaatgacttctcaacccgcttgaaagtcttggctcgcaagacaatttatttagtgcagttactttttgatttgatatgtattgtgttgcattctgttcttattatggaatccggatcaatggtatgagcatttgcacatgacat

SEQ ID NO: 105583 - protein, 395 aa, Arabidopsis thaliana
  peptide (1)..(395): Ceres Seq. ID no. 13617528
  misc_feature (9)..(395): Homolog of NCBI NO: 30677890 NR Description: expressed protein [Arabidopsis thaliana]
  misc_feature (9)..(395): Homolog of NCBI NO: 21537099 NR Description: unknown [Arabidopsis thaliana]
  misc_feature (9)..(395): Homolog of NCBI NO: 30677893 NR Description: expressed protein [Arabidopsis thaliana]
  misc_feature (9)..(395): Homolog of NCBI NO: 26451899 NR Description: unknown protein [Arabidopsis thaliana]
  misc_feature (9)..(392): Homolog of NCBI NO: 9294466 NR Description: gb|AAD14522.1~gene_id:MGF10.2~similar to unknown
  misc_feature (9)..(392): Homolog of NCBI NO: 15232221 NR Description: expressed protein [Arabidopsis thaliana]
  misc_feature (159)..(278): Homolog of NCBI NO: 34911372 NR Description: P0034C09.17 [Oryza sativa (japonica
  misc_feature (14)..(104): Homolog of NCBI NO: 34911372 NR Description: P0034C09.17 [Oryza sativa (japonica
  misc_feature (318)..(391): Homolog of NCBI NO: 34911372 NR Description: P0034C09.17 [Oryza sativa (japonica
  misc_feature (9)..(161): Homolog of NCBI NO: 25371182 NR Description: hypothetical protein At2g01220 [imported] - thaliana >gi|4262229|gb|AAD14522.1| unknown protein [Arabidopsis
EETKPRETMGDAAIRTVVEAIHSSPTQAVVYLCGGASLALGWLMSVPGASNTLLESVVPYSRVSMVQLLGRVPSQHCSQALAKEMALLAYNRALKLSKPGYPVLGVGFTGSLVTSRPKRGDHRFFLSMRASDRILESSVTLTKNLRSREEEDKVSSCALIQAMAKACQVSGTLDSGLTESEVPYESETHFTEEQELEQLINGHLCCKIYPFSGAHGSDEDRKIILPGSFNPLHEGHLKLLEVAMSVCGGGYPCFEISAINADKPPLTIAQIKDRVKQFEVVGKTIIVSNQPYFYKKAELFPGSSFVIGADTAARLVNPKYYEGSIKRMLEILGDCKRTGCTFLVGGRNVDGVFKVLEDVDIPEEIIDMFISIPADIFRMDISSTEIRKKQGGGTN

SEQ ID NO: 105584 - protein, 387 aa, Arabidopsis thaliana
  peptide (1)..(387): Ceres Seq. ID no. 13617529
  misc_feature (1)..(387): Homolog of NCBI NO: 30677890 NR Description: expressed protein [Arabidopsis thaliana]
  misc_feature (1)..(387): Homolog of NCBI NO: 21537099 NR Description: unknown [Arabidopsis thaliana]
  misc_feature (1)..(387): Homolog of NCBI NO: 30677893 NR Description: expressed protein [Arabidopsis thaliana]
  misc_feature (1)..(387): Homolog of NCBI NO: 26451899 NR Description: unknown protein [Arabidopsis thaliana]
  misc_feature (1)..(384): Homolog of NCBI NO: 9294466 NR Description: gb|AAD14522.1~gene_id:MGF10.2~similar to unknown
  misc_feature (1)..(384): Homolog of NCBI NO: 15232221 NR Description: expressed protein [Arabidopsis thaliana]
  misc_feature (151)..(270): Homolog of NCBI NO: 34911372 NR Description: P0034C09.17 [Oryza sativa (japonica
  misc_feature (6)..(96): Homolog of NCBI NO: 34911372 NR Description: P0034C09.17 [Oryza sativa (japonica
  misc_feature (310)..(383): Homolog of NCBI NO: 34911372 NR Description: P0034C09.17 [Oryza sativa (japonica
  misc_feature (1)..(153): Homolog of NCBI NO: 25371182 NR Description: hypothetical protein At2g01220 [imported] - thaliana >gi|4262229|gb|AAD14522.1| unknown protein [Arabidopsis
MGDAAIRTVVEAIHSSPTQAVVYLCGGASLALGWLMSVPGASNTLLESVVPYSRVSMVQLLGRVPSQHCSQALAKEMALLAYNRALKLSKPGYPVLGVGFTGSLVTSRPKRGDHRFFLSMRASDRILESSVTLTKNLRSREEEDKVSSCALIQAMAKACQVSGTLDSGLTESEVPYESETHFTEEQELEQLINGHLCCKIYPFSGAHGSDEDRKIILPGSFNPLHEGHLKLLEVAMSVCGGGYPCFEISAINADKPPLTIAQIKDRVKQFEVVGKTIIVSNQPYFYKKAELFPGSSFVIGADTAARLVNPKYYEGSIKRMLEILGDCKRTGCTFLVGGRNVDGVFKVLEDVDIPEEIIDMFISIPADIFRMDISSTEIRKKQGGGTN

SEQ ID NO: 105585 - protein, 352 aa, Arabidopsis thaliana
  peptide (1)..(352): Ceres Seq. ID no. 13617530
  misc_feature (1)..(352): Homolog of NCBI NO: 30677890 NR Description: expressed protein [Arabidopsis thaliana]
  misc_feature (1)..(352): Homolog of NCBI NO: 21537099 NR Description: unknown [Arabidopsis thaliana]
  misc_feature (1)..(352): Homolog of NCBI NO: 30677893 NR Description: expressed protein [Arabidopsis thaliana]
  misc_feature (1)..(352): Homolog of NCBI NO: 26451899 NR Description: unknown protein [Arabidopsis thaliana]
  misc_feature (1)..(349): Homolog of NCBI NO: 9294466 NR Description: gb|AAD14522.1~gene_id:MGF10.2~similar to unknown
  misc_feature (1)..(349): Homolog of NCBI NO: 15232221 NR Description: expressed protein [Arabidopsis thaliana]
  misc_feature (116)..(235): Homolog of NCBI NO: 34911372 NR Description: P0034C09.17 [Oryza sativa (japonica
  misc_feature (1)..(61): Homolog of NCBI NO: 34911372 NR Description: P0034C09.17 [Oryza sativa (japonica
  misc_feature (275)..(348): Homolog of NCBI NO: 34911372 NR Description: P0034C09.17 [Oryza sativa (japonica
  misc_feature (1)..(118): Homolog of NCBI NO: 25371182 NR Description: hypothetical protein At2g01220 [imported] - thaliana >gi|4262229|gb|AAD14522.1| unknown protein [Arabidopsis
MSVPGASNTLLESVVPYSRVSMVQLLGRVPSQHCSQALAKEMALLAYNRALKLSKPGYPVLGVGFTGSLVTSRPKRGDHRFFLSMRASDRILESSVTLTKNLRSREEEDKVSSCALIQAMAKACQVSGTLDSGLTESEVPYESETHFTEEQELEQLINGHLCCKIYPFSGAHGSDEDRKIILPGSFNPLHEGHLKLLEVAMSVCGGGYPCFEISAINADKPPLTIAQIKDRVKQFEVVGKTIIVSNQPYFYKKAELFPGSSFVIGADTAARLVNPKYYEGSIKRMLEILGDCKRTGCTFLVGGRNVDGVFKVLEDVDIPEEIIDMFISIPADIFRMDISSTEIRKKQGGGTN

SEQ ID NO: 105586 - DNA, 1592 bp, Arabidopsis thaliana
  misc_feature (1)..(1592): Ceres Seq. ID no. 13617531
  misc_feature: MA Experiment ID: 108464 Result: Up-regulated in Transcription
  misc_feature: MA Experiment 108464 PARAMETER Experiment Name: At_Germinating_Seeds_cDNA_P Parameter: Age (day) Value: 4 vs. 0
  misc_feature: MA Experiment 108464 PARAMETER Experiment Name: At_Germinating_Seeds_cDNA_P Parameter: Tissue Value: Germinating Seeds
  misc_feature: MA Experiment ID: 108573 Result: Up-regulated in Transcription
  misc_feature: MA Experiment 108573 PARAMETER Experiment Name: At_Drought_cDNA_P Parameter: Timepoint (hr) Value: 6
  misc_feature: MA Experiment 108573 PARAMETER Experiment Name: At_Drought_cDNA_P Parameter: Tissue Value: Aerial
  misc_feature: MA Experiment 108573 PARAMETER Experiment Name: At_Drought_cDNA_P Parameter: Treatment Value: Drought vs. No Drought
  misc_feature: MA Experiment ID: 108585 Result: Up-regulated in Transcription
  misc_feature: MA Experiment 108585 PARAMETER Experiment Name: At_5mM_NaNP_cDNA_P Parameter: Timepoint (hr) Value: 6
  misc_feature: MA Experiment 108585 PARAMETER Experiment Name: At_5mM_NaNP_cDNA_P Parameter: Tissue Value: Aerial
  misc_feature: MA Experiment 108585 PARAMETER Experiment Name: At_5mM_NaNP_cDNA_P Parameter: Treatment Value: null
  misc_feature: MA Experiment ID: 20000087 Result: Down-regulated in Transcription
  misc_feature: MA Experiment 20000087 PARAMETER Experiment Name: At_100uM_ABA_Mutants_cDNA_P Parameter: Plant Line Value: WS
  misc_feature: MA Experiment 20000087 PARAMETER Experiment Name: At_100uM_ABA_Mutants_cDNA_P Parameter: Timepoint (hr) Value: 6
  misc_feature: MA Experiment 20000087 PARAMETER Experiment Name: At_100uM_ABA_Mutants_cDNA_P Parameter: Tissue Value: Aerial
  misc_feature: MA Experiment 20000087 PARAMETER Experiment Name: At_100uM_ABA_Mutants_cDNA_P Parameter: Treatment Value: 100uM ABA vs. No Treatment
  misc_feature: MA Experiment ID: 20000089 Result: Down-regulated in Transcription
  misc_feature: MA Experiment ID: 20000111 Result: Down-regulated in Transcription
  misc_feature: MA Experiment 20000111 PARAMETER Experiment Name: At_42deg_Heat_cDNA_P Parameter: Temperature (deg C) Value: 42 vs. 22
  misc_feature: MA Experiment 20000111 PARAMETER Experiment Name: At_42deg_Heat_cDNA_P Parameter: Timepoint (hr) Value: 6
  misc_feature: MA Experiment 20000111 PARAMETER Experiment Name: At_42deg_Heat_cDNA_P Parameter: Tissue Value: Aerial
  misc_feature: MA Experiment ID: 20000113 Result: Down-regulated in Transcription
  misc_feature: MA Experiment 20000113 PARAMETER Experiment Name: At_42deg_Heat_cDNA_P Parameter: Temperature (deg C) Value: 42 vs. 22
  misc_feature: MA Experiment 20000113 PARAMETER Experiment Name: At_42deg_Heat_cDNA_P Parameter: Timepoint (hr) Value: 8
  misc_feature: MA Experiment 20000113 PARAMETER Experiment Name: At_42deg_Heat_cDNA_P Parameter: Tissue Value: Aerial
  misc_feature: MA Experiment ID: 20000173 Result: Down-regulated in Transcription
  misc_feature: MA Experiment 20000173 PARAMETER Experiment Name: At_42deg_Heat_P Parameter: Age (day) Value: 14
  misc_feature: MA Experiment 20000173 PARAMETER Experiment Name: At_42deg_Heat_P Parameter: Organism Value: A. thaliana
  misc_feature: MA Experiment 20000173 PARAMETER Experiment Name: At_42deg_Heat_P Parameter: Plant Line Value: WS
  misc_feature: MA Experiment 20000173 PARAMETER Experiment Name: At_42deg_Heat_P Parameter: Temperature (deg C) Value: 42 vs. 22
  misc_feature: MA Experiment 20000173 PARAMETER Experiment Name: At_42deg_Heat_P Parameter: Timepoint (hr) Value: 6
  misc_feature: MA Experiment 20000173 PARAMETER Experiment Name: At_42deg_Heat_P Parameter: Tissue Value: Aerial
  misc_feature: MA Experiment ID: 20000184 Result: Up-regulated in Transcription
  misc_feature: MA Experiment 20000184 PARAMETER Experiment Name: At_Shoots__P Parameter: Age (day) Value: 7
  misc_feature: MA Experiment 20000184 PARAMETER Experiment Name: At_Shoots__P Parameter: Tissue Value: Shoots vs. Whole Plant
  misc_feature: MA Experiment ID: 20000437 Result: Down-regulated in Transcription
  misc_feature: MA Experiment 20000437 PARAMETER Experiment Name: At_Drought_P Parameter: Age (day) Value: 8
  misc_feature: MA Experiment 20000437 PARAMETER Experiment Name: At_Drought_P Parameter: Organism Value: A. thaliana
  misc_feature: MA Experiment 20000437 PARAMETER Experiment Name: At_Drought_P Parameter: Plant Line Value: WS
  misc_feature: MA Experiment 20000437 PARAMETER Experiment Name: At_Drought_P Parameter: Timepoint (hr) Value: 24
  misc_feature: MA Experiment 20000437 PARAMETER Experiment Name: At_Drought_P Parameter: Tissue Value: Whole Plant
  misc_feature: MA Experiment 20000437 PARAMETER Experiment Name: At_Drought_P Parameter: Treatment Value: Drought vs. No Drought
  misc_feature: MA Experiment ID: 20000439 Result: Up-regulated in Transcription
  misc_feature: MA Experiment 20000439 PARAMETER Experiment Name: At_Roots__P Parameter: Age (day) Value: 14 vs. 21
  misc_feature: MA Experiment 20000439 PARAMETER Experiment Name: At_Roots__P Parameter: Organism Value: A. thaliana
  misc_feature: MA Experiment 20000439 PARAMETER Experiment Name: At_Roots__P Parameter: Tissue Value: Roots vs. Whole Plant
  misc_feature: MA Experiment ID: 20001558 Result: Down-regulated in Transcription
  misc_feature: MA Experiment 20001558 PARAMETER Experiment Name: At_Drought_Soil_Dry_P Parameter: Age (day) Value: 27
  misc_feature: MA Experiment 20001558 PARAMETER Experiment Name: At_Drought_Soil_Dry_P Parameter: Organism Value: A. thaliana
  misc_feature: MA Experiment 20001558 PARAMETER Experiment Name: At_Drought_Soil_Dry_P Parameter: Plant Line Value: WS
  misc_feature: MA Experiment 20001558 PARAMETER Experiment Name: At_Drought_Soil_Dry_P Parameter: Post Timepoint (hr) Value: 6
  misc_feature: MA Experiment 20001558 PARAMETER Experiment Name: At_Drought_Soil_Dry_P Parameter: Post-Treatment Value: Re-Water vs. No Drought
  misc_feature: MA Experiment 20001558 PARAMETER Experiment Name: At_Drought_Soil_Dry_P Parameter: Timepoint (day) Value: 13
  misc_feature: MA Experiment 20001558 PARAMETER Experiment Name: At_Drought_Soil_Dry_P Parameter: Treatment Value: Drought vs. No Drought
ctttttttgaaattaccaaatctctctccatttcagcgaatctcttcttcagattttcctcttccactaatcttttgcctgtttaatcggagcttagatatcatcagaaggtttttgttctatcaattctccttcattcgatccatttttacccctttctttggaatctccgattcgaccaagcttcttcgccgtctcatcggagacaaacacatattcacgctaaatcaactaaattaagcttagatagatatatagatatataggtaaaaactcaactacgactactcggagatgttgggtgctggatttcagttgacgagaggcagacacggcgacgatcctttctacacttccgcaaaaactcgcagggccaatcagcgcatcgatcagctccgtagagctcagagcgacgtctctaacgttccatcatcagctccttctccgcataaacaacaactcgagccgtccgatttatcttccagtaatctagatcggtttttagagtcggtcacaccatccgtaccggctcagtttttatccaagacattgctacgagaaagaagagcagatgatgattataataaacttgtgccttattttgtgcttggtgatatatgggactcatttgcagagtggagtgcttacggcaccggtgtgcctcttgttttgaataacaacaaggatcgtgttatccaatactatgtcccttctttgtcagccattcaaatctatgctcattctcatgccttggattcatctcttaaatcaaggcgtcctggtgatagtagcgacagtgattttcgggattcaagtagcgatgttagcagcgatagtgattccgagcgggtttctgctagagtagactgtatctcattgagggatcaacatcaggaagactcttccagtgatgatggcgaacctttaggctctcaaggtcgtttgatgtttgagtatcttgaaagagaccttccatacatccgtgaaccttttgctgataaggtcttggacctcgcagctcagtttcccgagctaatgacgctgagaagctgtgacttacttcggtcaagctggttttctgttgcatggtacccaatttacagaatacccacaggaccgacactgaaggacctggatgcttgtttcttgacgtatcattccctacacacatcttttggaggtgaaggcagtgaacaatcaatgagccttacgcaaccaagggagagcgagaagatgtcattgcctgtgtttgggcttgcttcatacaagttcagaggttcattatggacacccattgggggttcggagcaccagctcgtgaactctctgttccaagccgctgacaaatggctgcattcttgtcatgtcagccaccctgatttcctcttcttctgccgtcgttgagtagggtatgaagttgtgacgcactttgagagagtttcaaaaagaaactcaaaactgttgatatggagggttgttgtcagattcaggtttaaaaacgagttgatttttatgtctgtaagttatagataaaacgaattttgtttggtcagataatgtatgtgaaccgtgggcttacctcgtgttgttgt

SEQ ID NO: 105587 - protein, 369 aa, Arabidopsis thaliana
  peptide (1)..(369): Ceres Seq. ID no. 13617532
  misc_feature (64)..(366): Pfam Name: Protein of unknown function (DUF789) Pfam Description: Protein of unknown function (DUF789)
  misc_feature (1)..(369): Homolog of NCBI NO: 18379188 NR Description: expressed protein [Arabidopsis thaliana] predicted by genscan and genefinder [Arabidopsis thaliana]
  misc_feature (1)..(264): Homolog of NCBI NO: 25373432 NR Description: hypothetical protein At2g01260 [imported] -
  misc_feature (33)..(369): Homolog of NCBI NO: 22329567 NR Description: expressed protein [Arabidopsis thaliana]
  misc_feature (11)..(369): Homolog of NCBI NO: 31249743 NR Description: hypothetical protein [Oryza sativa (japonica
  misc_feature (11)..(369): Homolog of NCBI NO: 34897254 NR Description: hypothetical protein [Oryza sativa (japonica group)] >gi|28372687|gb|AAO39871.1| hypothetical protein [Oryza
  misc_feature (40)..(366): Homolog of NCBI NO: 15450996 NR Description: Unknown protein [Arabidopsis thaliana]
  misc_feature (64)..(366): Homolog of NCBI NO: 10177151 NR Description: gb|AAF31026.1~gene_id:K21P3.10~similar to unknown
  misc_feature (64)..(366): Homolog of NCBI NO: 22327664 NR Description: expressed protein [Arabidopsis thaliana] unknown protein [Arabidopsis thaliana]
  misc_feature (190)..(369): Homolog of NCBI NO: 34914654 NR Description: P0504D03.18 [Oryza sativa (japonica
  misc_feature (2)..(147): Homolog of NCBI NO: 34914654 NR Description: P0504D03.18 [Oryza sativa (japonica
MLGAGFQLTRGRHGDDPFYTSAKTRRANQRIDQLRRAQSDVSNVPSSAPSPHKQQLEPSDLSSSNLDRFLESVTPSVPAQFLSKTLLRERRADDDYNKLVPYFVLGDIWDSFAEWSAYGTGVPLVLNNNKDRVIQYYVPSLSAIQIYAHSHALDSSLKSRRPGDSSDSDFRDSSSDVSSDSDSERVSARVDCISLRDQHQEDSSSDDGEPLGSQGRLMFEYLERDLPYIREPFADKVLDLAAQFPELMTLRSCDLLRSSWFSVAWYPIYRIPTGPTLKDLDACFLTYHSLHTSFGGEGSEQSMSLTQPRESEKMSLPVFGLASYKFRGSLWTPIGGSEHQLVNSLFQAADKWLHSCHVSHPDFLFFCRR

SEQ ID NO: 105588 - DNA, 905 bp, Arabidopsis thaliana
  misc_feature (1)..(905): Ceres Seq. ID no. 13617537
  misc_feature: MA Experiment ID: 108434 Result: Down-regulated in Transcription
  misc_feature: MA Experiment 108434 PARAMETER Experiment Name: At_Root_Tips_cDNA_P Parameter: Tissue Value: Root Tips
  misc_feature: MA Experiment ID: 108461 Result: Down-regulated in Transcription
  misc_feature: MA Experiment 108461 PARAMETER Experiment Name: At_Germinating_Seeds_cDNA_P Parameter: Age (day) Value: 1 vs. 0
  misc_feature: MA Experiment 108461 PARAMETER Experiment Name: At_Germinating_Seeds_cDNA_P Parameter: Tissue Value: Germinating Seeds
  misc_feature: MA Experiment ID: 108462 Result: Down-regulated in Transcription
  misc_feature: MA Experiment 108462 PARAMETER Experiment Name: At_Germinating_Seeds_cDNA_P Parameter: Age (day) Value: 2 vs. 0
  misc_feature: MA Experiment 108462 PARAMETER Experiment Name: At_Germinating_Seeds_cDNA_P Parameter: Tissue Value: Germinating Seeds
  misc_feature: MA Experiment ID: 108488 Result: Down-regulated in Transcription
  misc_feature: MA Experiment ID: 108561 Result: Up-regulated in Transcription
  misc_feature: MA Experiment 108561 PARAMETER Experiment Name: At_100uM_ABA_cDNA_P Parameter: Timepoint (hr) Value: 6
  misc_feature: MA Experiment 108561 PARAMETER Experiment Name: At_100uM_ABA_cDNA_P Parameter: Tissue Value: Aerial
  misc_feature: MA Experiment 108561 PARAMETER Experiment Name: At_100uM_ABA_cDNA_P Parameter: Treatment Value: 100uM ABA vs. No Treatment
  misc_feature: MA Experiment ID: 108573 Result: Up-regulated in Transcription
  misc_feature: MA Experiment 108573 PARAMETER Experiment Name: At_Drought_cDNA_P Parameter: Timepoint (hr) Value: 6
  misc_feature: MA Experiment 108573 PARAMETER Experiment Name: At_Drought_cDNA_P Parameter: Tissue Value: Aerial
  misc_feature: MA Experiment 108573 PARAMETER Experiment Name: At_Drought_cDNA_P Parameter: Treatment Value: Drought vs. No Drought
  misc_feature: MA Experiment ID: 20000113 Result: Down-regulated in Transcription
  misc_feature: MA Experiment 20000113 PARAMETER Experiment Name: At_42deg_Heat_cDNA_P Parameter: Temperature (deg C) Value: 42 vs. 22
  misc_feature: MA Experiment 20000113 PARAMETER Experiment Name: At_42deg_Heat_cDNA_P Parameter: Timepoint (hr) Value: 8
  misc_feature: MA Experiment 20000113 PARAMETER Experiment Name: At_42deg_Heat_cDNA_P Parameter: Tissue Value: Aerial
  misc_feature: MA Experiment ID: 20000166 Result: Down-regulated in Transcription
  misc_feature: MA Experiment 20000166 PARAMETER Experiment Name: At_100uM_ABA_P Parameter: Age (day) Value: 14
  misc_feature: MA Experiment 20000166 PARAMETER Experiment Name: At_100uM_ABA_P Parameter: Organism Value: A. thaliana
  misc_feature: MA Experiment 20000166 PARAMETER Experiment Name: At_100uM_ABA_P Parameter: Plant Line Value: WS
  misc_feature: MA Experiment 20000166 PARAMETER Experiment Name: At_100uM_ABA_P Parameter: Timepoint (hr) Value: 1
  misc_feature: MA Experiment 20000166 PARAMETER Experiment Name: At_100uM_ABA_P Parameter: Tissue Value: Aerial
  misc_feature: MA Experiment 20000166 PARAMETER Experiment Name: At_100uM_ABA_P Parameter: Treatment Value: 100uM ABA vs. No Treatment
  misc_feature: MA Experiment ID: 20000179 Result: Down-regulated in Transcription
  misc_feature: MA Experiment 20000179 PARAMETER Experiment Name: At_Germinating_Seeds_P Parameter: Age (hr) Value: 6 vs. 0
  misc_feature: MA Experiment 20000179 PARAMETER Experiment Name: At_Germinating_Seeds_P Parameter: Tissue Value: Germinating Seeds
  misc_feature: MA Experiment ID: 20000185 Result: Down-regulated in Transcription
  misc_feature: MA Experiment 20000185 PARAMETER Experiment Name: At_Roots__P Parameter: Age (day) Value: 7 vs. 21
  misc_feature: MA Experiment 20000185 PARAMETER Experiment Name: At_Roots__P Parameter: Organism Value: A. thaliana
  misc_feature: MA Experiment 20000185 PARAMETER Experiment Name: At_Roots__P Parameter: Tissue Value: Roots vs. Whole Plant
  misc_feature: MA Experiment ID: 20000234 Result: Down-regulated in Transcription
  misc_feature: MA Experiment 20000234 PARAMETER Experiment Name: At_Siliques_P Parameter: Age (day) Value: 21
  misc_feature: MA Experiment 20000234 PARAMETER Experiment Name: At_Siliques_P Parameter: Organism Value: A. thaliana
  misc_feature: MA Experiment 20000234 PARAMETER Experiment Name: At_Siliques_P Parameter: Plant Line Value: WS
  misc_feature: MA Experiment 20000234 PARAMETER Experiment Name: At_Siliques_P Parameter: Tissue Value: Less Than 5mm Siliques vs. Whole Plant
  misc_feature: MA Experiment ID: 20000235 Result: Down-regulated in Transcription
  misc_feature: MA Experiment 20000235 PARAMETER Experiment Name: At_Siliques_P Parameter: Age (day) Value: 21
  misc_feature: MA Experiment 20000235 PARAMETER Experiment Name: At_Siliques_P Parameter: Organism Value: A. thaliana
  misc_feature: MA Experiment 20000235 PARAMETER Experiment Name: At_Siliques_P Parameter: Plant Line Value: WS
  misc_feature: MA Experiment 20000235 PARAMETER Experiment Name: At_Siliques_P Parameter: Tissue Value: 5-10mm Siliques vs. Whole Plant
  misc_feature: MA Experiment ID: 20000265 Result: Down-regulated in Transcription
  misc_feature: MA Experiment 20000265 PARAMETER Experiment Name: At_Open_Flower_P Parameter: Age (day) Value: 21
  misc_feature: MA Experiment 20000265 PARAMETER Experiment Name: At_Open_Flower_P Parameter: Plant Line Value: WS
  misc_feature: MA Experiment 20000265 PARAMETER Experiment Name: At_Open_Flower_P Parameter: Tissue Value: Closed Flower vs. Whole Plant
  misc_feature: MA Experiment ID: 20000286 Result: Down-regulated in Transcription
  misc_feature: MA Experiment 20000286 PARAMETER Experiment Name: At_Open_Flower_P Parameter: Age (day) Value: 21
  misc_feature: MA Experiment 20000286 PARAMETER Experiment Name: At_Open_Flower_P Parameter: Plant Line Value: WS
  misc_feature: MA Experiment 20000286 PARAMETER Experiment Name: At_Open_Flower_P Parameter: Tissue Value: Half Open vs. Whole Plant
  misc_feature: MA Experiment ID: 20000437 Result: Up-regulated in Transcription
  misc_feature: MA Experiment 20000437 PARAMETER Experiment Name: At_Drought_P Parameter: Age (day) Value: 8
  misc_feature: MA Experiment 20000437 PARAMETER Experiment Name: At_Drought_P Parameter: Organism Value: A. thaliana
  misc_feature: MA Experiment 20000437 PARAMETER Experiment Name: At_Drought_P Parameter: Plant Line Value: WS
  misc_feature: MA Experiment 20000437 PARAMETER Experiment Name: At_Drought_P Parameter: Timepoint (hr) Value: 24
  misc_feature: MA Experiment 20000437 PARAMETER Experiment Name: At_Drought_P Parameter: Tissue Value: Whole Plant
  misc_feature: MA Experiment 20000437 PARAMETER Experiment Name: At_Drought_P Parameter: Treatment Value: Drought vs. No Drought
  misc_feature: MA Experiment ID: 20000439 Result: Down-regulated in Transcription
  misc_feature: MA Experiment 20000439 PARAMETER Experiment Name: At_Roots__P Parameter: Age (day) Value: 14 vs. 21
  misc_feature: MA Experiment 20000439 PARAMETER Experiment Name: At_Roots__P Parameter: Organism Value: A. thaliana
  misc_feature: MA Experiment 20000439 PARAMETER Experiment Name: At_Roots__P Parameter: Tissue Value: Roots vs. Whole Plant
  misc_feature: MA Experiment ID: 20000451 Result: Up-regulated in Transcription
  misc_feature: MA Experiment 20000451 PARAMETER Experiment Name: At_CS6879_Shoots-Roots_P Parameter: Age (day) Value: 14
  misc_feature: MA Experiment 20000451 PARAMETER Experiment Name: At_CS6879_Shoots-Roots_P Parameter: Organism Value: A. thaliana
  misc_feature: MA Experiment 20000451 PARAMETER Experiment Name: At_CS6879_Shoots-Roots_P Parameter: Plant Line Value: CS6879 vs. WS
  misc_feature: MA Experiment 20000451 PARAMETER Experiment Name: At_CS6879_Shoots-Roots_P Parameter: Tissue Value: Roots
  misc_feature: MA Experiment ID: 20000495 Result: Up-regulated in Transcription
  misc_feature: MA Experiment 20000495 PARAMETER Experiment Name: At_Guard_Cells_P Parameter: Harvest Date Value: 8/2/2002
  misc_feature: MA Experiment 20000495 PARAMETER Experiment Name: At_Guard_Cells_P Parameter: Organism Value: A. thaliana
  misc_feature: MA Experiment 20000495 PARAMETER Experiment Name: At_Guard_Cells_P Parameter: Tissue Value: Guard Cells vs. Leaves
  misc_feature: MA Experiment ID: 20000573 Result: Down-regulated in Transcription
  misc_feature: MA Experiment 20000573 PARAMETER Experiment Name: At_100uM_ABA_Mutants__P Parameter: Organism Value: A. thaliana
  misc_feature: MA Experiment 20000573 PARAMETER Experiment Name: At_100uM_ABA_Mutants__P Parameter: Plant Line Value: CS22 vs. Ler wt
  misc_feature: MA Experiment 20000573 PARAMETER Experiment Name: At_100uM_ABA_Mutants__P Parameter: Timepoint (hr) Value: N/A
  misc_feature: MA Experiment 20000573 PARAMETER Experiment Name: At_100uM_ABA_Mutants__P Parameter: Tissue Value: Whole Plant
  misc_feature: MA Experiment 20000573 PARAMETER Experiment Name: At_100uM_ABA_Mutants__P Parameter: Treatment Value: None
  misc_feature: MA Experiment ID: 20000794 Result: Up-regulated in Transcription
  misc_feature: MA Experiment 20000794 PARAMETER Experiment Name: At_Petals_P Parameter: Age (day) Value: 23-25 days
  misc_feature: MA Experiment 20000794 PARAMETER Experiment Name: At_Petals_P Parameter: Plant Line Value: WS
  misc_feature: MA Experiment 20000794 PARAMETER Experiment Name: At_Petals_P Parameter: Tissue Value: Petals vs. Whole plant
  misc_feature: MA Experiment ID: 20001247 Result: Up-regulated in Transcription
  misc_feature: MA Experiment 20001247 PARAMETER Experiment Name: At_Far-red-induction_P Parameter: Age (day) Value: 7
  misc_feature: MA Experiment 20001247 PARAMETER Experiment Name: At_Far-red-induction_P Parameter: Light Value: Far-red vs. White
  misc_feature: MA Experiment 20001247 PARAMETER Experiment Name: At_Far-red-induction_P Parameter: Organism Value: A. thaliana
  misc_feature: MA Experiment 20001247 PARAMETER Experiment Name: At_Far-red-induction_P Parameter: Plant Line Value: Columbia
  misc_feature: MA Experiment 20001247 PARAMETER Experiment Name: At_Far-red-induction_P Parameter: Timepoint (hr) Value: 1
  misc_feature: MA Experiment 20001247 PARAMETER Experiment Name: At_Far-red-induction_P Parameter: Tissue Value: Whole Plant
  misc_feature: MA Experiment ID: 20001451 Result: Up-regulated in Transcription
  misc_feature: MA Experiment 20001451 PARAMETER Experiment Name: At_Far-red-induction_P Parameter: Age (day) Value: 7
  misc_feature: MA Experiment 20001451 PARAMETER Experiment Name: At_Far-red-induction_P Parameter: Light Value: Far-red vs. White
  misc_feature: MA Experiment 20001451 PARAMETER Experiment Name: At_Far-red-induction_P Parameter: Organism Value: A. thaliana
  misc_feature: MA Experiment 20001451 PARAMETER Experiment Name: At_Far-red-induction_P Parameter: Plant Line Value: Columbia
  misc_feature: MA Experiment 20001451 PARAMETER Experiment Name: At_Far-red-induction_P Parameter: Timepoint (hr) Value: 24
  misc_feature: MA Experiment 20001451 PARAMETER Experiment Name: At_Far-red-induction_P Parameter: Tissue Value: Whole Plant
  misc_feature: MA Experiment ID: 20001556 Result: Up-regulated in Transcription
  misc_feature: MA Experiment 20001556 PARAMETER Experiment Name: At_Drought_Soil_Dry_P Parameter: Age (day) Value: 26
  misc_feature: MA Experiment 20001556 PARAMETER Experiment Name: At_Drought_Soil_Dry_P Parameter: Organism Value: A. thaliana
  misc_feature: MA Experiment 20001556 PARAMETER Experiment Name: At_Drought_Soil_Dry_P Parameter: Plant Line Value: WS
  misc_feature: MA Experiment 20001556 PARAMETER Experiment Name: At_Drought_Soil_Dry_P Parameter: Post Timepoint (hr) Value: None
  misc_feature: MA Experiment 20001556 PARAMETER Experiment Name: At_Drought_Soil_Dry_P Parameter: Post-Treatment Value: None
  misc_feature: MA Experiment 20001556 PARAMETER Experiment Name: At_Drought_Soil_Dry_P Parameter: Timepoint (day) Value: 12
  misc_feature: MA Experiment 20001556 PARAMETER Experiment Name: At_Drought_Soil_Dry_P Parameter: Treatment Value: Drought vs. No Drought
  misc_feature: MA Experiment ID: 20001557 Result: Up-regulated in Transcription
  misc_feature: MA Experiment 20001557 PARAMETER Experiment Name: At_Drought_Soil_Dry_P Parameter: Age (day) Value: 27
  misc_feature: MA Experiment 20001557 PARAMETER Experiment Name: At_Drought_Soil_Dry_P Parameter: Organism Value: A. thaliana
  misc_feature: MA Experiment 20001557 PARAMETER Experiment Name: At_Drought_Soil_Dry_P Parameter: Plant Line Value: WS
  misc_feature: MA Experiment 20001557 PARAMETER Experiment Name: At_Drought_Soil_Dry_P Parameter: Post Timepoint (hr) Value: 3
  misc_feature: MA Experiment 20001557 PARAMETER Experiment Name: At_Drought_Soil_Dry_P Parameter: Post-Treatment Value: Re-Water vs. No Drought
  misc_feature: MA Experiment 20001557 PARAMETER Experiment Name: At_Drought_Soil_Dry_P Parameter: Timepoint (day) Value: 13
  misc_feature: MA Experiment 20001557 PARAMETER Experiment Name: At_Drought_Soil_Dry_P Parameter: Treatment Value: Drought vs. No Drought
  misc_feature: MA Experiment ID: 20001559 Result: Up-regulated in Transcription
  misc_feature: MA Experiment 20001559 PARAMETER Experiment Name: At_Drought_Soil_Dry_P Parameter: Age (day) Value: 28
  misc_feature: MA Experiment 20001559 PARAMETER Experiment Name: At_Drought_Soil_Dry_P Parameter: Organism Value: A. thaliana
  misc_feature: MA Experiment 20001559 PARAMETER Experiment Name: At_Drought_Soil_Dry_P Parameter: Plant Line Value: WS
  misc_feature: MA Experiment 20001559 PARAMETER Experiment Name: At_Drought_Soil_Dry_P Parameter: Post Timepoint (hr) Value: 29
  misc_feature: MA Experiment 20001559 PARAMETER Experiment Name: At_Drought_Soil_Dry_P Parameter: Post-Treatment Value: Re-Water vs. No Drought
  misc_feature: MA Experiment 20001559 PARAMETER Experiment Name: At_Drought_Soil_Dry_P Parameter: Timepoint (day) Value: 14
  misc_feature: MA Experiment 20001559 PARAMETER Experiment Name: At_Drought_Soil_Dry_P Parameter: Treatment Value: Drought vs. No Drought
  misc_feature: MA Experiment ID: 20001904 Result: Up-regulated in Transcription
  misc_feature: MA Experiment 20001904 PARAMETER Experiment Name: At_Drought_Reproduction_P Parameter: Age (day) Value: 37
  misc_feature: MA Experiment 20001904 PARAMETER Experiment Name: At_Drought_Reproduction_P Parameter: Organism Value: A. thaliana
  misc_feature: MA Experiment 20001904 PARAMETER Experiment Name: At_Drought_Reproduction_P Parameter: Plant Line Value: WS
  misc_feature: MA Experiment 20001904 PARAMETER Experiment Name: At_Drought_Reproduction_P Parameter: Timepoint (day) Value: 7
  misc_feature: MA Experiment 20001904 PARAMETER Experiment Name: At_Drought_Reproduction_P Parameter: Tissue Value: Rosettes
  misc_feature: MA Experiment 20001904 PARAMETER Experiment Name: At_Drought_Reproduction_P Parameter: Treatment Value: Drought vs. No Drought
  misc_feature: MA Experiment ID: 20001906 Result: Up-regulated in Transcription
  misc_feature: MA Experiment 20001906 PARAMETER Experiment Name: At_Drought_Reproduction_P Parameter: Age (day) Value: 35
  misc_feature: MA Experiment 20001906 PARAMETER Experiment Name: At_Drought_Reproduction_P Parameter: Organism Value: A. thaliana
  misc_feature: MA Experiment 20001906 PARAMETER Experiment Name: At_Drought_Reproduction_P Parameter: Plant Line Value: WS
  misc_feature: MA Experiment 20001906 PARAMETER Experiment Name: At_Drought_Reproduction_P Parameter: Timepoint (day) Value: 5
  misc_feature: MA Experiment 20001906 PARAMETER Experiment Name: At_Drought_Reproduction_P Parameter: Tissue Value: Siliques
  misc_feature: MA Experiment 20001906 PARAMETER Experiment Name: At_Drought_Reproduction_P Parameter: Treatment Value: Drought vs. No Drought
  misc_feature: MA Experiment ID: 20001908 Result: Up-regulated in Transcription
  misc_feature: MA Experiment 20001908 PARAMETER Experiment Name: At_Drought_Reproduction_P Parameter: Age (day) Value: 40
  misc_feature: MA Experiment 20001908 PARAMETER Experiment Name: At_Drought_Reproduction_P Parameter: Organism Value: A. thaliana
  misc_feature: MA Experiment 20001908 PARAMETER Experiment Name: At_Drought_Reproduction_P Parameter: Plant Line Value: WS
  misc_feature: MA Experiment 20001908 PARAMETER Experiment Name: At_Drought_Reproduction_P Parameter: Timepoint (day) Value: 10
  misc_feature: MA Experiment 20001908 PARAMETER Experiment Name: At_Drought_Reproduction_P Parameter: Tissue Value: Siliques
  misc_feature: MA Experiment 20001908 PARAMETER Experiment Name: At_Drought_Reproduction_P Parameter: Treatment Value: Drought vs. No Drought
  misc_feature: MA Experiment ID: 20001910 Result: Up-regulated in Transcription
  misc_feature: MA Experiment 20001910 PARAMETER Experiment Name: At_Drought_Reproduction_P Parameter: Age (day) Value: 37
  misc_feature: MA Experiment 20001910 PARAMETER Experiment Name: At_Drought_Reproduction_P Parameter: Organism Value: A. thaliana
  misc_feature: MA Experiment 20001910 PARAMETER Experiment Name: At_Drought_Reproduction_P Parameter: Plant Line Value: WS
  misc_feature: MA Experiment 20001910 PARAMETER Experiment Name: At_Drought_Reproduction_P Parameter: Timepoint (day) Value: 7
  misc_feature: MA Experiment 20001910 PARAMETER Experiment Name: At_Drought_Reproduction_P Parameter: Tissue Value: Flowers
  misc_feature: MA Experiment 20001910 PARAMETER Experiment Name: At_Drought_Reproduction_P Parameter: Treatment Value: Drought vs. No Drought
aatcatcaaacatccaaactctatcctttcgttttcttgtcagacaaaaactaatactagatgggtaacagtttaggcggcaagaaaacgaccaaagtcatgaagatagacggcgagacttttaaactgaaaactccggtgacggctgaggaggtcttaaaagactttcccggccacgtcttgttagactccgaatccgtcaagcactacggtgcccgagccaaaccacttgaggcgaagcagaggttggaggcgaagcggctttattttgtggtggagccggtgaaagagtgtccaccgagaagggtaagatcaggaattcacgtgagtgcaaaggagaggcttgagagtctcatgctggcccggagatcgtcttccgatctctccatactcaaaccaccaggaggatggacgacggaggaagaagaaggagcggtgaggagggtgaaggtgaggattcccaaagctgagcttgaaaagctcgttaaagaaggagccaccgaagccgaagctacgcagaagatcgctgctctctttatggccaaacagaggcaagaggaggcatatcagaacacacgacaggacgagcccgccaccacggccaccgccaccgccaccaccaccgccacaagaggagtcaaatcccgtttgaaacgagtgagtttcatggcggaaagaggaggagggagcgagatcactgtagcttgaaccaataaacatatgtattagagaatgcttcccaacgtttctgcaaattctatgtacataaaaaacgcagaaagtttgagagaaagcttattcagatattcatccatgtctccactctattgtactcaagagttttactattattacattgtagaagaaacagtcattttataggcagattcattcgtttgcctctc

SEQ ID NO: 105589 - protein, 215 aa, Arabidopsis thaliana
  peptide (1)..(215): Ceres Seq. ID no. 13617538
  misc_feature (1)..(215): Homolog of NCBI NO: 30677912 NR Description: expressed protein [Arabidopsis thaliana]
  misc_feature (1)..(197): Homolog of NCBI NO: 25371187 NR Description: hypothetical protein At2g01340 [imported] - thaliana >gi|4262241|gb|AAD14534.1| unknown protein [Arabidopsis
MGNSLGGKKTTKVMKIDGETFKLKTPVTAEEVLKDFPGHVLLDSESVKHYGARAKPLEAKQRLEAKRLYFVVEPVKECPPRRVRSGIHVSAKERLESLMLARRSSSDLSILKPPGGWTTEEEEGAVRRVKVRIPKAELEKLVKEGATEAEATQKIAALFMAKQRQEEAYQNTRQDEPATTATATATTTATRGVKSRLKRVSFMAERGGGSEITVA

SEQ ID NO: 105590 - protein, 202 aa, Arabidopsis thaliana
  peptide (1)..(202): Ceres Seq. ID no. 13617539
  misc_feature (1)..(202): Homolog of NCBI NO: 30677912 NR Description: expressed protein [Arabidopsis thaliana]
  misc_feature (1)..(184): Homolog of NCBI NO: 25371187 NR Description: hypothetical protein At2g01340 [imported] - thaliana >gi|4262241|gb|AAD14534.1| unknown protein [Arabidopsis
MKIDGETFKLKTPVTAEEVLKDFPGHVLLDSESVKHYGARAKPLEAKQRLEAKRLYFVVEPVKECPPRRVRSGIHVSAKERLESLMLARRSSSDLSILKPPGGWTTEEEEGAVRRVKVRIPKAELEKLVKEGATEAEATQKIAALFMAKQRQEEAYQNTRQDEPATTATATATTTATRGVKSRLKRVSFMAERGGGSEITVA

SEQ ID NO: 105591 - protein, 117 aa, Arabidopsis thaliana
  peptide (1)..(117): Ceres Seq. ID no. 13617540
  misc_feature (1)..(117): Homolog of NCBI NO: 30677912 NR Description: expressed protein [Arabidopsis thaliana]
  misc_feature (1)..(99): Homolog of NCBI NO: 25371187 NR Description: hypothetical protein At2g01340 [imported] - thaliana >gi|4262241|gb|AAD14534.1| unknown protein [Arabidopsis
MLARRSSSDLSILKPPGGWTTEEEEGAVRRVKVRIPKAELEKLVKEGATEAEATQKIAALFMAKQRQEEAYQNTRQDEPATTATATATTTATRGVKSRLKRVSFMAERGGGSEITVA

SEQ ID NO: 105592 - DNA, 1131 bp, Arabidopsis thaliana
  misc_feature (1)..(1131): Ceres Seq. ID no. 13617549
  misc_feature: MA Experiment ID: 108488 Result: Down-regulated in Transcription
  misc_feature: MA Experiment ID: 108561 Result: Up-regulated in Transcription
  misc_feature: MA Experiment 108561 PARAMETER Experiment Name: At_100uM_ABA_cDNA_P Parameter: Timepoint (hr) Value: 6
  misc_feature: MA Experiment 108561 PARAMETER Experiment Name: At_100uM_ABA_cDNA_P Parameter: Tissue Value: Aerial
  misc_feature: MA Experiment 108561 PARAMETER Experiment Name: At_100uM_ABA_cDNA_P Parameter: Treatment Value: 100uM ABA vs. No Treatment
  misc_feature: MA Experiment ID: 108579 Result: Down-regulated in Transcription
  misc_feature: MA Experiment 108579 PARAMETER Experiment Name: At_4deg_Cold_cDNA_P Parameter: Temperature (deg C) Value: 4 vs. 22
  misc_feature: MA Experiment 108579 PARAMETER Experiment Name: At_4deg_Cold_cDNA_P Parameter: Timepoint (hr) Value: 6
  misc_feature: MA Experiment 108579 PARAMETER Experiment Name: At_4deg_Cold_cDNA_P Parameter: Tissue Value: Aerial
  misc_feature: MA Experiment ID: 108595 Result: Down-regulated in Transcription
  misc_feature: MA Experiment 108595 PARAMETER Experiment Name: At_Ler-pi_Ovule_cDNA_P Parameter: Plant Line Value: null
  misc_feature: MA Experiment ID: 108605 Result: Up-regulated in Transcription
  misc_feature: MA Experiment 108605 PARAMETER Experiment Name: At_100uM_ABA_cDNA_P Parameter: Timepoint (hr) Value: 6
  misc_feature: MA Experiment 108605 PARAMETER Experiment Name: At_100uM_ABA_cDNA_P Parameter: Tissue Value: Aerial
  misc_feature: MA Experiment 108605 PARAMETER Experiment Name: At_100uM_ABA_cDNA_P Parameter: Treatment Value: 100uM ABA vs. No Treatment
  misc_feature: MA Experiment ID: 20000069 Result: Up-regulated in Transcription
  misc_feature: MA Experiment 20000069 PARAMETER Experiment Name: At_100uM_ABA_Mutants_cDNA_P Parameter: Plant Line Value: CS23
  misc_feature: MA Experiment 20000069 PARAMETER Experiment Name: At_100uM_ABA_Mutants_cDNA_P Parameter: Timepoint (hr) Value: 6
  misc_feature: MA Experiment 20000069 PARAMETER Experiment Name: At_100uM_ABA_Mutants_cDNA_P Parameter: Tissue Value: Aerial
  misc_feature: MA Experiment 20000069 PARAMETER Experiment Name: At_100uM_ABA_Mutants_cDNA_P Parameter: Treatment Value: 100uM ABA vs. No Treatment
  misc_feature: MA Experiment ID: 20000070 Result: Up-regulated in Transcription
  misc_feature: MA Experiment 20000070 PARAMETER Experiment Name: At_100uM_ABA_Mutants_cDNA_P Parameter: Plant Line Value: CS24
  misc_feature: MA Experiment 20000070 PARAMETER Experiment Name: At_100uM_ABA_Mutants_cDNA_P Parameter: Timepoint (hr) Value: 6
  misc_feature: MA Experiment 20000070 PARAMETER Experiment Name: At_100uM_ABA_Mutants_cDNA_P Parameter: Tissue Value: Aerial
  misc_feature: MA Experiment 20000070 PARAMETER Experiment Name: At_100uM_ABA_Mutants_cDNA_P Parameter: Treatment Value: 100uM ABA vs. No Treatment
  misc_feature: MA Experiment ID: 20000071 Result: Up-regulated in Transcription
  misc_feature: MA Experiment 20000071 PARAMETER Experiment Name: At_100uM_ABA_Mutants_cDNA_P Parameter: Plant Line Value: CS8104
  misc_feature: MA Experiment 20000071 PARAMETER Experiment Name: At_100uM_ABA_Mutants_cDNA_P Parameter: Timepoint (hr) Value: 6
  misc_feature: MA Experiment 20000071 PARAMETER Experiment Name: At_100uM_ABA_Mutants_cDNA_P Parameter: Tissue Value: Aerial
  misc_feature: MA Experiment 20000071 PARAMETER Experiment Name: At_100uM_ABA_Mutants_cDNA_P Parameter: Treatment Value: 100uM ABA vs. No Treatment
  misc_feature: MA Experiment ID: 20000072 Result: Up-regulated in Transcription
  misc_feature: MA Experiment 20000072 PARAMETER Experiment Name: At_100uM_ABA_Mutants_cDNA_P Parameter: Plant Line Value: CS8105
  misc_feature: MA Experiment 20000072 PARAMETER Experiment Name: At_100uM_ABA_Mutants_cDNA_P Parameter: Timepoint (hr) Value: 6
  misc_feature: MA Experiment 20000072 PARAMETER Experiment Name: At_100uM_ABA_Mutants_cDNA_P Parameter: Tissue Value: Aerial
  misc_feature: MA Experiment 20000072 PARAMETER Experiment Name: At_100uM_ABA_Mutants_cDNA_P Parameter: Treatment Value: 100uM ABA vs. No Treatment
  misc_feature: MA Experiment ID: 20000117 Result: Up-regulated in Transcription
  misc_feature: MA Experiment 20000117 PARAMETER Experiment Name: At_100uM_ABA_Mutants_cDNA_P Parameter: Plant Line Value: Columbia
  misc_feature: MA Experiment 20000117 PARAMETER Experiment Name: At_100uM_ABA_Mutants_cDNA_P Parameter: Timepoint (hr) Value: 6
  misc_feature: MA Experiment 20000117 PARAMETER Experiment Name: At_100uM_ABA_Mutants_cDNA_P Parameter: Tissue Value: Aerial
  misc_feature: MA Experiment 20000117 PARAMETER Experiment Name: At_100uM_ABA_Mutants_cDNA_P Parameter: Treatment Value: 100uM ABA vs. No Treatment
  misc_feature: MA Experiment ID: 20000184 Result: Down-regulated in Transcription
  misc_feature: MA Experiment 20000184 PARAMETER Experiment Name: At_Shoots__P Parameter: Age (day) Value: 7
  misc_feature: MA Experiment 20000184 PARAMETER Experiment Name: At_Shoots__P Parameter: Tissue Value: Shoots vs. Whole Plant
  misc_feature: MA Experiment ID: 20000214 Result: Down-regulated in Transcription
  misc_feature: MA Experiment 20000214 PARAMETER Experiment Name: At_4deg_Cold_P Parameter: Timepoint (hr) Value: 6
  misc_feature: MA Experiment ID: 20000224 Result: Down-regulated in Transcription
  misc_feature: MA Experiment ID: 20000437 Result: Up-regulated in Transcription
  misc_feature: MA Experiment 20000437 PARAMETER Experiment Name: At_Drought_P Parameter: Age (day) Value: 8
  misc_feature: MA Experiment 20000437 PARAMETER Experiment Name: At_Drought_P Parameter: Organism Value: A. thaliana
  misc_feature: MA Experiment 20000437 PARAMETER Experiment Name: At_Drought_P Parameter: Plant Line Value: WS
  misc_feature: MA Experiment 20000437 PARAMETER Experiment Name: At_Drought_P Parameter: Timepoint (hr) Value: 24
  misc_feature: MA Experiment 20000437 PARAMETER Experiment Name: At_Drought_P Parameter: Tissue Value: Whole Plant
  misc_feature: MA Experiment 20000437 PARAMETER Experiment Name: At_Drought_P Parameter: Treatment Value: Drought vs. No Drought
aacaacagataaatttgttggtttcaagtattatcaatttcccggcgaaatctccaccagagttatgggaatcaccggaagtctaacgccagatcagctcgattttttccactctcaagggtatttggtaatcgaatcgttcgcgagtgaggatgagataagaggcttaaggaagaggatggatgagttgcttaatcagtttgattgttccgtctcctctatcttctccaccaaaaatcagaagcacaccacagataattacttctttgagagcgctgagaaaatctccttcttctttgaagaaaaagcttttggtgatgatgggaaattgaagcaacccaaacaactctctataaacaaagttgggcatgcactgcatgagcttgacccattgtataaggatttcacatattcgtcaaagttttcaagtttggcatcatccttaggttacaggagaccagttgtcatgcagtctatgtatattttcaagcaacctggaattggaggcgaagttgtgccgcaccaagataattcttttgtgtacacggatccacagagttgtactggtctctggattgctcttgaagattctacattagttaatggttgtctttgggcaattcctggatctcataagaatggtttagttagaaggtttatccgtggtgacaacggtataacctttgatcagccatccccatcttacgagcagaaagattttgtgtctattgaaatgaaagcaggctcattgattgccattcatggtgatctaatccatcaaagtttcgagaatctatcctcgaagtcaagacatgcctatagcttacatgtagtagaatctgatggatgtaaatgggcaaaagacaactggatacaaagagcaaaaatgccggagcctctctatgttcttccttgattcaagccagtcgtggaaaaacactgtgagttactgtttatcaaatttcttttaagatcactatctttgtgagaactatgaacagtaataagaacatggctaaaagggccttcttgtgtcgtttacttgttgaaatacaatttgtttcttcttggtctctgtagttctgtctttaaataaccaaactctgtggtcaataaagtgtgacagtgatt

SEQ ID NO: 105593 - protein, 304 aa, Arabidopsis thaliana
  peptide (1)..(304): Ceres Seq. ID no. 13617550
  misc_feature (34)..(272): Pfam Name: Phytanoyl-CoA dioxygenase (PhyH) Pfam Description: Phytanoyl-CoA dioxygenase (PhyH)
  misc_feature (22)..(304): Homolog of NCBI NO: 18379234 NR Description: expressed protein [Arabidopsis thaliana] At2g01490/F2I9.11 [Arabidopsis thaliana] expressed protein [Arabidopsis thaliana]
  misc_feature (22)..(304): Homolog of NCBI NO: 21593659 NR Description: unknown [Arabidopsis thaliana]
  misc_feature (22)..(213): Homolog of NCBI NO: 25410910 NR Description: hypothetical protein At2g01490 [imported] -
  misc_feature (26)..(301): Homolog of NCBI NO: 13937293 NR Description: putative LN1 protein [Oryza sativa]
  misc_feature (28)..(301): Homolog of NCBI NO: 31807321 NR Description: Unknown (protein for MGC:61786) [Homo sapiens]
  misc_feature (33)..(301): Homolog of NCBI NO: 31208571 NR Description: ENSANGP00000010487 [Anopheles gambiae]
  misc_feature (12)..(302): Homolog of NCBI NO: 34853210 NR Description: similar to hypothetical protein MGC49146 [Rattus
  misc_feature (28)..(301): Homolog of NCBI NO: 25058918 NR Description: MGC49146 protein [Mus musculus]
  misc_feature (28)..(301): Homolog of NCBI NO: 12837748 NR Description: unnamed protein product [Mus musculus]
  misc_feature (40)..(301): Homolog of NCBI NO: 31196421 NR Description: ENSANGP00000012829 [Anopheles gambiae]
TTDKFVGFKYYQFPGEISTRVMGITGSLTPDQLDFFHSQGYLVIESFASEDEIRGLRKRMDELLNQFDCSVSSIFSTKNQKHTTDNYFFESAEKISFFFEEKAFGDDGKLKQPKQLSINKVGHALHELDPLYKDFTYSSKFSSLASSLGYRRPVVMQSMYIFKQPGIGGEVVPHQDNSFVYTDPQSCTGLWIALEDSTLVNGCLWAIPGSHKNGLVRRFIRGDNGITFDQPSPSYEQKDFVSIEMKAGSLIAIHGDLIHQSFENLSSKSRHAYSLHVVESDGCKWAKDNWIQRAKMPEPLYVLP

SEQ ID NO: 105594 - protein, 283 aa, Arabidopsis thaliana; identical to SEQ ID NO: 25615
  peptide (1)..(283): Ceres Seq. ID no. 13617551
  misc_feature (13)..(251): Pfam Name: Phytanoyl-CoA dioxygenase (PhyH) Pfam Description: Phytanoyl-CoA dioxygenase (PhyH)
  misc_feature (1)..(283): Homolog of NCBI NO: 18379234 NR Description: expressed protein [Arabidopsis thaliana] At2g01490/F2I9.11 [Arabidopsis thaliana] expressed protein [Arabidopsis thaliana]
  misc_feature (1)..(283): Homolog of NCBI NO: 21593659 NR Description: unknown [Arabidopsis thaliana]
  misc_feature (1)..(192): Homolog of NCBI NO: 25410910 NR Description: hypothetical protein At2g01490 [imported] -
  misc_feature (5)..(280): Homolog of NCBI NO: 13937293 NR Description: putative LN1 protein [Oryza sativa]
  misc_feature (7)..(280): Homolog of NCBI NO: 31807321 NR Description: Unknown (protein for MGC:61786) [Homo sapiens]
  misc_feature (12)..(280): Homolog of NCBI NO: 31208571 NR Description: ENSANGP00000010487 [Anopheles gambiae]
  misc_feature (1)..(281): Homolog of NCBI NO: 34853210 NR Description: similar to hypothetical protein MGC49146 [Rattus
  misc_feature (7)..(280): Homolog of NCBI NO: 25058918 NR Description: MGC49146 protein [Mus musculus]
  misc_feature (7)..(280): Homolog of NCBI NO: 12837748 NR Description: unnamed protein product [Mus musculus]
  misc_feature (19)..(280): Homolog of NCBI NO: 31196421 NR Description: ENSANGP00000012829 [Anopheles gambiae]

SEQ ID NO: 105595 - protein, 245 aa, Arabidopsis thaliana; identical to SEQ ID NO: 25616
  peptide (1)..(245): Ceres Seq. ID no. 13617552
  misc_feature (1)..(213): Pfam Name: Phytanoyl-CoA dioxygenase (PhyH) Pfam Description: Phytanoyl-CoA dioxygenase (PhyH)
  misc_feature (1)..(245): Homolog of NCBI NO: 18379234 NR Description: expressed protein [Arabidopsis thaliana] At2g01490/F2I9.11 [Arabidopsis thaliana] expressed protein [Arabidopsis thaliana]
  misc_feature (1)..(245): Homolog of NCBI NO: 21593659 NR Description: unknown [Arabidopsis thaliana]
  misc_feature (1)..(154): Homolog of NCBI NO: 25410910 NR Description: hypothetical protein At2g01490 [imported] -
  misc_feature (1)..(242): Homolog of NCBI NO: 13937293 NR Description: putative LN1 protein [Oryza sativa]
  misc_feature (1)..(242): Homolog of NCBI NO: 31807321 NR Description: Unknown (protein for MGC:61786) [Homo sapiens]
  misc_feature (1)..(242): Homolog of NCBI NO: 31208571 NR Description: ENSANGP00000010487 [Anopheles gambiae]
  misc_feature (1)..(243): Homolog of NCBI NO: 34853210 NR Description: similar to hypothetical protein MGC49146 [Rattus
  misc_feature (1)..(242): Homolog of NCBI NO: 25058918 NR Description: MGC49146 protein [Mus musculus]
  misc_feature (1)..(242): Homolog of NCBI NO: 12837748 NR Description: unnamed protein product [Mus musculus]
  misc_feature (1)..(242): Homolog of NCBI NO: 31196421 NR Description: ENSANGP00000012829 [Anopheles gambiae]

SEQ ID NO: 105596 - DNA, 915 bp, Arabidopsis thaliana
  misc_feature (1)..(915): Ceres Seq. ID no. 13617555
  misc_feature: MA Experiment ID: 108462 Result: Up-regulated in Transcription
  misc_feature: MA Experiment 108462 PARAMETER Experiment Name: At_Germinating_Seeds_cDNA_P Parameter: Age (day) Value: 2 vs. 0
  misc_feature: MA Experiment 108462 PARAMETER Experiment Name: At_Germinating_Seeds_cDNA_P Parameter: Tissue Value: Germinating Seeds
  misc_feature: MA Experiment ID: 108463 Result: Up-regulated in Transcription
  misc_feature: MA Experiment 108463 PARAMETER Experiment Name: At_Germinating_Seeds_cDNA_P Parameter: Age (day) Value: 3 vs. 0
  misc_feature: MA Experiment 108463 PARAMETER Experiment Name: At_Germinating_Seeds_cDNA_P Parameter: Tissue Value: Germinating Seeds
  misc_feature: MA Experiment ID: 108488 Result: Down-regulated in Transcription
  misc_feature: MA Experiment ID: 108501 Result: Up-regulated in Transcription
  misc_feature: MA Experiment 108501 PARAMETER Experiment Name: At_ap2_floral_buds_cDNA_P Parameter: Plant Line Value: ap2 (Ler.)
  misc_feature: MA Experiment 108501 PARAMETER Experiment Name: At_ap2_floral_buds_cDNA_P Parameter: Tissue Value: Closed Flower
  misc_feature: MA Experiment ID: 108595 Result: Up-regulated in Transcription
  misc_feature: MA Experiment 108595 PARAMETER Experiment Name: At_Ler-pi_Ovule_cDNA_P Parameter: Plant Line Value: null
  misc_feature: MA Experiment ID: 108667 Result: Down-regulated in Transcription
  misc_feature: MA Experiment 108667 PARAMETER Experiment Name: At_2mM_SA_cDNA_P Parameter: Plant Line Value: WS
  misc_feature: MA Experiment 108667 PARAMETER Experiment Name: At_2mM_SA_cDNA_P Parameter: Timepoint (hr) Value: 1
  misc_feature: MA Experiment 108667 PARAMETER Experiment Name: At_2mM_SA_cDNA_P Parameter: Treatment Value: 2mM SA vs. No Treatment
  misc_feature: MA Experiment ID: 20000069 Result: Down-regulated in Transcription
  misc_feature: MA Experiment 20000069 PARAMETER Experiment Name: At_100uM_ABA_Mutants_cDNA_P Parameter: Plant Line Value: CS23
  misc_feature: MA Experiment 20000069 PARAMETER Experiment Name: At_100uM_ABA_Mutants_cDNA_P Parameter: Timepoint (hr) Value: 6
  misc_feature: MA Experiment 20000069 PARAMETER Experiment Name: At_100uM_ABA_Mutants_cDNA_P Parameter: Tissue Value: Aerial
  misc_feature: MA Experiment 20000069 PARAMETER Experiment Name: At_100uM_ABA_Mutants_cDNA_P Parameter: Treatment Value: 100uM ABA vs. No Treatment
  misc_feature: MA Experiment ID: 20000113 Result: Down-regulated in Transcription
  misc_feature: MA Experiment 20000113 PARAMETER Experiment Name: At_42deg_Heat_cDNA_P Parameter: Temperature (deg C) Value: 42 vs. 22
  misc_feature: MA Experiment 20000113 PARAMETER Experiment Name: At_42deg_Heat_cDNA_P Parameter: Timepoint (hr) Value: 8
  misc_feature: MA Experiment 20000113 PARAMETER Experiment Name: At_42deg_Heat_cDNA_P Parameter: Tissue Value: Aerial
  misc_feature: MA Experiment ID: 20000234 Result: Up-regulated in Transcription
  misc_feature: MA Experiment 20000234 PARAMETER Experiment Name: At_Siliques_P Parameter: Age (day) Value: 21
  misc_feature: MA Experiment 20000234 PARAMETER Experiment Name: At_Siliques_P Parameter: Organism Value: A. thaliana
  misc_feature: MA Experiment 20000234 PARAMETER Experiment Name: At_Siliques_P Parameter: Plant Line Value: WS
  misc_feature: MA Experiment 20000234 PARAMETER Experiment Name: At_Siliques_P Parameter: Tissue Value: Less Than 5mm Siliques vs. Whole Plant
  misc_feature: MA Experiment ID: 20000264 Result: Up-regulated in Transcription
  misc_feature: MA Experiment 20000264 PARAMETER Experiment Name: At_Open_Flower_P Parameter: Age (day) Value: 21
  misc_feature: MA Experiment 20000264 PARAMETER Experiment Name: At_Open_Flower_P Parameter: Plant Line Value: WS
  misc_feature: MA Experiment 20000264 PARAMETER Experiment Name: At_Open_Flower_P Parameter: Tissue Value: Open Flower vs. Whole Plant
  misc_feature: MA Experiment ID: 20000286 Result: Up-regulated in Transcription
  misc_feature: MA Experiment 20000286 PARAMETER Experiment Name: At_Open_Flower_P Parameter: Age (day) Value: 21
  misc_feature: MA Experiment 20000286 PARAMETER Experiment Name: At_Open_Flower_P Parameter: Plant Line Value: WS
  misc_feature: MA Experiment 20000286 PARAMETER Experiment Name: At_Open_Flower_P Parameter: Tissue Value: Half Open vs. Whole Plant
  misc_feature: MA Experiment ID: 20000441 Result: Down-regulated in Transcription
  misc_feature: MA Experiment 20000441 PARAMETER Experiment Name: At_1uM_BR-BRZ__P Parameter: Tissue Value: Shoot Apices
  misc_feature: MA Experiment 20000441 PARAMETER Experiment Name: At_1uM_BR-BRZ__P Parameter: Treatment Value: 1uM BR vs. No Treatment
  misc_feature: MA Experiment ID: 20000443 Result: Down-regulated in Transcription
  misc_feature: MA Experiment 20000443 PARAMETER Experiment Name: At_1uM_BR-BRZ__P Parameter: Tissue Value: Shoot Apices
  misc_feature: MA Experiment 20000443 PARAMETER Experiment Name: At_1uM_BR-BRZ__P Parameter: Treatment Value: 1uM BRZ vs. No Treatment
  misc_feature: MA Experiment ID: 20000451 Result: Up-regulated in Transcription
  misc_feature: MA Experiment 20000451 PARAMETER Experiment Name: At_CS6879_Shoots-Roots_P Parameter: Age (day) Value: 14
  misc_feature: MA Experiment 20000451 PARAMETER Experiment Name: At_CS6879_Shoots-Roots_P Parameter: Organism Value: A. thaliana
  misc_feature: MA Experiment 20000451 PARAMETER Experiment Name: At_CS6879_Shoots-Roots_P Parameter: Plant Line Value: CS6879 vs. WS
  misc_feature: MA Experiment 20000451 PARAMETER Experiment Name: At_CS6879_Shoots-Roots_P Parameter: Tissue Value: Roots
  misc_feature: MA Experiment ID: 20001451 Result: Down-regulated in Transcription
  misc_feature: MA Experiment 20001451 PARAMETER Experiment Name: At_Far-red-induction_P Parameter: Age (day) Value: 7
  misc_feature: MA Experiment 20001451 PARAMETER Experiment Name: At_Far-red-induction_P Parameter: Light Value: Far-red vs. White
  misc_feature: MA Experiment 20001451 PARAMETER Experiment Name: At_Far-red-induction_P Parameter: Organism Value: A. thaliana
  misc_feature: MA Experiment 20001451 PARAMETER Experiment Name: At_Far-red-induction_P Parameter: Plant Line Value: Columbia
  misc_feature: MA Experiment 20001451 PARAMETER Experiment Name: At_Far-red-induction_P Parameter: Timepoint (hr) Value: 24
  misc_feature: MA Experiment 20001451 PARAMETER Experiment Name: At_Far-red-induction_P Parameter: Tissue Value: Whole Plant
  misc_feature: MA Experiment ID: 20001458 Result: Down-regulated in Transcription
  misc_feature: MA Experiment 20001458 PARAMETER Experiment Name: At_50mM_NH4NO3_L-to-H_P Parameter: Age (day) Value: Undefined
  misc_feature: MA Experiment 20001458 PARAMETER Experiment Name: At_50mM_NH4NO3_L-to-H_P Parameter: Organism Value: Undefined
  misc_feature: MA Experiment 20001458 PARAMETER Experiment Name: At_50mM_NH4NO3_L-to-H_P Parameter: Plant Line Value: Undefined
  misc_feature: MA Experiment 20001458 PARAMETER Experiment Name: At_50mM_NH4NO3_L-to-H_P Parameter: Timepoint (hr) Value: 2
  misc_feature: MA Experiment 20001458 PARAMETER Experiment Name: At_50mM_NH4NO3_L-to-H_P Parameter: Tissue Value: Siliques
  misc_feature: MA Experiment 20001458 PARAMETER Experiment Name: At_50mM_NH4NO3_L-to-H_P Parameter: Treatment Value: 50mM NH4NO3 vs. 100mM Manitol
  misc_feature: MA Experiment ID: 20001556 Result: Down-regulated in Transcription
  misc_feature: MA Experiment 20001556 PARAMETER Experiment Name: At_Drought_Soil_Dry_P Parameter: Age (day) Value: 26
  misc_feature: MA Experiment 20001556 PARAMETER Experiment Name: At_Drought_Soil_Dry_P Parameter: Organism Value: A. thaliana
  misc_feature: MA Experiment 20001556 PARAMETER Experiment Name: At_Drought_Soil_Dry_P Parameter: Plant Line Value: WS
  misc_feature: MA Experiment 20001556 PARAMETER Experiment Name: At_Drought_Soil_Dry_P Parameter: Post Timepoint (hr) Value: None
  misc_feature: MA Experiment 20001556 PARAMETER Experiment Name: At_Drought_Soil_Dry_P Parameter: Post-Treatment Value: None
  misc_feature: MA Experiment 20001556 PARAMETER Experiment Name: At_Drought_Soil_Dry_P Parameter: Timepoint (day) Value: 12
  misc_feature: MA Experiment 20001556 PARAMETER Experiment Name: At_Drought_Soil_Dry_P Parameter: Treatment Value: Drought vs. No Drought
  misc_feature: MA Experiment ID: 20001911 Result: Down-regulated in Transcription
  misc_feature: MA Experiment 20001911 PARAMETER Experiment Name: At_Drought_Reproduction_P Parameter: Age (day) Value: 40
  misc_feature: MA Experiment 20001911 PARAMETER Experiment Name: At_Drought_Reproduction_P Parameter: Organism Value: A. thaliana
  misc_feature: MA Experiment 20001911 PARAMETER Experiment Name: At_Drought_Reproduction_P Parameter: Plant Line Value: WS
  misc_feature: MA Experiment 20001911 PARAMETER Experiment Name: At_Drought_Reproduction_P Parameter: Timepoint (day) Value: 10
  misc_feature: MA Experiment 20001911 PARAMETER Experiment Name: At_Drought_Reproduction_P Parameter: Tissue Value: Flowers
  misc_feature: MA Experiment 20001911 PARAMETER Experiment Name: At_Drought_Reproduction_P Parameter: Treatment Value: Drought vs. No Drought
acgaaagaagagaacaaagaagaaattttgaaaatagtgaaaatggtaaccgtaagccaaagtcacacgacgacgtttctcttcttcaccacatttctcttgatattcggatcaatctcagccgtccgtttgcttccacgaccaaacactacaacaaccaacgatctagatttcatccgaacaagctgcaacgctactctatatccagacgtctgcttcacgtcactctccggctacgcctctgccgttcaagacagtccggcgaggctagccaagctcgcaatcggcgtttcactttcacaagccaaatccactgcggcttttctctccaaactctcacgctctgccgctaaatactccggtgatggccaccaaacagcttccgccgtaatccgagactgcgtttcgaacgtcgaagacgcggtggacgagatgagaggatctctccgtcaactacgcgacatgaacggcagaggaggcggcacggcagctcggaggtcggtagaaacgtttaggttccagatgagtaacgtgcagacgtggatgagtgcagcattgacggatgaggacacgtgtacggatggatttgaagatatggacgaaggaggattgattaagacgaccgtttgtgatcggctcgaggaagtgaagaggctaacgagtaatgctcttgcccttgtcaacacttacgccaacaatggagctccatgaccatgagaccatgagaccatgaggagttttaactttgatttaagtgtctctttatataatttaatacattgtggggtttaagttagagttatgtgtcgatttcatcatgttttacatttgtttttgtatcatccgagtttcttatgtttaaagggttcagagagatgttgtatctttgatttactaatcaaactgcacgatgat

SEQ ID NO: 105597 - protein, 236 aa, Arabidopsis thaliana
  peptide (1)..(236): Ceres Seq. ID no. 13617556
  misc_feature (15)..(236): Homolog of NCBI NO: 15226321 NR Description: pectinesterase - related [Arabidopsis thaliana]
  misc_feature (20)..(235): Homolog of NCBI NO: 18394174 NR Description: pectinesterase family [Arabidopsis thaliana]
  misc_feature (34)..(228): Homolog of NCBI NO: 15220674 NR Description: pectinesterase - related [Arabidopsis thaliana]
  misc_feature (53)..(228): Homolog of NCBI NO: 21555465 NR Description: unknown [Arabidopsis thaliana]
  misc_feature (30)..(232): Homolog of NCBI NO: 21554277 NR Description: unknown [Arabidopsis thaliana]
  misc_feature (30)..(232): Homolog of NCBI NO: 18409660 NR Description: pectinesterase - related [Arabidopsis thaliana]
  misc_feature (30)..(232): Homolog of NCBI NO: 25406069 NR Description: hypothetical protein F5A18.10 [imported] -
  misc_feature (27)..(231): Homolog of NCBI NO: 15232790 NR Description: pectinesterase - related [Arabidopsis thaliana]
  misc_feature (56)..(231): Homolog of NCBI NO: 15241799 NR Description: pectinesterase family [Arabidopsis thaliana]
  misc_feature (56)..(231): Homolog of NCBI NO: 21618088 NR Description: ripening-related protein-like [Arabidopsis
TKEENKEEILKIVKMVTVSQSHTTTFLFFTTFLLIFGSISAVRLLPRPNTTTTNDLDFIRTSCNATLYPDVCFTSLSGYASAVQDSPARLAKLAIGVSLSQAKSTAAFLSKLSRSAAKYSGDGHQTASAVIRDCVSNVEDAVDEMRGSLRQLRDMNGRGGGTAARRSVETFRFQMSNVQTWMSAALTDEDTCTDGFEDMDEGGLIKTTVCDRLEEVKRLTSNALALVNTYANNGAP

SEQ ID NO: 105598 - protein, 222 aa, Arabidopsis thaliana
  peptide (1)..(222): Ceres Seq. ID no. 13617557
  misc_feature (1)..(222): Homolog of NCBI NO: 15226321 NR Description: pectinesterase - related [Arabidopsis thaliana]
  misc_feature (6)..(221): Homolog of NCBI NO: 18394174 NR Description: pectinesterase family [Arabidopsis thaliana]
  misc_feature (20)..(214): Homolog of NCBI NO: 15220674 NR Description: pectinesterase - related [Arabidopsis thaliana]
  misc_feature (39)..(214): Homolog of NCBI NO: 21555465 NR Description: unknown [Arabidopsis thaliana]
  misc_feature (16)..(218): Homolog of NCBI NO: 21554277 NR Description: unknown [Arabidopsis thaliana]
  misc_feature (16)..(218): Homolog of NCBI NO: 18409660 NR Description: pectinesterase - related [Arabidopsis thaliana]
  misc_feature (16)..(218): Homolog of NCBI NO: 25406069 NR Description: hypothetical protein F5A18.10 [imported] -
  misc_feature (13)..(217): Homolog of NCBI NO: 15232790 NR Description: pectinesterase - related [Arabidopsis thaliana]
  misc_feature (42)..(217): Homolog of NCBI NO: 15241799 NR Description: pectinesterase family [Arabidopsis thaliana]
  misc_feature (42)..(217): Homolog of NCBI NO: 21618088 NR Description: ripening-related protein-like [Arabidopsis
MVTVSQSHTTTFLFFTTFLLIFGSISAVRLLPRPNTTTTNDLDFIRTSCNATLYPDVCFTSLSGYASAVQDSPARLAKLAIGVSLSQAKSTAAFLSKLSRSAAKYSGDGHQTASAVIRDCVSNVEDAVDEMRGSLRQLRDMNGRGGGTAARRSVETFRFQMSNVQTWMSAALTDEDTCTDGFEDMDEGGLIKTTVCDRLEEVKRLTSNALALVNTYANNGAP

SEQ ID NO: 105599 - DNA, 1017 bp, Arabidopsis thaliana
  misc_feature (1)..(1017): Ceres Seq. ID no. 13617558
  misc_feature: MA Experiment ID: 108461 Result: Up-regulated in Transcription
  misc_feature: MA Experiment 108461 PARAMETER Experiment Name: At_Germinating_Seeds_cDNA_P Parameter: Age (day) Value: 1 vs. 0
  misc_feature: MA Experiment 108461 PARAMETER Experiment Name: At_Germinating_Seeds_cDNA_P Parameter: Tissue Value: Germinating Seeds
  misc_feature: MA Experiment ID: 108462 Result: Up-regulated in Transcription
  misc_feature: MA Experiment 108462 PARAMETER Experiment Name: At_Germinating_Seeds_cDNA_P Parameter: Age (day) Value: 2 vs. 0
  misc_feature: MA Experiment 108462 PARAMETER Experiment Name: At_Germinating_Seeds_cDNA_P Parameter: Tissue Value: Germinating Seeds
  misc_feature: MA Experiment ID: 108463 Result: Up-regulated in Transcription
  misc_feature: MA Experiment 108463 PARAMETER Experiment Name: At_Germinating_Seeds_cDNA_P Parameter: Age (day) Value: 3 vs. 0
  misc_feature: MA Experiment 108463 PARAMETER Experiment Name: At_Germinating_Seeds_cDNA_P Parameter: Tissue Value: Germinating Seeds
  misc_feature: MA Experiment ID: 108579 Result: Down-regulated in Transcription
  misc_feature: MA Experiment 108579 PARAMETER Experiment Name: At_4deg_Cold_cDNA_P Parameter: Temperature (deg C) Value: 4 vs. 22
  misc_feature: MA Experiment 108579 PARAMETER Experiment Name: At_4deg_Cold_cDNA_P Parameter: Timepoint (hr) Value: 6
  misc_feature: MA Experiment 108579 PARAMETER Experiment Name: At_4deg_Cold_cDNA_P Parameter: Tissue Value: Aerial
  misc_feature: MA Experiment ID: 108585 Result: Down-regulated in Transcription
  misc_feature: MA Experiment 108585 PARAMETER Experiment Name: At_5mM_NaNP_cDNA_P Parameter: Timepoint (hr) Value: 6
  misc_feature: MA Experiment 108585 PARAMETER Experiment Name: At_5mM_NaNP_cDNA_P Parameter: Tissue Value: Aerial
  misc_feature: MA Experiment 108585 PARAMETER Experiment Name: At_5mM_NaNP_cDNA_P Parameter: Treatment Value: null
  misc_feature: MA Experiment ID: 108595 Result: Down-regulated in Transcription
  misc_feature: MA Experiment 108595 PARAMETER Experiment Name: At_Ler-pi_Ovule_cDNA_P Parameter: Plant Line Value: null
  misc_feature: MA Experiment ID: 20000180 Result: Up-regulated in Transcription
  misc_feature: MA Experiment 20000180 PARAMETER Experiment Name: At_Germinating_Seeds_P Parameter: Age (hr) Value: 24 vs. 0
  misc_feature: MA Experiment 20000180 PARAMETER Experiment Name: At_Germinating_Seeds_P Parameter: Tissue Value: Germinating Seeds
  misc_feature: MA Experiment ID: 20000185 Result: Down-regulated in Transcription
  misc_feature: MA Experiment 20000185 PARAMETER Experiment Name: At_Roots__P Parameter: Age (day) Value: 7 vs. 21
  misc_feature: MA Experiment 20000185 PARAMETER Experiment Name: At_Roots__P Parameter: Organism Value: A. thaliana
  misc_feature: MA Experiment 20000185 PARAMETER Experiment Name: At_Roots__P Parameter: Tissue Value: Roots vs. Whole Plant
  misc_feature: MA Experiment ID: 20000439 Result: Down-regulated in Transcription
  misc_feature: MA Experiment 20000439 PARAMETER Experiment Name: At_Roots__P Parameter: Age (day) Value: 14 vs. 21
  misc_feature: MA Experiment 20000439 PARAMETER Experiment Name: At_Roots__P Parameter: Organism Value: A. thaliana
  misc_feature: MA Experiment 20000439 PARAMETER Experiment Name: At_Roots__P Parameter: Tissue Value: Roots vs. Whole Plant
attgattcatctgatcaatgacaaaggataagaaaaactaaaagagagcaaattcagaagctgagaatatgaagacggagcttgaagaagaagaagaagaagaatggagatccgttcacgaggttttattaatcgttcttccttatcttcattctctgttcgagcttctctctatgattcgcgtttcgcgatctctcagagacgcgatcagagacgaaaccgcgttatggacaaaactcgttattgaaccaccgttgagctctcgtctaaccgatgatattctatcggagttcagttccaaatccgccggaaagctgaaaactctgattctccggcaatgtcttatggtcaccaacaagggactccgtcgtgttgtggatgctaatcctctcatcactaagataattgtgcctggatgctctggattgactcctgaaggaatcatggaatgtgttgaaagcttgtctaagaacaatcataaactagagacacttcacatcaatggcgtcaatggctttaccaaacaacatctctcagcactgtatacttacctttcttccgagggaacgattgacctcgaggtctgtcccaaatgcgatgaagtaaggatgattccgtcttgctcaagagaatcatgtaaccagaagcaacgcaagtgccgtggatgctggctttgtatccctagatgtgcagagtgcgcagtgtgccttgttggttcagatactgagagtcaagaagcagcgtgtggtaatgatgatgttctgtgtcttgaatgttggcttgtgcttcccaagtgcagattctgcaataaaccatattgcactaatcacagtagtcgtcgacatgagattgcaatcactgatgctgcatctcggccttcgtttgaatgtgaagcttgttactatagggcaggtacaaacccatatgaagtcgactatcaaatctaaacaaacactttgttgtctgcaactttgtctattttgtatatgacaagcttggattgtgaaatattcagcc

SEQ ID NO: 105600 - protein, 292 aa, Arabidopsis thaliana; identical to SEQ ID NO: 39199
  peptide (1)..(292): Ceres Seq. ID no. 13617559
  misc_feature (1)..(292): Homolog of NCBI NO: 18379265 NR Description: expressed protein [Arabidopsis thaliana]
  misc_feature (1)..(292): Homolog of NCBI NO: 21536590 NR Description: unknown [Arabidopsis thaliana]
  misc_feature (65)..(277): Homolog of NCBI NO: 38175497 NR Description: F-box protein family-like protein [Oryza sativa
  misc_feature (17)..(158): Homolog of NCBI NO: 38175497 NR Description: F-box protein family-like protein [Oryza sativa
  misc_feature (17)..(251): Homolog of NCBI NO: 18405307 NR Description: expressed protein [Arabidopsis thaliana] gene_id:K17E12.11~unknown protein [Arabidopsis thaliana]
  misc_feature (1)..(248): Homolog of NCBI NO: 18404757 NR Description: F-box protein family [Arabidopsis thaliana] gb|AAD12709.1~gene_id:MPE11.17~similar to unknown protein thaliana] >gi|16604358|gb|AAL24185.1| AT3g26000/MPE11_15
  misc_feature (1)..(248): Homolog of NCBI NO: 22655121 NR Description: expressed protein [Arabidopsis thaliana]
  misc_feature (17)..(167): Homolog of NCBI NO: 38345348 NR Description: OSJNBa0081L15.21 [Oryza sativa (japonica
  misc_feature (66)..(242): Homolog of NCBI NO: 18404757 NR Description: F-box protein family [Arabidopsis thaliana] gb|AAD12709.1~gene_id:MPE11.17~similar to unknown protein thaliana] >gi|16604358|gb|AAL24185.1| AT3g26000/MPE11_15
  misc_feature (66)..(242): Homolog of NCBI NO: 22655121 NR Description: expressed protein [Arabidopsis thaliana]

SEQ ID NO: 105601 - protein, 257 aa, Arabidopsis thaliana; identical to SEQ ID NO: 39200
  peptide (1)..(257): Ceres Seq. ID no. 13617560
  misc_feature (1)..(257): Homolog of NCBI NO: 18379265 NR Description: expressed protein [Arabidopsis thaliana]
  misc_feature (1)..(257): Homolog of NCBI NO: 21536590 NR Description: unknown [Arabidopsis thaliana]
  misc_feature (30)..(242): Homolog of NCBI NO: 38175497 NR Description: F-box protein family-like protein [Oryza sativa
  misc_feature (1)..(123): Homolog of NCBI NO: 38175497 NR Description: F-box protein family-like protein [Oryza sativa
  misc_feature (1)..(216): Homolog of NCBI NO: 18405307 NR Description: expressed protein [Arabidopsis thaliana] gene_id:K17E12.11~unknown protein [Arabidopsis thaliana]
  misc_feature (1)..(213): Homolog of NCBI NO: 18404757 NR Description: F-box protein family [Arabidopsis thaliana] gb|AAD12709.1~gene_id:MPE11.17~similar to unknown protein thaliana] >gi|16604358|gb|AAL24185.1| AT3g26000/MPE11_15
  misc_feature (1)..(213): Homolog of NCBI NO: 22655121 NR Description: expressed protein [Arabidopsis thaliana]
  misc_feature (1)..(132): Homolog of NCBI NO: 38345348 NR Description: OSJNBa0081L15.21 [Oryza sativa (japonica
  misc_feature (31)..(207): Homolog of NCBI NO: 18404757 NR Description: F-box protein family [Arabidopsis thaliana] gb|AAD12709.1~gene_id:MPE11.17~similar to unknown protein thaliana] >gi|16604358|gb|AAL24185.1| AT3g26000/MPE11_15
  misc_feature (31)..(207): Homolog of NCBI NO: 22655121 NR Description: expressed protein [Arabidopsis thaliana]

SEQ ID NO: 105602 - protein, 200 aa, Arabidopsis thaliana; identical to SEQ ID NO: 39201
  peptide (1)..(200): Ceres Seq. ID no. 13617561
  misc_feature (1)..(200): Homolog of NCBI NO: 18379265 NR Description: expressed protein [Arabidopsis thaliana]
  misc_feature (1)..(200): Homolog of NCBI NO: 21536590 NR Description: unknown [Arabidopsis thaliana]
  misc_feature (1)..(185): Homolog of NCBI NO: 38175497 NR Description: F-box protein family-like protein [Oryza sativa
  misc_feature (1)..(66): Homolog of NCBI NO: 38175497 NR Description: F-box protein family-like protein [Oryza sativa
  misc_feature (1)..(159): Homolog of NCBI NO: 18405307 NR Description: expressed protein [Arabidopsis thaliana] gene_id:K17E12.11~unknown protein [Arabidopsis thaliana]
  misc_feature (1)..(156): Homolog of NCBI NO: 18404757 NR Description: F-box protein family [Arabidopsis thaliana] gb|AAD12709.1~gene_id:MPE11.17~similar to unknown protein thaliana] >gi|16604358|gb|AAL24185.1| AT3g26000/MPE11_15
  misc_feature (1)..(156): Homolog of NCBI NO: 22655121 NR Description: expressed protein [Arabidopsis thaliana]
  misc_feature (1)..(75): Homolog of NCBI NO: 38345348 NR Description: OSJNBa0081L15.21 [Oryza sativa (japonica
  misc_feature (1)..(150): Homolog of NCBI NO: 18404757 NR Description: F-box protein family [Arabidopsis thaliana] gb|AAD12709.1~gene_id:MPE11.17~similar to unknown protein thaliana] >gi|16604358|gb|AAL24185.1| AT3g26000/MPE11_15
  misc_feature (1)..(150): Homolog of NCBI NO: 22655121 NR Description: expressed protein [Arabidopsis thaliana]

SEQ ID NO: 105603 - DNA, 1306 bp, Arabidopsis thaliana
  misc_feature (1)..(1306): Ceres Seq. ID no. 13617566
  misc_feature: MA Experiment ID: 20000173 Result: Down-regulated in Transcription
  misc_feature: MA Experiment 20000173 PARAMETER Experiment Name: At_42deg_Heat_P Parameter: Age (day) Value: 14
  misc_feature: MA Experiment 20000173 PARAMETER Experiment Name: At_42deg_Heat_P Parameter: Organism Value: A. thaliana
  misc_feature: MA Experiment 20000173 PARAMETER Experiment Name: At_42deg_Heat_P Parameter: Plant Line Value: WS
  misc_feature: MA Experiment 20000173 PARAMETER Experiment Name: At_42deg_Heat_P Parameter: Temperature (deg C) Value: 42 vs. 22
  misc_feature: MA Experiment 20000173 PARAMETER Experiment Name: At_42deg_Heat_P Parameter: Timepoint (hr) Value: 6
  misc_feature: MA Experiment 20000173 PARAMETER Experiment Name: At_42deg_Heat_P Parameter: Tissue Value: Aerial
  misc_feature: MA Experiment ID: 20000227 Result: Down-regulated in Transcription
  misc_feature: MA Experiment 20000227 PARAMETER Experiment Name: At_Root-Tips-vs-Tops_P Parameter: Tissue Value: Root Tips vs. Root Tops
  misc_feature: MA Experiment ID: 20000439 Result: Up-regulated in Transcription
  misc_feature: MA Experiment 20000439 PARAMETER Experiment Name: At_Roots__P Parameter: Age (day) Value: 14 vs. 21
  misc_feature: MA Experiment 20000439 PARAMETER Experiment Name: At_Roots__P Parameter: Organism Value: A. thaliana
  misc_feature: MA Experiment 20000439 PARAMETER Experiment Name: At_Roots__P Parameter: Tissue Value: Roots vs. Whole Plant
  misc_feature: MA Experiment ID: 20000794 Result: Up-regulated in Transcription
  misc_feature: MA Experiment 20000794 PARAMETER Experiment Name: At_Petals_P Parameter: Age (day) Value: 23-25 days
  misc_feature: MA Experiment 20000794 PARAMETER Experiment Name: At_Petals_P Parameter: Plant Line Value: WS
  misc_feature: MA Experiment 20000794 PARAMETER Experiment Name: At_Petals_P Parameter: Tissue Value: Petals vs. Whole plant
  misc_feature: MA Experiment ID: 20001558 Result: Down-regulated in Transcription
  misc_feature: MA Experiment 20001558 PARAMETER Experiment Name: At_Drought_Soil_Dry_P Parameter: Age (day) Value: 27
  misc_feature: MA Experiment 20001558 PARAMETER Experiment Name: At_Drought_Soil_Dry_P Parameter: Organism Value: A. thaliana
  misc_feature: MA Experiment 20001558 PARAMETER Experiment Name: At_Drought_Soil_Dry_P Parameter: Plant Line Value: WS
  misc_feature: MA Experiment 20001558 PARAMETER Experiment Name: At_Drought_Soil_Dry_P Parameter: Post Timepoint (hr) Value: 6
  misc_feature: MA Experiment 20001558 PARAMETER Experiment Name: At_Drought_Soil_Dry_P Parameter: Post-Treatment Value: Re-Water vs. No Drought
  misc_feature: MA Experiment 20001558 PARAMETER Experiment Name: At_Drought_Soil_Dry_P Parameter: Timepoint (day) Value: 13
  misc_feature: MA Experiment 20001558 PARAMETER Experiment Name: At_Drought_Soil_Dry_P Parameter: Treatment Value: Drought vs. No Drought
  misc_feature: MA Experiment ID: 20001560 Result: Down-regulated in Transcription
  misc_feature: MA Experiment 20001560 PARAMETER Experiment Name: At_Drought_Soil_Dry_P Parameter: Age (day) Value: 28
  misc_feature: MA Experiment 20001560 PARAMETER Experiment Name: At_Drought_Soil_Dry_P Parameter: Organism Value: A. thaliana
  misc_feature: MA Experiment 20001560 PARAMETER Experiment Name: At_Drought_Soil_Dry_P Parameter: Plant Line Value: WS
  misc_feature: MA Experiment 20001560 PARAMETER Experiment Name: At_Drought_Soil_Dry_P Parameter: Post Timepoint (hr) Value: None
  misc_feature: MA Experiment 20001560 PARAMETER Experiment Name: At_Drought_Soil_Dry_P Parameter: Post-Treatment Value: None
  misc_feature: MA Experiment 20001560 PARAMETER Experiment Name: At_Drought_Soil_Dry_P Parameter: Timepoint (day) Value: 14
  misc_feature: MA Experiment 20001560 PARAMETER Experiment Name: At_Drought_Soil_Dry_P Parameter: Treatment Value: Drought vs. No Drought
gaagaatctcaattctcttcgttactaatgtcatcgtattcttcagattccacggcggcgcgtgatcaacatgcgcctctactccgtccacgacacgacggctctttttcttcttcttcttcatcagccagacctacagctctcgccgttctattaggacggatcaccggccaccgagcaccgtcgatgctggttagagaaacagcggcgcgtgctctcgaggagagacgaatcgattggggttactcgaagcctgtagttgctgctgatatactatggaacgctgctttagttcttgcgtcagcggttatgcttgtcggtaccgttgaagaaagacctaatgaaccgattagggtttggatctgtgtgtatgggttacagtgtttgttccatgtggttttggtttggtctgagtattggagaagaaactcaactcgtagagctagggatttggagtcttatgatcatgaagattacaacattgagtatgattatgaacaagacagtgatgacaattcaacaacttacagttttgtgaagagatgtgagtcgataaacacagtgatatcattcatatggtggataattggattctactgggttgttgaaggtggtgataagcttttaggagaagctcctaatctttactggttatcggtgattttcctggcgattgacgtcttctttgctgttttctgtgttgttttggcttgccttgttggaatagctctttgttgctgtcttccttgcataattgctcttctttatgccgttgctggaacggaaggtgtatcggaggcggagctcggtgttcttcccttgtacaaatttaaggctttccatagcaatgagaagaacattactggacctggtaaaatggttcctataccgatcaatggcttatgcttagcaactgaaagaacactgcttgctgaggatgcggattgttgcatatgtctgagttcatatgaggatggcgcagagcttcatgctcttccttgtaaccaccattttcattcgacttgtattgtgaaatggcttaagatgagagcaacatgccctctttgcaaatacaacattcttaaaggaaccactgatcaatcttgaagacaaaactcaaccaaccagagggaataagattctgcacatatagaaacagattccatttcctcaattaaaaagcttctgtatatatttatttacataactatcaaagtcatgtgtcttttgttaaaagcatccattttaaatgtaaaagatcacactttacaaatgcccttttctatatttgcccatatttgagaat

SEQ ID NO: 105604 - protein, 368 aa, Arabidopsis thaliana
  peptide (1)..(368): Ceres Seq. ID no. 13617567
  misc_feature (316)..(356): Pfam Name: Zinc finger, C3HC4 type (RING finger) Pfam Description: Zinc finger, C3HC4 type (RING finger)
  misc_feature (10)..(368): Homolog of NCBI NO: 30677954 NR Description: RING zinc finger protein family [Arabidopsis
  misc_feature (1)..(176): Homolog of NCBI NO: 25410926 NR Description: hypothetical protein At2g01730 [imported] - thaliana >gi|4220489|gb|AAD12712.1| putative cleavage and
  misc_feature (216)..(291): Homolog of NCBI NO: 25410926 NR Description: hypothetical protein At2g01730 [imported] - thaliana >gi|4220489|gb|AAD12712.1| putative cleavage and
  misc_feature (14)..(367): Homolog of NCBI NO: 15220639 NR Description: zinc finger (C3HC4-type RING finger) protein [Arabidopsis thaliana] >gi|25404696|pir||H96703 probable RING
  misc_feature (14)..(367): Homolog of NCBI NO: 21536719 NR Description: putative RING zinc finger protein [Arabidopsis
  misc_feature (177)..(364): Homolog of NCBI NO: 9502381 NR Description: T12C24.29 [Arabidopsis thaliana] unknown protein [Arabidopsis thaliana]
  misc_feature (6)..(149): Homolog of NCBI NO: 9502381 NR Description: T12C24.29 [Arabidopsis thaliana] unknown protein [Arabidopsis thaliana]
  misc_feature (49)..(362): Homolog of NCBI NO: 33146524 NR Description: putative RES protein [Oryza sativa (japonica
  misc_feature (59)..(367): Homolog of NCBI NO: 18413629 NR Description: zinc finger (C3HC4-type RING finger) protein [Arabidopsis thaliana] >gi|16323218|gb|AAL15343.1|
  misc_feature (59)..(368): Homolog of NCBI NO: 38344371 NR Description: OSJNBb0032E06.5 [Oryza sativa (japonica
EESQFSSLLMSSYSSDSTAARDQHAPLLRPRHDGSFSSSSSSARPTALAVLLGRITGHRAPSMLVRETAARALEERRIDWGYSKPVVAADILWNAALVLASAVMLVGTVEERPNEPIRVWICVYGLQCLFHVVLVWSEYWRRNSTRRARDLESYDHEDYNIEYDYEQDSDDNSTTYSFVKRCESINTVISFIWWIIGFYWVVEGGDKLLGEAPNLYWLSVIFLAIDVFFAVFCVVLACLVGIALCCCLPCIIALLYAVAGTEGVSEAELGVLPLYKFKAFHSNEKNITGPGKMVPIPINGLCLATERTLLAEDADCCICLSSYEDGAELHALPCNHHFHSTCIVKWLKMRATCPLCKYNILKGTTDQS

SEQ ID NO: 105605 - protein, 359 aa, Arabidopsis thaliana
  peptide (1)..(359): Ceres Seq. ID no. 13617568
  misc_feature (307)..(347): Pfam Name: Zinc finger, C3HC4 type (RING finger) Pfam Description: Zinc finger, C3HC4 type (RING finger)
  misc_feature (1)..(359): Homolog of NCBI NO: 30677954 NR Description: RING zinc finger protein family [Arabidopsis
  misc_feature (1)..(167): Homolog of NCBI NO: 25410926 NR Description: hypothetical protein At2g01730 [imported] - thaliana >gi|4220489|gb|AAD12712.1| putative cleavage and
  misc_feature (207)..(282): Homolog of NCBI NO: 25410926 NR Description: hypothetical protein At2g01730 [imported] - thaliana >gi|4220489|gb|AAD12712.1| putative cleavage and
  misc_feature (5)..(358): Homolog of NCBI NO: 15220639 NR Description: zinc finger (C3HC4-type RING finger) protein [Arabidopsis thaliana] >gi|25404696|pir||H96703 probable RING
  misc_feature (5)..(358): Homolog of NCBI NO: 21536719 NR Description: putative RING zinc finger protein [Arabidopsis
  misc_feature (168)..(355): Homolog of NCBI NO: 9502381 NR Description: T12C24.29 [Arabidopsis thaliana] unknown protein [Arabidopsis thaliana]
  misc_feature (1)..(140): Homolog of NCBI NO: 9502381 NR Description: T12C24.29 [Arabidopsis thaliana] unknown protein [Arabidopsis thaliana]
  misc_feature (40)..(353): Homolog of NCBI NO: 33146524 NR Description: putative RES protein [Oryza sativa (japonica
  misc_feature (50)..(358): Homolog of NCBI NO: 18413629 NR Description: zinc finger (C3HC4-type RING finger) protein [Arabidopsis thaliana] >gi|16323218|gb|AAL15343.1|
  misc_feature (50)..(359): Homolog of NCBI NO: 38344371 NR Description: OSJNBb0032E06.5 [Oryza sativa (japonica
MSSYSSDSTAARDQHAPLLRPRHDGSFSSSSSSARPTALAVLLGRITGHRAPSMLVRETAARALEERRIDWGYSKPVVAADILWNAALVLASAVMLVGTVEERPNEPIRVWICVYGLQCLFHVVLVWSEYWRRNSTRRARDLESYDHEDYNIEYDYEQDSDDNSTTYSFVKRCESINTVISFIWWIIGFYWVVEGGDKLLGEAPNLYWLSVIFLAIDVFFAVFCVVLACLVGIALCCCLPCIIALLYAVAGTEGVSEAELGVLPLYKFKAFHSNEKNITGPGKMVPIPINGLCLATERTLLAEDADCCICLSSYEDGAELHALPCNHHFHSTCIVKWLKMRATCPLCKYNILKGTTDQS

SEQ ID NO: 105606 - protein, 306 aa, Arabidopsis thaliana
  peptide (1)..(306): Ceres Seq. ID no. 13617569
  misc_feature (254)..(294): Pfam Name: Zinc finger, C3HC4 type (RING finger) Pfam Description: Zinc finger, C3HC4 type (RING finger)
  misc_feature (1)..(306): Homolog of NCBI NO: 30677954 NR Description: RING zinc finger protein family [Arabidopsis
  misc_feature (1)..(114): Homolog of NCBI NO: 25410926 NR Description: hypothetical protein At2g01730 [imported] - thaliana >gi|4220489|gb|AAD12712.1| putative cleavage and
  misc_feature (154)..(229): Homolog of NCBI NO: 25410926 NR Description: hypothetical protein At2g01730 [imported] - thaliana >gi|4220489|gb|AAD12712.1| putative cleavage and
  misc_feature (1)..(305): Homolog of NCBI NO: 15220639 NR Description: zinc finger (C3HC4-type RING finger) protein [Arabidopsis thaliana] >gi|25404696|pir||H96703 probable RING
  misc_feature (1)..(305): Homolog of NCBI NO: 21536719 NR Description: putative RING zinc finger protein [Arabidopsis
  misc_feature (115)..(302): Homolog of NCBI NO: 9502381 NR Description: T12C24.29 [Arabidopsis thaliana] unknown protein [Arabidopsis thaliana]
  misc_feature (1)..(87): Homolog of NCBI NO: 9502381 NR Description: T12C24.29 [Arabidopsis thaliana] unknown protein [Arabidopsis thaliana]
  misc_feature (1)..(300): Homolog of NCBI NO: 33146524 NR Description: putative RES protein [Oryza sativa (japonica
  misc_feature (1)..(305): Homolog of NCBI NO: 18413629 NR Description: zinc finger (C3HC4-type RING finger) protein [Arabidopsis thaliana] >gi|16323218|gb|AAL15343.1|
  misc_feature (1)..(306): Homolog of NCBI NO: 38344371 NR Description: OSJNBb0032E06.5 [Oryza sativa (japonica
MLVRETAARALEERRIDWGYSKPVVAADILWNAALVLASAVMLVGTVEERPNEPIRVWICVYGLQCLFHVVLVWSEYWRRNSTRRARDLESYDHEDYNIEYDYEQDSDDNSTTYSFVKRCESINTVISFIWWIIGFYWVVEGGDKLLGEAPNLYWLSVIFLAIDVFFAVFCVVLACLVGIALCCCLPCIIALLYAVAGTEGVSEAELGVLPLYKFKAFHSNEKNITGPGKMVPIPINGLCLATERTLLAEDADCCICLSSYEDGAELHALPCNHHFHSTCIVKWLKMRATCPLCKYNILKGTTDQS

SEQ ID NO: 105607 - DNA, 666 bp, Arabidopsis thaliana
  misc_feature (1)..(666): Ceres Seq. ID no. 13617581
  misc_feature: MA Experiment ID: 108434 Result: Up-regulated in Transcription
  misc_feature: MA Experiment 108434 PARAMETER Experiment Name: At_Root_Tips_cDNA_P Parameter: Tissue Value: Root Tips
  misc_feature: MA Experiment ID: 108435 Result: Up-regulated in Transcription
  misc_feature: MA Experiment 108435 PARAMETER Experiment Name: At_stm_Mutants_cDNA_P Parameter: Plant Line Value: wt Landsburg vs stm
  misc_feature: MA Experiment 108435 PARAMETER Experiment Name: At_stm_Mutants_cDNA_P Parameter: Tissue Value: Shoot Apical Meristem Region
  misc_feature: MA Experiment ID: 108462 Result: Down-regulated in Transcription
  misc_feature: MA Experiment 108462 PARAMETER Experiment Name: At_Germinating_Seeds_cDNA_P Parameter: Age (day) Value: 2 vs. 0
  misc_feature: MA Experiment 108462 PARAMETER Experiment Name: At_Germinating_Seeds_cDNA_P Parameter: Tissue Value: Germinating Seeds
  misc_feature: MA Experiment ID: 108463 Result: Down-regulated in Transcription
  misc_feature: MA Experiment 108463 PARAMETER Experiment Name: At_Germinating_Seeds_cDNA_P Parameter: Age (day) Value: 3 vs. 0
  misc_feature: MA Experiment 108463 PARAMETER Experiment Name: At_Germinating_Seeds_cDNA_P Parameter: Tissue Value: Germinating Seeds
  misc_feature: MA Experiment ID: 108464 Result: Down-regulated in Transcription
  misc_feature: MA Experiment 108464 PARAMETER Experiment Name: At_Germinating_Seeds_cDNA_P Parameter: Age (day) Value: 4 vs. 0
  misc_feature: MA Experiment 108464 PARAMETER Experiment Name: At_Germinating_Seeds_cDNA_P Parameter: Tissue Value: Germinating Seeds
  misc_feature: MA Experiment ID: 108573 Result: Down-regulated in Transcription
  misc_feature: MA Experiment 108573 PARAMETER Experiment Name: At_Drought_cDNA_P Parameter: Timepoint (hr) Value: 6
  misc_feature: MA Experiment 108573 PARAMETER Experiment Name: At_Drought_cDNA_P Parameter: Tissue Value: Aerial
  misc_feature: MA Experiment 108573 PARAMETER Experiment Name: At_Drought_cDNA_P Parameter: Treatment Value: Drought vs. No Drought
  misc_feature: MA Experiment ID: 20000112 Result: Down-regulated in Transcription
  misc_feature: MA Experiment 20000112 PARAMETER Experiment Name: At_42deg_Heat_cDNA_P Parameter: Temperature (deg C) Value: 42 vs. 22
  misc_feature: MA Experiment 20000112 PARAMETER Experiment Name: At_42deg_Heat_cDNA_P Parameter: Timepoint (hr) Value: 2
  misc_feature: MA Experiment 20000112 PARAMETER Experiment Name: At_42deg_Heat_cDNA_P Parameter: Tissue Value: Aerial
  misc_feature: MA Experiment ID: 20000117 Result: Down-regulated in Transcription
  misc_feature: MA Experiment 20000117 PARAMETER Experiment Name: At_100uM_ABA_Mutants_cDNA_P Parameter: Plant Line Value: Columbia
  misc_feature: MA Experiment 20000117 PARAMETER Experiment Name: At_100uM_ABA_Mutants_cDNA_P Parameter: Timepoint (hr) Value: 6
  misc_feature: MA Experiment 20000117 PARAMETER Experiment Name: At_100uM_ABA_Mutants_cDNA_P Parameter: Tissue Value: Aerial
  misc_feature: MA Experiment 20000117 PARAMETER Experiment Name: At_100uM_ABA_Mutants_cDNA_P Parameter: Treatment Value: 100uM ABA vs. No Treatment
  misc_feature: MA Experiment ID: 20000214 Result: Up-regulated in Transcription
  misc_feature: MA Experiment 20000214 PARAMETER Experiment Name: At_4deg_Cold_P Parameter: Timepoint (hr) Value: 6
  misc_feature: MA Experiment ID: 20000437 Result: Down-regulated in Transcription
  misc_feature: MA Experiment 20000437 PARAMETER Experiment Name: At_Drought_P Parameter: Age (day) Value: 8
  misc_feature: MA Experiment 20000437 PARAMETER Experiment Name: At_Drought_P Parameter: Organism Value: A. thaliana
  misc_feature: MA Experiment 20000437 PARAMETER Experiment Name: At_Drought_P Parameter: Plant Line Value: WS
  misc_feature: MA Experiment 20000437 PARAMETER Experiment Name: At_Drought_P Parameter: Timepoint (hr) Value: 24
  misc_feature: MA Experiment 20000437 PARAMETER Experiment Name: At_Drought_P Parameter: Tissue Value: Whole Plant
  misc_feature: MA Experiment 20000437 PARAMETER Experiment Name: At_Drought_P Parameter: Treatment Value: Drought vs. No Drought
  misc_feature: MA Experiment ID: 20000495 Result: Down-regulated in Transcription
  misc_feature: MA Experiment 20000495 PARAMETER Experiment Name: At_Guard_Cells_P Parameter: Harvest Date Value: 8/2/2002
  misc_feature: MA Experiment 20000495 PARAMETER Experiment Name: At_Guard_Cells_P Parameter: Organism Value: A. thaliana
  misc_feature: MA Experiment 20000495 PARAMETER Experiment Name: At_Guard_Cells_P Parameter: Tissue Value: Guard Cells vs. Leaves
  misc_feature: MA Experiment ID: 20000794 Result: Down-regulated in Transcription
  misc_feature: MA Experiment 20000794 PARAMETER Experiment Name: At_Petals_P Parameter: Age (day) Value: 23-25 days
  misc_feature: MA Experiment 20000794 PARAMETER Experiment Name: At_Petals_P Parameter: Plant Line Value: WS
  misc_feature: MA Experiment 20000794 PARAMETER Experiment Name: At_Petals_P Parameter: Tissue Value: Petals vs. Whole plant
  misc_feature: MA Experiment ID: 20001451 Result: Down-regulated in Transcription
  misc_feature: MA Experiment 20001451 PARAMETER Experiment Name: At_Far-red-induction_P Parameter: Age (day) Value: 7
  misc_feature: MA Experiment 20001451 PARAMETER Experiment Name: At_Far-red-induction_P Parameter: Light Value: Far-red vs. White
  misc_feature: MA Experiment 20001451 PARAMETER Experiment Name: At_Far-red-induction_P Parameter: Organism Value: A. thaliana
  misc_feature: MA Experiment 20001451 PARAMETER Experiment Name: At_Far-red-induction_P Parameter: Plant Line Value: Columbia
  misc_feature: MA Experiment 20001451 PARAMETER Experiment Name: At_Far-red-induction_P Parameter: Timepoint (hr) Value: 24
  misc_feature: MA Experiment 20001451 PARAMETER Experiment Name: At_Far-red-induction_P Parameter: Tissue Value: Whole Plant
  misc_feature: MA Experiment ID: 20001557 Result: Up-regulated in Transcription
  misc_feature: MA Experiment 20001557 PARAMETER Experiment Name: At_Drought_Soil_Dry_P Parameter: Age (day) Value: 27
  misc_feature: MA Experiment 20001557 PARAMETER Experiment Name: At_Drought_Soil_Dry_P Parameter: Organism Value: A. thaliana
  misc_feature: MA Experiment 20001557 PARAMETER Experiment Name: At_Drought_Soil_Dry_P Parameter: Plant Line Value: WS
  misc_feature: MA Experiment 20001557 PARAMETER Experiment Name: At_Drought_Soil_Dry_P Parameter: Post Timepoint (hr) Value: 3
  misc_feature: MA Experiment 20001557 PARAMETER Experiment Name: At_Drought_Soil_Dry_P Parameter: Post-Treatment Value: Re-Water vs. No Drought
  misc_feature: MA Experiment 20001557 PARAMETER Experiment Name: At_Drought_Soil_Dry_P Parameter: Timepoint (day) Value: 13
  misc_feature: MA Experiment 20001557 PARAMETER Experiment Name: At_Drought_Soil_Dry_P Parameter: Treatment Value: Drought vs. No Drought
  misc_feature: MA Experiment ID: 20001558 Result: Up-regulated in Transcription
  misc_feature: MA Experiment 20001558 PARAMETER Experiment Name: At_Drought_Soil_Dry_P Parameter: Age (day) Value: 27
  misc_feature: MA Experiment 20001558 PARAMETER Experiment Name: At_Drought_Soil_Dry_P Parameter: Organism Value: A. thaliana
  misc_feature: MA Experiment 20001558 PARAMETER Experiment Name: At_Drought_Soil_Dry_P Parameter: Plant Line Value: WS
  misc_feature: MA Experiment 20001558 PARAMETER Experiment Name: At_Drought_Soil_Dry_P Parameter: Post Timepoint (hr) Value: 6
  misc_feature: MA Experiment 20001558 PARAMETER Experiment Name: At_Drought_Soil_Dry_P Parameter: Post-Treatment Value: Re-Water vs. No Drought
  misc_feature: MA Experiment 20001558 PARAMETER Experiment Name: At_Drought_Soil_Dry_P Parameter: Timepoint (day) Value: 13
  misc_feature: MA Experiment 20001558 PARAMETER Experiment Name: At_Drought_Soil_Dry_P Parameter: Treatment Value: Drought vs. No Drought
  misc_feature: MA Experiment ID: 20001560 Result: Up-regulated in Transcription
  misc_feature: MA Experiment 20001560 PARAMETER Experiment Name: At_Drought_Soil_Dry_P Parameter: Age (day) Value: 28
  misc_feature: MA Experiment 20001560 PARAMETER Experiment Name: At_Drought_Soil_Dry_P Parameter: Organism Value: A. thaliana
  misc_feature: MA Experiment 20001560 PARAMETER Experiment Name: At_Drought_Soil_Dry_P Parameter: Plant Line Value: WS
  misc_feature: MA Experiment 20001560 PARAMETER Experiment Name: At_Drought_Soil_Dry_P Parameter: Post Timepoint (hr) Value: None
  misc_feature: MA Experiment 20001560 PARAMETER Experiment Name: At_Drought_Soil_Dry_P Parameter: Post-Treatment Value: None
  misc_feature: MA Experiment 20001560 PARAMETER Experiment Name: At_Drought_Soil_Dry_P Parameter: Timepoint (day) Value: 14
  misc_feature: MA Experiment 20001560 PARAMETER Experiment Name: At_Drought_Soil_Dry_P Parameter: Treatment Value: Drought vs. No Drought
  misc_feature: MA Experiment ID: 20001757 Result: Up-regulated in Transcription
  misc_feature: MA Experiment 20001757 PARAMETER Experiment Name: At_50mM_NH4NO3_L-to-H_P Parameter: Timepoint (hr) Value: 6
  misc_feature: MA Experiment 20001757 PARAMETER Experiment Name: At_50mM_NH4NO3_L-to-H_P Parameter: Tissue Value: Leaf
  misc_feature: MA Experiment 20001757 PARAMETER Experiment Name: At_50mM_NH4NO3_L-to-H_P Parameter: Treatment Value: 50mM NH4NO3 vs 100mM Mannitol
ctagccgcaaagagagaaagggagggaggagagtgtagcagatcggcgaaaatgacaaccagattcaagaagaacaggaagaagagaggtcacgtcagcgccggacatggacgtatcggtaagcaccgtaagcatcccggaggtcgtggtaacgctggaggtatgcatcaccacaggatcctcttcgacaagtaccatccaggttacttcggtaaagttggtatgaggtatttccacaagctgaggaacaagttcttctgcccaatcgttaacctcgacaagctttggtcactcgtccctgaagatgtgaaggcgaaatcaaccaaggacaatgttccgttgatcgatgtgactcaacatggtttcttcaaggttttgggtaaaggtcatttgcctgagaacaagccgttcgttgtgaaggcgaagcttatttcgaagactgctgagaagaagattaaggaagctggtggtgctgttgtgcttactgcttaagttaggtgaatttatttgcttaactctgtttttgaatcttctatggagttttatcatcttttgttgtcttttggattttggaaagagcgagatctctttaaagttagtagttttatgaaccttttgttggattttgataaatgtttggtattccgaattcagacttataattgc

SEQ ID NO: 105608 - protein, 163 aa, Arabidopsis thaliana; identical to SEQ ID NO: 29911
  peptide (1)..(163): Ceres Seq. ID no. 13617582
  misc_feature (124)..(157): Pfam Name: Ribosomal protein L15 Pfam Description: Ribosomal protein L15
  misc_feature (18)..(163): Homolog of NCBI NO: 15223190 NR Description: 60S ribosomal protein L27A (RPL27aC) [Arabidopsis
  misc_feature (18)..(163): Homolog of NCBI NO: 21553702 NR Description: 60S ribosomal protein L27A [Arabidopsis thaliana]
  misc_feature (18)..(163): Homolog of NCBI NO: 15220698 NR Description: 60S ribosomal protein L27A (RPL27aB) [Arabidopsis
  misc_feature (18)..(163): Homolog of NCBI NO: 7959355 NR Description: 60S ribosomal protein L27a [Panax ginseng]
  misc_feature (18)..(163): Homolog of NCBI NO: 3608481 NR Description: ribosomal protein L27a [Petunia x hybrida]
  misc_feature (18)..(163): Homolog of NCBI NO: 30017566 NR Description: putative ribosomal protein L27a [Oryza sativa
  misc_feature (18)..(163): Homolog of NCBI NO: 23237917 NR Description: putative 60S ribosomal protein L27a [Oryza sativa
  misc_feature (20)..(163): Homolog of NCBI NO: 22758850 NR Description: ribosomal protein L22 [Argopecten irradians]
  misc_feature (18)..(163): Homolog of NCBI NO: 23612262 NR Description: 60S ribosomal protein L27a, putative [Plasmodium
  misc_feature (18)..(163): Homolog of NCBI NO: 23491401 NR Description: ribosomal protein L27a [Plasmodium yoelii yoelii]

SEQ ID NO: 105609 - protein, 146 aa, Arabidopsis thaliana [sequence omitted]

SEQ ID NO: 105610 - protein, 109 aa, Arabidopsis thaliana; identical to SEQ ID NO: 29913
  peptide (1)..(109): Ceres Seq. ID no. 13617584
  misc_feature (70)..(103): Pfam Name: Ribosomal protein L15 Pfam Description: Ribosomal protein L15
  misc_feature (1)..(109): Homolog of NCBI NO: 15223190 NR Description: 60S ribosomal protein L27A (RPL27aC) [Arabidopsis
  misc_feature (1)..(109): Homolog of NCBI NO: 21553702 NR Description: 60S ribosomal protein L27A [Arabidopsis thaliana]
  misc_feature (1)..(109): Homolog of NCBI NO: 15220698 NR Description: 60S ribosomal protein L27A (RPL27aB) [Arabidopsis
  misc_feature (1)..(109): Homolog of NCBI NO: 7959355 NR Description: 60S ribosomal protein L27a [Panax ginseng]
  misc_feature (1)..(109): Homolog of NCBI NO: 3608481 NR Description: ribosomal protein L27a [Petunia x hybrida]
  misc_feature (1)..(109): Homolog of NCBI NO: 30017566 NR Description: putative ribosomal protein L27a [Oryza sativa
  misc_feature (1)..(109): Homolog of NCBI NO: 23237917 NR Description: putative 60S ribosomal protein L27a [Oryza sativa
  misc_feature (1)..(109): Homolog of NCBI NO: 22758850 NR Description: ribosomal protein L22 [Argopecten irradians]
  misc_feature (1)..(109): Homolog of NCBI NO: 23612262 NR Description: 60S ribosomal protein L27a, putative [Plasmodium
  misc_feature (1)..(109): Homolog of NCBI NO: 23491401 NR Description: ribosomal protein L27a [Plasmodium yoelii yoelii]

SEQ ID NO: 105611 - DNA, 1560 bp, Arabidopsis thaliana
  misc_feature (1)..(1560): Ceres Seq. ID no. 13617585
  misc_feature: MA Experiment ID: 108462 Result: Down-regulated in Transcription
  misc_feature: MA Experiment 108462 PARAMETER Experiment Name: At_Germinating_Seeds_cDNA_P Parameter: Age (day) Value: 2 vs. 0
  misc_feature: MA Experiment 108462 PARAMETER Experiment Name: At_Germinating_Seeds_cDNA_P Parameter: Tissue Value: Germinating Seeds
  misc_feature: MA Experiment ID: 108463 Result: Down-regulated in Transcription
  misc_feature: MA Experiment 108463 PARAMETER Experiment Name: At_Germinating_Seeds_cDNA_P Parameter: Age (day) Value: 3 vs. 0
  misc_feature: MA Experiment 108463 PARAMETER Experiment Name: At_Germinating_Seeds_cDNA_P Parameter: Tissue Value: Germinating Seeds
  misc_feature: MA Experiment ID: 108464 Result: Down-regulated in Transcription
  misc_feature: MA Experiment 108464 PARAMETER Experiment Name: At_Germinating_Seeds_cDNA_P Parameter: Age (day) Value: 4 vs. 0
  misc_feature: MA Experiment 108464 PARAMETER Experiment Name: At_Germinating_Seeds_cDNA_P Parameter: Tissue Value: Germinating Seeds
  misc_feature: MA Experiment ID: 20001560 Result: Up-regulated in Transcription
  misc_feature: MA Experiment 20001560 PARAMETER Experiment Name: At_Drought_Soil_Dry_P Parameter: Age (day) Value: 28
  misc_feature: MA Experiment 20001560 PARAMETER Experiment Name: At_Drought_Soil_Dry_P Parameter: Organism Value: A. thaliana
  misc_feature: MA Experiment 20001560 PARAMETER Experiment Name: At_Drought_Soil_Dry_P Parameter: Plant Line Value: WS
  misc_feature: MA Experiment 20001560 PARAMETER Experiment Name: At_Drought_Soil_Dry_P Parameter: Post Timepoint (hr) Value: None
  misc_feature: MA Experiment 20001560 PARAMETER Experiment Name: At_Drought_Soil_Dry_P Parameter: Post-Treatment Value: None
  misc_feature: MA Experiment 20001560 PARAMETER Experiment Name: At_Drought_Soil_Dry_P Parameter: Timepoint (day) Value: 14
  misc_feature: MA Experiment 20001560 PARAMETER Experiment Name: At_Drought_Soil_Dry_P Parameter: Treatment Value: Drought vs. No Drought
aactaatacgcattgagtttcgttgctttctcgggaaaaatctctttgtaactaaacttttatgtacctactaaaaatctcatgttgagattcttcaagaccgaccatagattgttccatcgaatcatcgggtacacaagaccattccacggtctagctaaaacccaaaacgctgagatcgctagaccaggtttggttgatccaagctcgcacccgtggcccgagtggctagatttaatggggatgctagctaaaaaaggttactttgaagaaagcttgattccattgatgagttccaaggaatctaatcatattcgtacagcttgtctcaatttcgcccgccatcgtttcactctcgtcagaaacttgtcgaagaaagatatcaaagtgattgctgggtgtggatgtccaagcactgataggaaggtcgtgaactcaggaaagcgtctaagagcttatgtgggcattgatgaaggaaatgtgtgtggctcctgcaacttgagagggaaatgtgaaagggcgtatgcacaagcacgggatgatgaaggtgctcgaactatagatgtcatgcgtttactgctaacttatgggcttgattccatttctcctactgttgagaatcgtgcctgtcaaaccaaacttgttgaagattctgtgaggaagttgctcagagaaagtgtagcgtatagcttaacagattttgaatctgctgagactgagacagctggagatgagctccagccaaattcacaggacattgatgaaagagatccacgaaaaaggccaggggattggtattgtacagaatgcaagtttctaaattttgcgaaaaacataagatgcttgcgatgtgatgttttttctgaggaaaggcttaaacagttgaaggaagaacaaaaagatcatctcccactgaagaaaggagattggatttgtcaaacatgtaatttcctgaacttttcgaaaaacacgagatgcttaaggtgcaaagacaagcctacattgcgtcaaatcaatcccggagagtgggaatgcgagtcgtgcaattacatcaattttagaagaaactctatatgtttgaagtgtgatcacaagagacaaaaggctgcaaacgtcactccggattcaaagacagttgctgatcgtcaaagcggagttacaaagacgtggagctttgtagaagaagagagtgtaaaacgatgcaatggcgaagaagaggaagaagaagatggtttcatgggatttccagtagagggagggagaagcaatgtttcaaagagcgcagaaaagagagagcaatggaagttggagatgacacagagaattagaagcaatgggactaaagcgaaaaaagatgataatacgaagaacgaaacagagtcaaaatgttatgatcggagaagaaatgaacttcttggtaacattagtgatgatggagagatggatgattggtttgtttcaaaacaagatagatcgacttaaattgaatttataaatttgtaaccacatccatctgtttgtttcttctagtgttttattattggttcattggttggtttg

SEQ ID NO: 105612 - protein, 466 aa, Arabidopsis thaliana
  peptide (1)..(466): Ceres Seq. ID no. 13617586
  misc_feature (312)..(341): Pfam Name: Zn-finger in Ran binding protein and others Pfam Description: Zn-finger in Ran binding protein and others
  misc_feature (1)..(466): Homolog of NCBI NO: 18409643 NR Description: expressed protein [Arabidopsis thaliana]
  misc_feature (1)..(466): Homolog of NCBI NO: 21593408 NR Description: unknown [Arabidopsis thaliana]
  misc_feature (1)..(305): Homolog of NCBI NO: 25372841 NR Description: hypothetical protein F5A18.17 [imported] -
  misc_feature (271)..(466): Homolog of NCBI NO: 25372841 NR Description: hypothetical protein F5A18.17 [imported] -
  misc_feature (29)..(451): Homolog of NCBI NO: 13324787 NR Description: hypothetical protein [Oryza sativa]
  misc_feature (72)..(401): Homolog of NCBI NO: 13702809 NR Description: putative ARP protein [Oryza sativa]
  misc_feature (36)..(73): Homolog of NCBI NO: 13702809 NR Description: putative ARP protein [Oryza sativa]
  misc_feature (48)..(305): Homolog of NCBI NO: 15293147 NR Description: unknown protein [Arabidopsis thaliana]
  misc_feature (48)..(305): Homolog of NCBI NO: 18405190 NR Description: expressed protein [Arabidopsis thaliana]
  misc_feature (44)..(63): Homolog of NCBI NO: 15293147 NR Description: unknown protein [Arabidopsis thaliana]
MLRFFKTDHRLFHRIIGYTRPFHGLAKTQNAEIARPGLVDPSSHPWPEWLDLMGMLAKKGYFEESLIPLMSSKESNHIRTACLNFARHRFTLVRNLSKKDIKVIAGCGCPSTDRKVVNSGKRLRAYVGIDEGNVCGSCNLRGKCERAYAQARDDEGARTIDVMRLLLTYGLDSISPTVENRACQTKLVEDSVRKLLRESVAYSLTDFESAETETAGDELQPNSQDIDERDPRKRPGDWYCTECKFLNFAKNIRCLRCDVFSEERLKQLKEEQKDHLPLKKGDWICQTCNFLNFSKNTRCLRCKDKPTLRQINPGEWECESCNYINFRRNSICLKCDHKRQKAANVTPDSKTVADRQSGVTKTWSFVEEESVKRCNGEEEEEEDGFMGFPVEGGRSNVSKSAEKREQWKLEMTQRIRSNGTKAKKDDNTKNETESKCYDRRRNELLGNISDDGEMDDWFVSKQDRST

SEQ ID NO: 105613 - protein, 414 aa, Arabidopsis thaliana
  peptide (1)..(414): Ceres Seq. ID no. 13617587
  misc_feature (260)..(289): Pfam Name: Zn-finger in Ran binding protein and others Pfam Description: Zn-finger in Ran binding protein and others
  misc_feature (1)..(414): Homolog of NCBI NO: 18409643 NR Description: expressed protein [Arabidopsis thaliana]
  misc_feature (1)..(414): Homolog of NCBI NO: 21593408 NR Description: unknown [Arabidopsis thaliana]
  misc_feature (1)..(253): Homolog of NCBI NO: 25372841 NR Description: hypothetical protein F5A18.17 [imported] -
  misc_feature (219)..(414): Homolog of NCBI NO: 25372841 NR Description: hypothetical protein F5A18.17 [imported] -
  misc_feature (1)..(399): Homolog of NCBI NO: 13324787 NR Description: hypothetical protein [Oryza sativa]
  misc_feature (20)..(349): Homolog of NCBI NO: 13702809 NR Description: putative ARP protein [Oryza sativa]
  misc_feature (1)..(21): Homolog of NCBI NO: 13702809 NR Description: putative ARP protein [Oryza sativa]
  misc_feature (1)..(253): Homolog of NCBI NO: 15293147 NR Description: unknown protein [Arabidopsis thaliana]
  misc_feature (1)..(253): Homolog of NCBI NO: 18405190 NR Description: expressed protein [Arabidopsis thaliana]
  misc_feature (1)..(11): Homolog of NCBI NO: 15293147 NR Description: unknown protein [Arabidopsis thaliana]
MGMLAKKGYFEESLIPLMSSKESNHIRTACLNFARHRFTLVRNLSKKDIKVIAGCGCPSTDRKVVNSGKRLRAYVGIDEGNVCGSCNLRGKCERAYAQARDDEGARTIDVMRLLLTYGLDSISPTVENRACQTKLVEDSVRKLLRESVAYSLTDFESAETETAGDELQPNSQDIDERDPRKRPGDWYCTECKFLNFAKNIRCLRCDVFSEERLKQLKEEQKDHLPLKKGDWICQTCNFLNFSKNTRCLRCKDKPTLRQINPGEWECESCNYINFRRNSICLKCDHKRQKAANVTPDSKTVADRQSGVTKTWSFVEEESVKRCNGEEEEEEDGFMGFPVEGGRSNVSKSAEKREQWKLEMTQRIRSNGTKAKKDDNTKNETESKCYDRRRNELLGNISDDGEMDDWFVSKQDRST

SEQ ID NO: 105614 - protein, 412 aa, Arabidopsis thaliana
  peptide (1)..(412): Ceres Seq. ID no. 13617588
  misc_feature (258)..(287): Pfam Name: Zn-finger in Ran binding protein and others Pfam Description: Zn-finger in Ran binding protein and others
  misc_feature (1)..(412): Homolog of NCBI NO: 18409643 NR Description: expressed protein [Arabidopsis thaliana]
  misc_feature (1)..(412): Homolog of NCBI NO: 21593408 NR Description: unknown [Arabidopsis thaliana]
  misc_feature (1)..(251): Homolog of NCBI NO: 25372841 NR Description: hypothetical protein F5A18.17 [imported] -
  misc_feature (217)..(412): Homolog of NCBI NO: 25372841 NR Description: hypothetical protein F5A18.17 [imported] -
  misc_feature (1)..(397): Homolog of NCBI NO: 13324787 NR Description: hypothetical protein [Oryza sativa]
  misc_feature (18)..(347): Homolog of NCBI NO: 13702809 NR Description: putative ARP protein [Oryza sativa]
  misc_feature (1)..(19): Homolog of NCBI NO: 13702809 NR Description: putative ARP protein [Oryza sativa]
  misc_feature (1)..(251): Homolog of NCBI NO: 15293147 NR Description: unknown protein [Arabidopsis thaliana]
  misc_feature (1)..(251): Homolog of NCBI NO: 18405190 NR Description: expressed protein [Arabidopsis thaliana]
  misc_feature (18)..(252): Homolog of NCBI NO: 34393925 NR Description: unknown protein [Oryza sativa (japonica
MLAKKGYFEESLIPLMSSKESNHIRTACLNFARHRFTLVRNLSKKDIKVIAGCGCPSTDRKVVNSGKRLRAYVGIDEGNVCGSCNLRGKCERAYAQARDDEGARTIDVMRLLLTYGLDSISPTVENRACQTKLVEDSVRKLLRESVAYSLTDFESAETETAGDELQPNSQDIDERDPRKRPGDWYCTECKFLNFAKNIRCLRCDVFSEERLKQLKEEQKDHLPLKKGDWICQTCNFLNFSKNTRCLRCKDKPTLRQINPGEWECESCNYINFRRNSICLKCDHKRQKAANVTPDSKTVADRQSGVTKTWSFVEEESVKRCNGEEEEEEDGFMGFPVEGGRSNVSKSAEKREQWKLEMTQRIRSNGTKAKKDDNTKNETESKCYDRRRNELLGNISDDGEMDDWFVSKQDRST

SEQ ID NO: 105615 - DNA, 815 bp, Arabidopsis thaliana
  misc_feature (1)..(815): Ceres Seq. ID no. 13617589
  misc_feature: MA Experiment ID: 20000069 Result: Down-regulated in Transcription
  misc_feature: MA Experiment 20000069 PARAMETER Experiment Name: At_100uM_ABA_Mutants_cDNA_P Parameter: Plant Line Value: CS23
  misc_feature: MA Experiment 20000069 PARAMETER Experiment Name: At_100uM_ABA_Mutants_cDNA_P Parameter: Timepoint (hr) Value: 6
  misc_feature: MA Experiment 20000069 PARAMETER Experiment Name: At_100uM_ABA_Mutants_cDNA_P Parameter: Tissue Value: Aerial
  misc_feature: MA Experiment 20000069 PARAMETER Experiment Name: At_100uM_ABA_Mutants_cDNA_P Parameter: Treatment Value: 100uM ABA vs. No Treatment
  misc_feature: MA Experiment ID: 20000070 Result: Down-regulated in Transcription
  misc_feature: MA Experiment 20000070 PARAMETER Experiment Name: At_100uM_ABA_Mutants_cDNA_P Parameter: Plant Line Value: CS24
  misc_feature: MA Experiment 20000070 PARAMETER Experiment Name: At_100uM_ABA_Mutants_cDNA_P Parameter: Timepoint (hr) Value: 6
  misc_feature: MA Experiment 20000070 PARAMETER Experiment Name: At_100uM_ABA_Mutants_cDNA_P Parameter: Tissue Value: Aerial
  misc_feature: MA Experiment 20000070 PARAMETER Experiment Name: At_100uM_ABA_Mutants_cDNA_P Parameter: Treatment Value: 100uM ABA vs. No Treatment
  misc_feature: MA Experiment ID: 20000071 Result: Down-regulated in Transcription
  misc_feature: MA Experiment 20000071 PARAMETER Experiment Name: At_100uM_ABA_Mutants_cDNA_P Parameter: Plant Line Value: CS8104
  misc_feature: MA Experiment 20000071 PARAMETER Experiment Name: At_100uM_ABA_Mutants_cDNA_P Parameter: Timepoint (hr) Value: 6
  misc_feature: MA Experiment 20000071 PARAMETER Experiment Name: At_100uM_ABA_Mutants_cDNA_P Parameter: Tissue Value: Aerial
  misc_feature: MA Experiment 20000071 PARAMETER Experiment Name: At_100uM_ABA_Mutants_cDNA_P Parameter: Treatment Value: 100uM ABA vs. No Treatment
  misc_feature: MA Experiment ID: 20000072 Result: Down-regulated in Transcription
  misc_feature: MA Experiment 20000072 PARAMETER Experiment Name: At_100uM_ABA_Mutants_cDNA_P Parameter: Plant Line Value: CS8105
  misc_feature: MA Experiment 20000072 PARAMETER Experiment Name: At_100uM_ABA_Mutants_cDNA_P Parameter: Timepoint (hr) Value: 6
  misc_feature: MA Experiment 20000072 PARAMETER Experiment Name: At_100uM_ABA_Mutants_cDNA_P Parameter: Tissue Value: Aerial
  misc_feature: MA Experiment 20000072 PARAMETER Experiment Name: At_100uM_ABA_Mutants_cDNA_P Parameter: Treatment Value: 100uM ABA vs. No Treatment
  misc_feature: MA Experiment ID: 20000087 Result: Down-regulated in Transcription
  misc_feature: MA Experiment 20000087 PARAMETER Experiment Name: At_100uM_ABA_Mutants_cDNA_P Parameter: Plant Line Value: WS
  misc_feature: MA Experiment 20000087 PARAMETER Experiment Name: At_100uM_ABA_Mutants_cDNA_P Parameter: Timepoint (hr) Value: 6
  misc_feature: MA Experiment 20000087 PARAMETER Experiment Name: At_100uM_ABA_Mutants_cDNA_P Parameter: Tissue Value: Aerial
  misc_feature: MA Experiment 20000087 PARAMETER Experiment Name: At_100uM_ABA_Mutants_cDNA_P Parameter: Treatment Value: 100uM ABA vs. No Treatment
  misc_feature: MA Experiment ID: 20000113 Result: Up-regulated in Transcription
  misc_feature: MA Experiment 20000113 PARAMETER Experiment Name: At_42deg_Heat_cDNA_P Parameter: Temperature (deg C) Value: 42 vs. 22
  misc_feature: MA Experiment 20000113 PARAMETER Experiment Name: At_42deg_Heat_cDNA_P Parameter: Timepoint (hr) Value: 8
  misc_feature: MA Experiment 20000113 PARAMETER Experiment Name: At_42deg_Heat_cDNA_P Parameter: Tissue Value: Aerial
  misc_feature: MA Experiment ID: 20000437 Result: Down-regulated in Transcription
  misc_feature: MA Experiment 20000437 PARAMETER Experiment Name: At_Drought_P Parameter: Age (day) Value: 8
  misc_feature: MA Experiment 20000437 PARAMETER Experiment Name: At_Drought_P Parameter: Organism Value: A. thaliana
  misc_feature: MA Experiment 20000437 PARAMETER Experiment Name: At_Drought_P Parameter: Plant Line Value: WS
  misc_feature: MA Experiment 20000437 PARAMETER Experiment Name: At_Drought_P Parameter: Timepoint (hr) Value: 24
  misc_feature: MA Experiment 20000437 PARAMETER Experiment Name: At_Drought_P Parameter: Tissue Value: Whole Plant
  misc_feature: MA Experiment 20000437 PARAMETER Experiment Name: At_Drought_P Parameter: Treatment Value: Drought vs. No Drought
  misc_feature: MA Experiment ID: 20001451 Result: Up-regulated in Transcription
  misc_feature: MA Experiment 20001451 PARAMETER Experiment Name: At_Far-red-induction_P Parameter: Age (day) Value: 7
  misc_feature: MA Experiment 20001451 PARAMETER Experiment Name: At_Far-red-induction_P Parameter: Light Value: Far-red vs. White
  misc_feature: MA Experiment 20001451 PARAMETER Experiment Name: At_Far-red-induction_P Parameter: Organism Value: A. thaliana
  misc_feature: MA Experiment 20001451 PARAMETER Experiment Name: At_Far-red-induction_P Parameter: Plant Line Value: Columbia
  misc_feature: MA Experiment 20001451 PARAMETER Experiment Name: At_Far-red-induction_P Parameter: Timepoint (hr) Value: 24
  misc_feature: MA Experiment 20001451 PARAMETER Experiment Name: At_Far-red-induction_P Parameter: Tissue Value: Whole Plant
  misc_feature: MA Experiment ID: 20001905 Result: Down-regulated in Transcription
  misc_feature: MA Experiment 20001905 PARAMETER Experiment Name: At_Drought_Reproduction_P Parameter: Age (day) Value: 40
  misc_feature: MA Experiment 20001905 PARAMETER Experiment Name: At_Drought_Reproduction_P Parameter: Organism Value: A. thaliana
  misc_feature: MA Experiment 20001905 PARAMETER Experiment Name: At_Drought_Reproduction_P Parameter: Plant Line Value: WS
  misc_feature: MA Experiment 20001905 PARAMETER Experiment Name: At_Drought_Reproduction_P Parameter: Timepoint (day) Value: 10
  misc_feature: MA Experiment 20001905 PARAMETER Experiment Name: At_Drought_Reproduction_P Parameter: Tissue Value: Rosettes
  misc_feature: MA Experiment 20001905 PARAMETER Experiment Name: At_Drought_Reproduction_P Parameter: Treatment Value: Drought vs. No Drought
acaattcatatcctgtctgatgaacagtagctgttagactctctctctttctctcttctctgttcttcttcatcttctctagccgaatccatccttcagatactactctgtaatttcactacaatcatctcagccaaatgggttcggaagaagagaaggtcgttgttcccagaaactttagattattggaagagctagaaagaggtgagaaaggaattggagatgggacagtgagttatggaatggatgatgctgatgatattttgatgcaatcttggactggtaccattcttggtcctcataatactgcgtatgaagggaaaatctttcagctgaagctattctgtggaaaggattatccggaaagtccacctactgtgaggtttcagagtcgtataaacatggcttgtgtcaatcctgagaatggagtggttgatccgagtcacttccctatgctttccaactggagaagagaattcacaatggaggatctactgattcagcttaaaaaagaaatgatgtcatcgcagaaccgcaagttagctcaacccttggaaggtaatgaggaaggcaggacagacccaaagggactagtggtgaaatgttgcgtgatgtgaaaagaggtaatgaggaatttataagaatttaagagacaaaacaatgtatataaacagcatttgaagggctttgagattggcctaagaaccctttcttctataggccttcttaatcctaccatttgattatgtattatgtaatatttgagaatatattcaccaaaaacaggtgcccttaataaacctccactcttcttc

SEQ ID NO: 105616 - protein, 159 aa, Arabidopsis thaliana; identical to SEQ ID NO: 27234
  peptide (1)..(159): Ceres Seq. ID no. 13617590
  misc_feature (1)..(159): Homolog of NCBI NO: 18409647 NR Description: ubiquitin-conjugating enzyme family [Arabidopsis
  misc_feature (1)..(159): Homolog of NCBI NO: 21593918 NR Description: E2, ubiquitin-conjugating enzyme, putative
  misc_feature (1)..(159): Homolog of NCBI NO: 18395221 NR Description: ubiquitin-conjugating enzyme family [Arabidopsis >gi|16649053|gb|AAL24378.1| similar to DNA binding protein thaliana] >gi|20259984|gb|AAM13339.1| similar to DNA binding
  misc_feature (1)..(159): Homolog of NCBI NO: 25326240 NR Description: protein F26F24.10 [imported] - Arabidopsis >gi|9295713|gb|AAF87019.1|AC005292_28 F26F24.10 [Arabidopsis
  misc_feature (10)..(159): Homolog of NCBI NO: 13324790 NR Description: putative DNA-binding protein [Oryza sativa]
  misc_feature (1)..(141): Homolog of NCBI NO: 18409633 NR Description: ubiquitin-conjugating enzyme family [Arabidopsis
  misc_feature (1)..(141): Homolog of NCBI NO: 30693656 NR Description: ubiquitin-conjugating enzyme family [Arabidopsis
  misc_feature (1)..(141): Homolog of NCBI NO: 18404032 NR Description: ubiquitin-conjugating enzyme family [Arabidopsis
  misc_feature (1)..(141): Homolog of NCBI NO: 30686662 NR Description: ubiquitin-conjugating enzyme family [Arabidopsis
  misc_feature (8)..(141): Homolog of NCBI NO: 2982253 NR Description: CROC-1-like protein [Picea mariana]

SEQ ID NO: 105617 - protein, 124 aa, Arabidopsis thaliana; identical to SEQ ID NO: 27235
  peptide (1)..(124): Ceres Seq. ID no. 13617591
  misc_feature (1)..(124): Homolog of NCBI NO: 18409647 NR Description: ubiquitin-conjugating enzyme family [Arabidopsis
  misc_feature (1)..(124): Homolog of NCBI NO: 21593918 NR Description: E2, ubiquitin-conjugating enzyme, putative
  misc_feature (1)..(124): Homolog of NCBI NO: 18395221 NR Description: ubiquitin-conjugating enzyme family [Arabidopsis >gi|16649053|gb|AAL24378.1| similar to DNA binding protein thaliana] >gi|20259984|gb|AAM13339.1| similar to DNA binding
  misc_feature (1)..(124): Homolog of NCBI NO: 25326240 NR Description: protein F26F24.10 [imported] - Arabidopsis >gi|9295713|gb|AAF87019.1|AC005292_28 F26F24.10 [Arabidopsis
  misc_feature (1)..(124): Homolog of NCBI NO: 13324790 NR Description: putative DNA-binding protein [Oryza sativa]
  misc_feature (1)..(106): Homolog of NCBI NO: 18409633 NR Description: ubiquitin-conjugating enzyme family [Arabidopsis
  misc_feature (1)..(106): Homolog of NCBI NO: 30693656 NR Description: ubiquitin-conjugating enzyme family [Arabidopsis
  misc_feature (1)..(106): Homolog of NCBI NO: 18404032 NR Description: ubiquitin-conjugating enzyme family [Arabidopsis
  misc_feature (1)..(106): Homolog of NCBI NO: 30686662 NR Description: ubiquitin-conjugating enzyme family [Arabidopsis
  misc_feature (1)..(106): Homolog of NCBI NO: 2982253 NR Description: CROC-1-like protein [Picea mariana]

SEQ ID NO: 105618 - protein, 116 aa, Arabidopsis thaliana; identical to SEQ ID NO: 27236
  peptide (1)..(116): Ceres Seq. ID no. 13617592
  misc_feature (1)..(116): Homolog of NCBI NO: 18409647 NR Description: ubiquitin-conjugating enzyme family [Arabidopsis
  misc_feature (1)..(116): Homolog of NCBI NO: 21593918 NR Description: E2, ubiquitin-conjugating enzyme, putative
  misc_feature (1)..(116): Homolog of NCBI NO: 18395221 NR Description: ubiquitin-conjugating enzyme family [Arabidopsis >gi|16649053|gb|AAL24378.1| similar to DNA binding protein thaliana] >gi|20259984|gb|AAM13339.1| similar to DNA binding
  misc_feature (1)..(116): Homolog of NCBI NO: 25326240 NR Description: protein F26F24.10 [imported] - Arabidopsis >gi|9295713|gb|AAF87019.1|AC005292_28 F26F24.10 [Arabidopsis
  misc_feature (1)..(116): Homolog of NCBI NO: 13324790 NR Description: putative DNA-binding protein [Oryza sativa]
  misc_feature (1)..(98): Homolog of NCBI NO: 18409633 NR Description: ubiquitin-conjugating enzyme family [Arabidopsis
  misc_feature (1)..(98): Homolog of NCBI NO: 30693656 NR Description: ubiquitin-conjugating enzyme family [Arabidopsis
  misc_feature (1)..(98): Homolog of NCBI NO: 18404032 NR Description: ubiquitin-conjugating enzyme family [Arabidopsis
  misc_feature (1)..(98): Homolog of NCBI NO: 30686662 NR Description: ubiquitin-conjugating enzyme family [Arabidopsis
  misc_feature (1)..(98): Homolog of NCBI NO: 2982253 NR Description: CROC-1-like protein [Picea mariana]

SEQ ID NO: 105619 - DNA, 986 bp, Arabidopsis thaliana
  misc_feature (1)..(986): Ceres Seq. ID no. 13617593
  misc_feature: MA Experiment ID: 108434 Result: Down-regulated in Transcription
  misc_feature: MA Experiment 108434 PARAMETER Experiment Name: At_Root_Tips_cDNA_P Parameter: Tissue Value: Root Tips
  misc_feature: MA Experiment ID: 108461 Result: Up-regulated in Transcription
  misc_feature: MA Experiment 108461 PARAMETER Experiment Name: At_Germinating_Seeds_cDNA_P Parameter: Age (day) Value: 1 vs. 0
  misc_feature: MA Experiment 108461 PARAMETER Experiment Name: At_Germinating_Seeds_cDNA_P Parameter: Tissue Value: Germinating Seeds
  misc_feature: MA Experiment ID: 108462 Result: Up-regulated in Transcription
  misc_feature: MA Experiment 108462 PARAMETER Experiment Name: At_Germinating_Seeds_cDNA_P Parameter: Age (day) Value: 2 vs. 0
  misc_feature: MA Experiment 108462 PARAMETER Experiment Name: At_Germinating_Seeds_cDNA_P Parameter: Tissue Value: Germinating Seeds
  misc_feature: MA Experiment ID: 108463 Result: Up-regulated in Transcription
  misc_feature: MA Experiment 108463 PARAMETER Experiment Name: At_Germinating_Seeds_cDNA_P Parameter: Age (day) Value: 3 vs. 0
  misc_feature: MA Experiment 108463 PARAMETER Experiment Name: At_Germinating_Seeds_cDNA_P Parameter: Tissue Value: Germinating Seeds
  misc_feature: MA Experiment ID: 108464 Result: Up-regulated in Transcription
  misc_feature: MA Experiment 108464 PARAMETER Experiment Name: At_Germinating_Seeds_cDNA_P Parameter: Age (day) Value: 4 vs. 0
  misc_feature: MA Experiment 108464 PARAMETER Experiment Name: At_Germinating_Seeds_cDNA_P Parameter: Tissue Value: Germinating Seeds
  misc_feature: MA Experiment ID: 108488 Result: Down-regulated in Transcription
  misc_feature: MA Experiment ID: 20000111 Result: Down-regulated in Transcription
  misc_feature: MA Experiment 20000111 PARAMETER Experiment Name: At_42deg_Heat_cDNA_P Parameter: Temperature (deg C) Value: 42 vs. 22
  misc_feature: MA Experiment 20000111 PARAMETER Experiment Name: At_42deg_Heat_cDNA_P Parameter: Timepoint (hr) Value: 6
  misc_feature: MA Experiment 20000111 PARAMETER Experiment Name: At_42deg_Heat_cDNA_P Parameter: Tissue Value: Aerial
  misc_feature: MA Experiment ID: 20000113 Result: Down-regulated in Transcription
  misc_feature: MA Experiment 20000113 PARAMETER Experiment Name: At_42deg_Heat_cDNA_P Parameter: Temperature (deg C) Value: 42 vs. 22
  misc_feature: MA Experiment 20000113 PARAMETER Experiment Name: At_42deg_Heat_cDNA_P Parameter: Timepoint (hr) Value: 8
  misc_feature: MA Experiment 20000113 PARAMETER Experiment Name: At_42deg_Heat_cDNA_P Parameter: Tissue Value: Aerial
  misc_feature: MA Experiment ID: 20000180 Result: Up-regulated in Transcription
  misc_feature: MA Experiment 20000180 PARAMETER Experiment Name: At_Germinating_Seeds_P Parameter: Age (hr) Value: 24 vs. 0
  misc_feature: MA Experiment 20000180 PARAMETER Experiment Name: At_Germinating_Seeds_P Parameter: Tissue Value: Germinating Seeds
  misc_feature: MA Experiment ID: 20000184 Result: Down-regulated in Transcription
  misc_feature: MA Experiment 20000184 PARAMETER Experiment Name: At_Shoots__P Parameter: Age (day) Value: 7
  misc_feature: MA Experiment 20000184 PARAMETER Experiment Name: At_Shoots__P Parameter: Tissue Value: Shoots vs. Whole Plant
  misc_feature: MA Experiment ID: 20000185 Result: Up-regulated in Transcription
  misc_feature: MA Experiment 20000185 PARAMETER Experiment Name: At_Roots__P Parameter: Age (day) Value: 7 vs. 21
  misc_feature: MA Experiment 20000185 PARAMETER Experiment Name: At_Roots__P Parameter: Organism Value: A. thaliana
  misc_feature: MA Experiment 20000185 PARAMETER Experiment Name: At_Roots__P Parameter: Tissue Value: Roots vs. Whole Plant
  misc_feature: MA Experiment ID: 20000264 Result: Up-regulated in Transcription
  misc_feature: MA Experiment 20000264 PARAMETER Experiment Name: At_Open_Flower_P Parameter: Age (day) Value: 21
  misc_feature: MA Experiment 20000264 PARAMETER Experiment Name: At_Open_Flower_P Parameter: Plant Line Value: WS
  misc_feature: MA Experiment 20000264 PARAMETER Experiment Name: At_Open_Flower_P Parameter: Tissue Value: Open Flower vs. Whole Plant
  misc_feature: MA Experiment ID: 20000794 Result: Up-regulated in Transcription
  misc_feature: MA Experiment 20000794 PARAMETER Experiment Name: At_Petals_P Parameter: Age (day) Value: 23-25 days
  misc_feature: MA Experiment 20000794 PARAMETER Experiment Name: At_Petals_P Parameter: Plant Line Value: WS
  misc_feature: MA Experiment 20000794 PARAMETER Experiment Name: At_Petals_P Parameter: Tissue Value: Petals vs. Whole plant
  misc_feature: MA Experiment ID: 20001557 Result: Down-regulated in Transcription
  misc_feature: MA Experiment 20001557 PARAMETER Experiment Name: At_Drought_Soil_Dry_P Parameter: Age (day) Value: 27
  misc_feature: MA Experiment 20001557 PARAMETER Experiment Name: At_Drought_Soil_Dry_P Parameter: Organism Value: A. thaliana
  misc_feature: MA Experiment 20001557 PARAMETER Experiment Name: At_Drought_Soil_Dry_P Parameter: Plant Line Value: WS
  misc_feature: MA Experiment 20001557 PARAMETER Experiment Name: At_Drought_Soil_Dry_P Parameter: Post Timepoint (hr) Value: 3
  misc_feature: MA Experiment 20001557 PARAMETER Experiment Name: At_Drought_Soil_Dry_P Parameter: Post-Treatment Value: Re-Water vs. No Drought
  misc_feature: MA Experiment 20001557 PARAMETER Experiment Name: At_Drought_Soil_Dry_P Parameter: Timepoint (day) Value: 13
  misc_feature: MA Experiment 20001557 PARAMETER Experiment Name: At_Drought_Soil_Dry_P Parameter: Treatment Value: Drought vs. No Drought
  misc_feature: MA Experiment ID: 20001904 Result: Up-regulated in Transcription
  misc_feature: MA Experiment 20001904 PARAMETER Experiment Name: At_Drought_Reproduction_P Parameter: Age (day) Value: 37
  misc_feature: MA Experiment 20001904 PARAMETER Experiment Name: At_Drought_Reproduction_P Parameter: Organism Value: A. thaliana
  misc_feature: MA Experiment 20001904 PARAMETER Experiment Name: At_Drought_Reproduction_P Parameter: Plant Line Value: WS
  misc_feature: MA Experiment 20001904 PARAMETER Experiment Name: At_Drought_Reproduction_P Parameter: Timepoint (day) Value: 7
  misc_feature: MA Experiment 20001904 PARAMETER Experiment Name: At_Drought_Reproduction_P Parameter: Tissue Value: Rosettes
  misc_feature: MA Experiment 20001904 PARAMETER Experiment Name: At_Drought_Reproduction_P Parameter: Treatment Value: Drought vs. No Drought
  misc_feature: MA Experiment ID: 20001905 Result: Up-regulated in Transcription
  misc_feature: MA Experiment 20001905 PARAMETER Experiment Name: At_Drought_Reproduction_P Parameter: Age (day) Value: 40
  misc_feature: MA Experiment 20001905 PARAMETER Experiment Name: At_Drought_Reproduction_P Parameter: Organism Value: A. thaliana
  misc_feature: MA Experiment 20001905 PARAMETER Experiment Name: At_Drought_Reproduction_P Parameter: Plant Line Value: WS
  misc_feature: MA Experiment 20001905 PARAMETER Experiment Name: At_Drought_Reproduction_P Parameter: Timepoint (day) Value: 10
  misc_feature: MA Experiment 20001905 PARAMETER Experiment Name: At_Drought_Reproduction_P Parameter: Tissue Value: Rosettes
  misc_feature: MA Experiment 20001905 PARAMETER Experiment Name: At_Drought_Reproduction_P Parameter: Treatment Value: Drought vs. No Drought
attttcttgtcttcgtatagaatcaaaaaaaaagtaacgacgatgcaaatatactatatattacataggcttcaccagatcatctcgaatcttaatcacattattaatacaattacatagaaggagcaattaaatctctatatataaaaggaagcgtgtgtttcgccttctcttttcaccattttcagttactttctctctttcatcttttaccattctcttcttcttttttttctctcattctgatcatggcttcctctatttccactggagtgaaatttgttccagaagaagataatttcttgcagagacatgtcgcttttttcgataggaacaaagatggtatcgtttatccctcggagacatttcaaggatttagagcaattgggtgtggatatttgttgtcagcagtcgcttctgtgttcataaacataggtctcagcagcaaaactcgtccgggtaaaggattctctatctggtttcctatagaggttaagaatattcaccttgccaaacacggaagcgattcaggcgtttacgacaaagatggacggtttgttgcttcgaagtttgaggagatatttacgaagcatgcacacacacatcgcgatgctttgaccaacgaggaactcaaacaactcctaaaggcaaacaaagaacctaatgatcgtaaaggatggcttgcagggtatacggagtggaaggtattgcattatttgtgtaaagacaagaatggtttgttgcacaaagacacagtgagagctgcctacgatggttctcttttcgaaaaactcgagaaacaaagatcttctaaaacttctaagaaacatccataaatccttatttaaatataatcaagctctcctgcatgcttgtggatctgtttatttttaaaactattacttcaatgttatagtgaatatttatggtgtgaagattgtaatgagttttaacaacaataaaaaaaacatgtaatgtgtttaatt

SEQ ID NO: 105620 - protein, 195 aa, Arabidopsis thaliana; identical to SEQ ID NO: 27036
  peptide (1)..(195): Ceres Seq. ID no. 13617594
  misc_feature (11)..(184): Pfam Name: Caleosin related protein Pfam Description: Caleosin related protein
  misc_feature (1)..(195): Homolog of NCBI NO: 18409649 NR Description: Ca2+-binding EF-hand common family protein, [Arabidopsis thaliana] >gi|25406062|pir||A96731 unknown protein
  misc_feature (1)..(195): Homolog of NCBI NO: 21593851 NR Description: unknown [Arabidopsis thaliana]
  misc_feature (1)..(190): Homolog of NCBI NO: 18409651 NR Description: Ca2+-binding EF-hand common family protein, [Arabidopsis thaliana] >gi|25406064|pir||B96731 unknown protein
  misc_feature (1)..(190): Homolog of NCBI NO: 21617961 NR Description: unknown [Arabidopsis thaliana]
  misc_feature (19)..(192): Homolog of NCBI NO: 15220687 NR Description: pollen coat EF-hand protein [Arabidopsis
  misc_feature (1)..(192): Homolog of NCBI NO: 9295714 NR Description: F26F24.9 [Arabidopsis thaliana]
  misc_feature (6)..(192): Homolog of NCBI NO: 37652831 NR Description: calcium binding protein [Fagus sylvatica]
  misc_feature (19)..(188): Homolog of NCBI NO: 34902470 NR Description: Putative abscisic acid-induced protein - rice
  misc_feature (41)..(192): Homolog of NCBI NO: 15220688 NR Description: Ca2+-binding EF-hand common family protein,
  misc_feature (16)..(193): Homolog of NCBI NO: 6478218 NR Description: caleosin [Sesamum indicum]

SEQ ID NO: 105621 - DNA, 1190 bp, Arabidopsis thaliana
  misc_feature (1)..(1190): Ceres Seq. ID no. 13617595
  misc_feature: MA Experiment ID: 108433 Result: Up-regulated in Transcription
  misc_feature: MA Experiment 108433 PARAMETER Experiment Name: At_rhl_Mutant2_cDNA_P Parameter: Age (day) Value: 7
  misc_feature: MA Experiment 108433 PARAMETER Experiment Name: At_rhl_Mutant2_cDNA_P Parameter: Organism Value: A. thaliana
  misc_feature: MA Experiment 108433 PARAMETER Experiment Name: At_rhl_Mutant2_cDNA_P Parameter: Plant Line Value: rhl Mutant vs. wt landsburg
  misc_feature: MA Experiment 108433 PARAMETER Experiment Name: At_rhl_Mutant2_cDNA_P Parameter: Tissue Value: Roots
  misc_feature: MA Experiment ID: 108434 Result: Down-regulated in Transcription
  misc_feature: MA Experiment 108434 PARAMETER Experiment Name: At_Root_Tips_cDNA_P Parameter: Tissue Value: Root Tips
  misc_feature: MA Experiment ID: 108461 Result: Up-regulated in Transcription
  misc_feature: MA Experiment 108461 PARAMETER Experiment Name: At_Germinating_Seeds_cDNA_P Parameter: Age (day) Value: 1 vs. 0
  misc_feature: MA Experiment 108461 PARAMETER Experiment Name: At_Germinating_Seeds_cDNA_P Parameter: Tissue Value: Germinating Seeds
  misc_feature: MA Experiment ID: 108462 Result: Up-regulated in Transcription
  misc_feature: MA Experiment 108462 PARAMETER Experiment Name: At_Germinating_Seeds_cDNA_P Parameter: Age (day) Value: 2 vs. 0
  misc_feature: MA Experiment 108462 PARAMETER Experiment Name: At_Germinating_Seeds_cDNA_P Parameter: Tissue Value: Germinating Seeds
  misc_feature: MA Experiment ID: 108463 Result: Up-regulated in Transcription
  misc_feature: MA Experiment 108463 PARAMETER Experiment Name: At_Germinating_Seeds_cDNA_P Parameter: Age (day) Value: 3 vs. 0
  misc_feature: MA Experiment 108463 PARAMETER Experiment Name: At_Germinating_Seeds_cDNA_P Parameter: Tissue Value: Germinating Seeds
  misc_feature: MA Experiment ID: 108469 Result: Up-regulated in Transcription
  misc_feature: MA Experiment ID: 108501 Result: Up-regulated in Transcription
  misc_feature: MA Experiment 108501 PARAMETER Experiment Name: At_ap2_floral_buds_cDNA_P Parameter: Plant Line Value: ap2 (Ler.)
  misc_feature: MA Experiment 108501 PARAMETER Experiment Name: At_ap2_floral_buds_cDNA_P Parameter: Tissue Value: Closed Flower
  misc_feature: MA Experiment ID: 108561 Result: Up-regulated in Transcription
  misc_feature: MA Experiment 108561 PARAMETER Experiment Name: At_100uM_ABA_cDNA_P Parameter: Timepoint (hr) Value: 6
  misc_feature: MA Experiment 108561 PARAMETER Experiment Name: At_100uM_ABA_cDNA_P Parameter: Tissue Value: Aerial
  misc_feature: MA Experiment 108561 PARAMETER Experiment Name: At_100uM_ABA_cDNA_P Parameter: Treatment Value: 100uM ABA vs. No Treatment
  misc_feature: MA Experiment ID: 108585 Result: Up-regulated in Transcription
  misc_feature: MA Experiment 108585 PARAMETER Experiment Name: At_5mM_NaNP_cDNA_P Parameter: Timepoint (hr) Value: 6
  misc_feature: MA Experiment 108585 PARAMETER Experiment Name: At_5mM_NaNP_cDNA_P Parameter: Tissue Value: Aerial
  misc_feature: MA Experiment 108585 PARAMETER Experiment Name: At_5mM_NaNP_cDNA_P Parameter: Treatment Value: null
  misc_feature: MA Experiment ID: 108594 Result: Down-regulated in Transcription
  misc_feature: MA Experiment 108594 PARAMETER Experiment Name: At_Ler-rhl_Root_cDNA_P Parameter: Plant Line Value: null
  misc_feature: MA Experiment ID: 108607 Result: Up-regulated in Transcription
  misc_feature: MA Experiment 108607 PARAMETER Experiment Name: At_100uM_ABA_cDNA_P Parameter: Timepoint (hr) Value: 4
  misc_feature: MA Experiment 108607 PARAMETER Experiment Name: At_100uM_ABA_cDNA_P Parameter: Tissue Value: Aerial
  misc_feature: MA Experiment 108607 PARAMETER Experiment Name: At_100uM_ABA_cDNA_P Parameter: Treatment Value: 100uM ABA vs. No Treatment
  misc_feature: MA Experiment ID: 108668 Result: Up-regulated in Transcription
  misc_feature: MA Experiment 108668 PARAMETER Experiment Name: At_2mM_SA_cDNA_P Parameter: Plant Line Value: WS
  misc_feature: MA Experiment 108668 PARAMETER Experiment Name: At_2mM_SA_cDNA_P Parameter: Timepoint (hr) Value: 6
  misc_feature: MA Experiment 108668 PARAMETER Experiment Name: At_2mM_SA_cDNA_P Parameter: Treatment Value: 2mM SA vs. No Treatment
  misc_feature: MA Experiment ID: 20000182 Result: Up-regulated in Transcription
  misc_feature: MA Experiment 20000182 PARAMETER Experiment Name: At_2mM_SA_P Parameter: Age (day) Value: 14
  misc_feature: MA Experiment 20000182 PARAMETER Experiment Name: At_2mM_SA_P Parameter: Organism Value: A. thaliana
  misc_feature: MA Experiment 20000182 PARAMETER Experiment Name: At_2mM_SA_P Parameter: Plant Line Value: WS
  misc_feature: MA Experiment 20000182 PARAMETER Experiment Name: At_2mM_SA_P Parameter: Timepoint (hr) Value: 6
  misc_feature: MA Experiment 20000182 PARAMETER Experiment Name: At_2mM_SA_P Parameter: Tissue Value: Aerial
  misc_feature: MA Experiment 20000182 PARAMETER Experiment Name: At_2mM_SA_P Parameter: Treatment Value: 2mM SA vs. No Treatment
  misc_feature: MA Experiment ID: 20000184 Result: Down-regulated in Transcription
  misc_feature: MA Experiment 20000184 PARAMETER Experiment Name: At_Shoots__P Parameter: Age (day) Value: 7
  misc_feature: MA Experiment 20000184 PARAMETER Experiment Name: At_Shoots__P Parameter: Tissue Value: Shoots vs. Whole Plant
  misc_feature: MA Experiment ID: 20000227 Result: Down-regulated in Transcription
  misc_feature: MA Experiment 20000227 PARAMETER Experiment Name: At_Root-Tips-vs-Tops_P Parameter: Tissue Value: Root Tips vs. Root Tops
  misc_feature: MA Experiment ID: 20000234 Result: Down-regulated in Transcription
  misc_feature: MA Experiment 20000234 PARAMETER Experiment Name: At_Siliques_P Parameter: Age (day) Value: 21
  misc_feature: MA Experiment 20000234 PARAMETER Experiment Name: At_Siliques_P Parameter: Organism Value: A. thaliana
  misc_feature: MA Experiment 20000234 PARAMETER Experiment Name: At_Siliques_P Parameter: Plant Line Value: WS
  misc_feature: MA Experiment 20000234 PARAMETER Experiment Name: At_Siliques_P Parameter: Tissue Value: Less Than 5mm Siliques vs. Whole Plant
  misc_feature: MA Experiment ID: 20000235 Result: Down-regulated in Transcription
  misc_feature: MA Experiment 20000235 PARAMETER Experiment Name: At_Siliques_P Parameter: Age (day) Value: 21
  misc_feature: MA Experiment 20000235 PARAMETER Experiment Name: At_Siliques_P Parameter: Organism Value: A. thaliana
  misc_feature: MA Experiment 20000235 PARAMETER Experiment Name: At_Siliques_P Parameter: Plant Line Value: WS
  misc_feature: MA Experiment 20000235 PARAMETER Experiment Name: At_Siliques_P Parameter: Tissue Value: 5-10mm Siliques vs. Whole Plant
  misc_feature: MA Experiment ID: 20000264 Result: Down-regulated in Transcription
  misc_feature: MA Experiment 20000264 PARAMETER Experiment Name: At_Open_Flower_P Parameter: Age (day) Value: 21
  misc_feature: MA Experiment 20000264 PARAMETER Experiment Name: At_Open_Flower_P Parameter: Plant Line Value: WS
  misc_feature: MA Experiment 20000264 PARAMETER Experiment Name: At_Open_Flower_P Parameter: Tissue Value: Open Flower vs. Whole Plant
  misc_feature: MA Experiment ID: 20000265 Result: Down-regulated in Transcription
  misc_feature: MA Experiment 20000265 PARAMETER Experiment Name: At_Open_Flower_P Parameter: Age (day) Value: 21
  misc_feature: MA Experiment 20000265 PARAMETER Experiment Name: At_Open_Flower_P Parameter: Plant Line Value: WS
  misc_feature: MA Experiment 20000265 PARAMETER Experiment Name: At_Open_Flower_P Parameter: Tissue Value: Closed Flower vs. Whole Plant
  misc_feature: MA Experiment ID: 20000286 Result: Down-regulated in Transcription
  misc_feature: MA Experiment 20000286 PARAMETER Experiment Name: At_Open_Flower_P Parameter: Age (day) Value: 21
  misc_feature: MA Experiment 20000286 PARAMETER Experiment Name: At_Open_Flower_P Parameter: Plant Line Value: WS
  misc_feature: MA Experiment 20000286 PARAMETER Experiment Name: At_Open_Flower_P Parameter: Tissue Value: Half Open vs. Whole Plant
  misc_feature: MA Experiment ID: 20000438 Result: Down-regulated in Transcription
  misc_feature: MA Experiment 20000438 PARAMETER Experiment Name: At_Shoots__P Parameter: Age (day) Value: 14
  misc_feature: MA Experiment 20000438 PARAMETER Experiment Name: At_Shoots__P Parameter: Tissue Value: Shoots vs. Whole Plant
  misc_feature: MA Experiment ID: 20000453 Result: Up-regulated in Transcription
  misc_feature: MA Experiment 20000453 PARAMETER Experiment Name: At_100uM_ABA_P Parameter: Age (day) Value: 15
  misc_feature: MA Experiment 20000453 PARAMETER Experiment Name: At_100uM_ABA_P Parameter: Organism Value: A. thaliana
  misc_feature: MA Experiment 20000453 PARAMETER Experiment Name: At_100uM_ABA_P Parameter: Plant Line Value: WS
  misc_feature: MA Experiment 20000453 PARAMETER Experiment Name: At_100uM_ABA_P Parameter: Timepoint (hr) Value: 24
  misc_feature: MA Experiment 20000453 PARAMETER Experiment Name: At_100uM_ABA_P Parameter: Tissue Value: Aerial
  misc_feature: MA Experiment 20000453 PARAMETER Experiment Name: At_100uM_ABA_P Parameter: Treatment Value: 100uM ABA vs. No Treatment
  misc_feature: MA Experiment ID: 20000460 Result: Down-regulated in Transcription
  misc_feature: MA Experiment 20000460 PARAMETER Experiment Name: At_10percent_PEG_P Parameter: Age (day) Value: 12
  misc_feature: MA Experiment 20000460 PARAMETER Experiment Name: At_10percent_PEG_P Parameter: Organism Value: A. thaliana
  misc_feature: MA Experiment 20000460 PARAMETER Experiment Name: At_10percent_PEG_P Parameter: Plant Line Value: WS
  misc_feature: MA Experiment 20000460 PARAMETER Experiment Name: At_10percent_PEG_P Parameter: Timepoint (day) Value: 12
  misc_feature: MA Experiment 20000460 PARAMETER Experiment Name: At_10percent_PEG_P Parameter: Tissue Value: Whole Plant
  misc_feature: MA Experiment 20000460 PARAMETER Experiment Name: At_10percent_PEG_P Parameter: Treatment Value: 10percent PEG vs. No Treatment
  misc_feature: MA Experiment ID: 20000527 Result: Down-regulated in Transcription
  misc_feature: MA Experiment 20000527 PARAMETER Experiment Name: At_10percent_PEG_P Parameter: Age (day) Value: 20
  misc_feature: MA Experiment 20000527 PARAMETER Experiment Name: At_10percent_PEG_P Parameter: Organism Value: A. thaliana
  misc_feature: MA Experiment 20000527 PARAMETER Experiment Name: At_10percent_PEG_P Parameter: Plant Line Value: WS
  misc_feature: MA Experiment 20000527 PARAMETER Experiment Name: At_10percent_PEG_P Parameter: Timepoint (day) Value: 20
  misc_feature: MA Experiment 20000527 PARAMETER Experiment Name: At_10percent_PEG_P Parameter: Tissue Value: Whole Plant
  misc_feature: MA Experiment 20000527 PARAMETER Experiment Name: At_10percent_PEG_P Parameter: Treatment Value: 10percent PEG vs. No Treatment
  misc_feature: MA Experiment ID: 20000573 Result: Down-regulated in Transcription
  misc_feature: MA Experiment 20000573 PARAMETER Experiment Name: At_100uM_ABA_Mutants__P Parameter: Organism Value: A. thaliana
  misc_feature: MA Experiment 20000573 PARAMETER Experiment Name: At_100uM_ABA_Mutants__P Parameter: Plant Line Value: CS22 vs. Ler wt
  misc_feature: MA Experiment 20000573 PARAMETER Experiment Name: At_100uM_ABA_Mutants__P Parameter: Timepoint (hr) Value: N/A
  misc_feature: MA Experiment 20000573 PARAMETER Experiment Name: At_100uM_ABA_Mutants__P Parameter: Tissue Value: Whole Plant
  misc_feature: MA Experiment 20000573 PARAMETER Experiment Name: At_100uM_ABA_Mutants__P Parameter: Treatment Value: None
  misc_feature: MA Experiment ID: 20000794 Result: Down-regulated in Transcription
  misc_feature: MA Experiment 20000794 PARAMETER Experiment Name: At_Petals_P Parameter: Age (day) Value: 23-25 days
  misc_feature: MA Experiment 20000794 PARAMETER Experiment Name: At_Petals_P Parameter: Plant Line Value: WS
  misc_feature: MA Experiment 20000794 PARAMETER Experiment Name: At_Petals_P Parameter: Tissue Value: Petals vs. Whole plant
  misc_feature: MA Experiment ID: 20001556 Result: Down-regulated in Transcription
  misc_feature: MA Experiment 20001556 PARAMETER Experiment Name: At_Drought_Soil_Dry_P Parameter: Age (day) Value: 26
  misc_feature: MA Experiment 20001556 PARAMETER Experiment Name: At_Drought_Soil_Dry_P Parameter: Organism Value: A. thaliana
  misc_feature: MA Experiment 20001556 PARAMETER Experiment Name: At_Drought_Soil_Dry_P Parameter: Plant Line Value: WS
  misc_feature: MA Experiment 20001556 PARAMETER Experiment Name: At_Drought_Soil_Dry_P Parameter: Post Timepoint (hr) Value: None
  misc_feature: MA Experiment 20001556 PARAMETER Experiment Name: At_Drought_Soil_Dry_P Parameter: Post-Treatment Value: None
  misc_feature: MA Experiment 20001556 PARAMETER Experiment Name: At_Drought_Soil_Dry_P Parameter: Timepoint (day) Value: 12
  misc_feature: MA Experiment 20001556 PARAMETER Experiment Name: At_Drought_Soil_Dry_P Parameter: Treatment Value: Drought vs. No Drought
  misc_feature: MA Experiment ID: 20001557 Result: Down-regulated in Transcription
  misc_feature: MA Experiment 20001557 PARAMETER Experiment Name: At_Drought_Soil_Dry_P Parameter: Age (day) Value: 27
  misc_feature: MA Experiment 20001557 PARAMETER Experiment Name: At_Drought_Soil_Dry_P Parameter: Organism Value: A. thaliana
  misc_feature: MA Experiment 20001557 PARAMETER Experiment Name: At_Drought_Soil_Dry_P Parameter: Plant Line Value: WS
  misc_feature: MA Experiment 20001557 PARAMETER Experiment Name: At_Drought_Soil_Dry_P Parameter: Post Timepoint (hr) Value: 3
  misc_feature: MA Experiment 20001557 PARAMETER Experiment Name: At_Drought_Soil_Dry_P Parameter: Post-Treatment Value: Re-Water vs. No Drought
  misc_feature: MA Experiment 20001557 PARAMETER Experiment Name: At_Drought_Soil_Dry_P Parameter: Timepoint (day) Value: 13
  misc_feature: MA Experiment 20001557 PARAMETER Experiment Name: At_Drought_Soil_Dry_P Parameter: Treatment Value: Drought vs. No Drought
  misc_feature: MA Experiment ID: 20001558 Result: Down-regulated in Transcription
  misc_feature: MA Experiment 20001558 PARAMETER Experiment Name: At_Drought_Soil_Dry_P Parameter: Age (day) Value: 27
  misc_feature: MA Experiment 20001558 PARAMETER Experiment Name: At_Drought_Soil_Dry_P Parameter: Organism Value: A. thaliana
  misc_feature: MA Experiment 20001558 PARAMETER Experiment Name: At_Drought_Soil_Dry_P Parameter: Plant Line Value: WS
  misc_feature: MA Experiment 20001558 PARAMETER Experiment Name: At_Drought_Soil_Dry_P Parameter: Post Timepoint (hr) Value: 6
  misc_feature: MA Experiment 20001558 PARAMETER Experiment Name: At_Drought_Soil_Dry_P Parameter: Post-Treatment Value: Re-Water vs. No Drought
  misc_feature: MA Experiment 20001558 PARAMETER Experiment Name: At_Drought_Soil_Dry_P Parameter: Timepoint (day) Value: 13
  misc_feature: MA Experiment 20001558 PARAMETER Experiment Name: At_Drought_Soil_Dry_P Parameter: Treatment Value: Drought vs. No Drought
  misc_feature: MA Experiment ID: 20001560 Result: Down-regulated in Transcription
  misc_feature: MA Experiment 20001560 PARAMETER Experiment Name: At_Drought_Soil_Dry_P Parameter: Age (day) Value: 28
  misc_feature: MA Experiment 20001560 PARAMETER Experiment Name: At_Drought_Soil_Dry_P Parameter: Organism Value: A. thaliana
  misc_feature: MA Experiment 20001560 PARAMETER Experiment Name: At_Drought_Soil_Dry_P Parameter: Plant Line Value: WS
  misc_feature: MA Experiment 20001560 PARAMETER Experiment Name: At_Drought_Soil_Dry_P Parameter: Post Timepoint (hr) Value: None
  misc_feature: MA Experiment 20001560 PARAMETER Experiment Name: At_Drought_Soil_Dry_P Parameter: Post-Treatment Value: None
  misc_feature: MA Experiment 20001560 PARAMETER Experiment Name: At_Drought_Soil_Dry_P Parameter: Timepoint (day) Value: 14
  misc_feature: MA Experiment 20001560 PARAMETER Experiment Name: At_Drought_Soil_Dry_P Parameter: Treatment Value: Drought vs. No Drought
  misc_feature: MA Experiment ID: 20001773 Result: Up-regulated in Transcription
  misc_feature: MA Experiment 20001773 PARAMETER Experiment Name: At_Far-red-enriched-adult_P Parameter: Age (day) Value: 30
  misc_feature: MA Experiment 20001773 PARAMETER Experiment Name: At_Far-red-enriched-adult_P Parameter: Light Value: Far-red enriched vs. White
  misc_feature: MA Experiment 20001773 PARAMETER Experiment Name: At_Far-red-enriched-adult_P Parameter: Organism Value: A. thaliana
  misc_feature: MA Experiment 20001773 PARAMETER Experiment Name: At_Far-red-enriched-adult_P Parameter: Plant Line Value: Columbia
  misc_feature: MA Experiment 20001773 PARAMETER Experiment Name: At_Far-red-enriched-adult_P Parameter: Timepoint (hr) Value: 48
  misc_feature: MA Experiment 20001773 PARAMETER Experiment Name: At_Far-red-enriched-adult_P Parameter: Tissue Value: Aerial
atctttaaagcaagtcttcgctcttcaatttatattttaccaaatcatcttctctctttctctatctctcaaaacaaaaagtaaccatgatcaagacaaagacgacgtcccttctctgtttccttctcacagccgttatactaatgaacccatcttcctcctcccccactgacaattacatatacgccgtttgttctccggctaaattctcccctagctccggctacgagacaaatcttaactccctcctctcttccttcgtcacctcaaccgcccaaacccgctacgccaacttcacagttcccaccgggaaaccggaaccaaccgttaccgtatacggtatttaccagtgccgcggcgacctagacccaaccgcctgctcgacgtgcgtatcaagcgccgtcgcacaggtcggagccttatgttcaaactcgtactccgggttcttgcagatggaaaattgtctgatccgttacgacaacaaatcgttccttggggttcaagacaaaacgttgatcctcaacaaatgtggacagccgatggaattcaacgaccaggatgcgttgaccaaagctagtgacgtcatcggttctttaggtaccggagatggatcttacaggacaggtggcaacgggaatgttcagggtgtggctcagtgctccggtgatctaagtacatcacagtgccaagattgcttgtctgatgcaatcggacggctcaaatctgattgtggaatggctcagggaggatatgtttacttgtcgaaatgttacgcgcgtttcagtgttggtggtagtcacgcgcgtcagaccccaggcccaaactttggtcatgaaggagagaagggcaataaggatgataatggagtgggaaaaacattggcgataataataggaatcgtcaccttaatcatcttgctcgttgtgtttctcgcttttgttggaaagtgttgtagaaaattacaagatgagaaatggtgtaaatgaaaggacaaagtgggaaagatatcaatcaacaactcgagtcgagccacactgttagttgtatttttgtaattttttttgttctccctcataagatgtacgtagttatagtatattgataatttgatatagtattgatatgattgtatctccgaatcgatttttgtataattgtcggacttatataggccaaagcgatatcttctt

SEQ ID NO: 105622 - protein, 299 aa, Arabidopsis thaliana; identical to SEQ ID NO: 25372
  peptide (1)..(299): Ceres Seq. ID no. 13617596
  misc_feature (83)..(137): Pfam Name: Domain of unknown function DUF26 Pfam Description: Domain of unknown function DUF26
  misc_feature (1)..(299): Homolog of NCBI NO: 18409653 NR Description: expressed protein [Arabidopsis thaliana] Unknown protein [Arabidopsis thaliana]
  misc_feature (1)..(299): Homolog of NCBI NO: 21593606 NR Description: unknown [Arabidopsis thaliana]
  misc_feature (1)..(256): Homolog of NCBI NO: 25406066 NR Description: unknown protein F5A18.13 [imported] - Arabidopsis
  misc_feature (1)..(291): Homolog of NCBI NO: 18379273 NR Description: expressed protein [Arabidopsis thaliana] Unknown protein [Arabidopsis thaliana] expressed protein [Arabidopsis thaliana]
  misc_feature (1)..(291): Homolog of NCBI NO: 21554153 NR Description: unknown [Arabidopsis thaliana]
  misc_feature (5)..(290): Homolog of NCBI NO: 30693130 NR Description: expressed protein [Arabidopsis thaliana]
  misc_feature (1)..(240): Homolog of NCBI NO: 25410919 NR Description: hypothetical protein At2g01660 [imported] -
  misc_feature (5)..(237): Homolog of NCBI NO: 9757976 NR Description: contains similarity to secretory
  misc_feature (10)..(240): Homolog of NCBI NO: 38567870 NR Description: OSJNBa0091D06.12 [Oryza sativa (japonica
  misc_feature (24)..(232): Homolog of NCBI NO: 15232412 NR Description: secretory protein - like [Arabidopsis thaliana]

SEQ ID NO: 105623 - protein, 280 aa, Arabidopsis thaliana; identical to SEQ ID NO: 25373
  peptide (1)..(280): Ceres Seq. ID no. 13617597
  misc_feature (64)..(118): Pfam Name: Domain of unknown function DUF26 Pfam Description: Domain of unknown function DUF26
  misc_feature (1)..(280): Homolog of NCBI NO: 18409653 NR Description: expressed protein [Arabidopsis thaliana] Unknown protein [Arabidopsis thaliana]
  misc_feature (1)..(280): Homolog of NCBI NO: 21593606 NR Description: unknown [Arabidopsis thaliana]
  misc_feature (1)..(237): Homolog of NCBI NO: 25406066 NR Description: unknown protein F5A18.13 [imported] - Arabidopsis
  misc_feature (1)..(272): Homolog of NCBI NO: 18379273 NR Description: expressed protein [Arabidopsis thaliana] Unknown protein [Arabidopsis thaliana] expressed protein [Arabidopsis thaliana]
  misc_feature (1)..(272): Homolog of NCBI NO: 21554153 NR Description: unknown [Arabidopsis thaliana]
  misc_feature (1)..(271): Homolog of NCBI NO: 30693130 NR Description: expressed protein [Arabidopsis thaliana]
  misc_feature (1)..(221): Homolog of NCBI NO: 25410919 NR Description: hypothetical protein At2g01660 [imported] -
  misc_feature (1)..(218): Homolog of NCBI NO: 9757976 NR Description: contains similarity to secretory
  misc_feature (1)..(221): Homolog of NCBI NO: 38567870 NR Description: OSJNBa0091D06.12 [Oryza sativa (japonica
  misc_feature (5)..(213): Homolog of NCBI NO: 15232412 NR Description: secretory protein - like [Arabidopsis thaliana]

SEQ ID NO: 105624 - protein, 177 aa, Arabidopsis thaliana; identical to SEQ ID NO: 25374
  peptide (1)..(177): Ceres Seq. ID no. 13617598
  misc_feature (1)..(177): Homolog of NCBI NO: 18409653 NR Description: expressed protein [Arabidopsis thaliana] Unknown protein [Arabidopsis thaliana]
  misc_feature (1)..(177): Homolog of NCBI NO: 21593606 NR Description: unknown [Arabidopsis thaliana]
  misc_feature (1)..(134): Homolog of NCBI NO: 25406066 NR Description: unknown protein F5A18.13 [imported] - Arabidopsis
  misc_feature (1)..(169): Homolog of NCBI NO: 18379273 NR Description: expressed protein [Arabidopsis thaliana] Unknown protein [Arabidopsis thaliana] expressed protein [Arabidopsis thaliana]
  misc_feature (1)..(169): Homolog of NCBI NO: 21554153 NR Description: unknown [Arabidopsis thaliana]
  misc_feature (1)..(168): Homolog of NCBI NO: 30693130 NR Description: expressed protein [Arabidopsis thaliana]
  misc_feature (1)..(118): Homolog of NCBI NO: 25410919 NR Description: hypothetical protein At2g01660 [imported] -
  misc_feature (1)..(115): Homolog of NCBI NO: 9757976 NR Description: contains similarity to secretory
  misc_feature (1)..(118): Homolog of NCBI NO: 38567870 NR Description: OSJNBa0091D06.12 [Oryza sativa (japonica
  misc_feature (1)..(110): Homolog of NCBI NO: 15232412 NR Description: secretory protein - like [Arabidopsis thaliana]

SEQ ID NO: 105625 - DNA, 797 bp, Arabidopsis thaliana
  misc_feature (1)..(797): Ceres Seq. ID no. 13617602
  misc_feature: MA Experiment ID: 108474 Result: Down-regulated in Transcription
  misc_feature: MA Experiment 108474 PARAMETER Experiment Name: At_Drought_Flowers_cDNA_P Parameter: Timepoint (hr) Value: null
  misc_feature: MA Experiment 108474 PARAMETER Experiment Name: At_Drought_Flowers_cDNA_P Parameter: Treatment Value: Drought vs. No Drought
  misc_feature: MA Experiment ID: 108595 Result: Up-regulated in Transcription
  misc_feature: MA Experiment 108595 PARAMETER Experiment Name: At_Ler-pi_Ovule_cDNA_P Parameter: Plant Line Value: null
  misc_feature: MA Experiment ID: 20000112 Result: Up-regulated in Transcription
  misc_feature: MA Experiment 20000112 PARAMETER Experiment Name: At_42deg_Heat_cDNA_P Parameter: Temperature (deg C) Value: 42 vs. 22
  misc_feature: MA Experiment 20000112 PARAMETER Experiment Name: At_42deg_Heat_cDNA_P Parameter: Timepoint (hr) Value: 2
  misc_feature: MA Experiment 20000112 PARAMETER Experiment Name: At_42deg_Heat_cDNA_P Parameter: Tissue Value: Aerial
  misc_feature: MA Experiment ID: 20000286 Result: Up-regulated in Transcription
  misc_feature: MA Experiment 20000286 PARAMETER Experiment Name: At_Open_Flower_P Parameter: Age (day) Value: 21
  misc_feature: MA Experiment 20000286 PARAMETER Experiment Name: At_Open_Flower_P Parameter: Plant Line Value: WS
  misc_feature: MA Experiment 20000286 PARAMETER Experiment Name: At_Open_Flower_P Parameter: Tissue Value: Half Open vs. Whole Plant
  misc_feature: MA Experiment ID: 20000441 Result: Down-regulated in Transcription
  misc_feature: MA Experiment 20000441 PARAMETER Experiment Name: At_1uM_BR-BRZ__P Parameter: Tissue Value: Shoot Apices
  misc_feature: MA Experiment 20000441 PARAMETER Experiment Name: At_1uM_BR-BRZ__P Parameter: Treatment Value: 1uM BR vs. No Treatment
  misc_feature: MA Experiment ID: 20000443 Result: Down-regulated in Transcription
  misc_feature: MA Experiment 20000443 PARAMETER Experiment Name: At_1uM_BR-BRZ__P Parameter: Tissue Value: Shoot Apices
  misc_feature: MA Experiment 20000443 PARAMETER Experiment Name: At_1uM_BR-BRZ__P Parameter: Treatment Value: 1uM BRZ vs. No Treatment
  misc_feature: MA Experiment ID: 20000794 Result: Up-regulated in Transcription
  misc_feature: MA Experiment 20000794 PARAMETER Experiment Name: At_Petals_P Parameter: Age (day) Value: 23-25 days
  misc_feature: MA Experiment 20000794 PARAMETER Experiment Name: At_Petals_P Parameter: Plant Line Value: WS
  misc_feature: MA Experiment 20000794 PARAMETER Experiment Name: At_Petals_P Parameter: Tissue Value: Petals vs. Whole plant
  misc_feature: MA Experiment ID: 20001761 Result: Up-regulated in Transcription
  misc_feature: MA Experiment 20001761 PARAMETER Experiment Name: At_50mM_NH4NO3_L-to-H_P Parameter: Timepoint (hr) Value: 4
  misc_feature: MA Experiment 20001761 PARAMETER Experiment Name: At_50mM_NH4NO3_L-to-H_P Parameter: Tissue Value: Siliques
  misc_feature: MA Experiment 20001761 PARAMETER Experiment Name: At_50mM_NH4NO3_L-to-H_P Parameter: Treatment Value: 50mM NH4NO3 vs 100mM Mannitol
aaacacatcacacaacaatatggtaacaatgatgagacctactctccttatacttctcttttccacctttctcccacaaatcctcaccgttgatccaccactcctaccatccaacggctccgatttcatccgtttggcctgcaacaccacactctacccggacctttgcttctccactctctcctcttttgccaactccatccaaaatgactcaaaccgcctcgcgcgcgtagccatctccctcactctccacaacactctccaccttctctcttacctccaaaacgcttataaccgcgaccacccaacccccgtccttagagactgcttcgagaatcttaaagatgccgttgacggtatgagaggctccatgaaacagatgaaggagcttgtctccgcgtctggctcgatcgagtcatttaggttccagatgagtaatgtcaagacttggcttagtgcagctcttactgatgagtatacttgtacggacgggttcaaagacgtccacgaagacgactctatcaaagatgacgtctgctctcgagtcgatgacgtcaagaagcttactagcaatgcgctggctttagttaaccgctatgccgacgagtcaataataaattaataatatctcagtcatcgatccttcgagtcttttgttttttttcgaaactatgaacttttatacttaaaaaagtattagtaaactaaaagtactactcgttgttgcatgtaatactgaaaatatatgtgagttttccttggaattattatttacttggatttatttcagtttttgc

SEQ ID NO: 105626 - protein, 206 aa, Arabidopsis thaliana
  peptide (1)..(206): Ceres Seq. ID no. 13617603
  misc_feature (7)..(206): Homolog of NCBI NO: 18409660 NR Description: pectinesterase - related [Arabidopsis thaliana]
  misc_feature (10)..(206): Homolog of NCBI NO: 25406069 NR Description: hypothetical protein F5A18.10 [imported] -
  misc_feature (7)..(206): Homolog of NCBI NO: 21554277 NR Description: unknown [Arabidopsis thaliana]
  misc_feature (8)..(204): Homolog of NCBI NO: 15220674 NR Description: pectinesterase - related [Arabidopsis thaliana]
  misc_feature (11)..(204): Homolog of NCBI NO: 21555465 NR Description: unknown [Arabidopsis thaliana]
  misc_feature (3)..(201): Homolog of NCBI NO: 15226321 NR Description: pectinesterase - related [Arabidopsis thaliana]
  misc_feature (14)..(201): Homolog of NCBI NO: 18394174 NR Description: pectinesterase family [Arabidopsis thaliana]
  misc_feature (18)..(200): Homolog of NCBI NO: 112717 NR Description: 21 KD PROTEIN PRECURSOR (1.2 PROTEIN)
  misc_feature (37)..(200): Homolog of NCBI NO: 7488727 NR Description: 21K protein precursor - alfalfa
  misc_feature (14)..(199): Homolog of NCBI NO: 15234980 NR Description: pectinesterase family [Arabidopsis thaliana]
NTSHNNMVTMMRPTLLILLFSTFLPQILTVDPPLLPSNGSDFIRLACNTTLYPDLCFSTLSSFANSIQNDSNRLARVAISLTLHNTLHLLSYLQNAYNRDHPTPVLRDCFENLKDAVDGMRGSMKQMKELVSASGSIESFRFQMSNVKTWLSAALTDEYTCTDGFKDVHEDDSIKDDVCSRVDDVKKLTSNALALVNRYADESIIN

SEQ ID NO: 105627 - protein, 200 aa, Arabidopsis thaliana
  peptide (1)..(200): Ceres Seq. ID no. 13617604
  misc_feature (1)..(200): Homolog of NCBI NO: 18409660 NR Description: pectinesterase - related [Arabidopsis thaliana]
  misc_feature (4)..(200): Homolog of NCBI NO: 25406069 NR Description: hypothetical protein F5A18.10 [imported] -
  misc_feature (1)..(200): Homolog of NCBI NO: 21554277 NR Description: unknown [Arabidopsis thaliana]
  misc_feature (2)..(198): Homolog of NCBI NO: 15220674 NR Description: pectinesterase - related [Arabidopsis thaliana]
  misc_feature (5)..(198): Homolog of NCBI NO: 21555465 NR Description: unknown [Arabidopsis thaliana]
  misc_feature (1)..(195): Homolog of NCBI NO: 15226321 NR Description: pectinesterase - related [Arabidopsis thaliana]
  misc_feature (8)..(195): Homolog of NCBI NO: 18394174 NR Description: pectinesterase family [Arabidopsis thaliana]
  misc_feature (12)..(194): Homolog of NCBI NO: 112717 NR Description: 21 KD PROTEIN PRECURSOR (1.2 PROTEIN)
  misc_feature (31)..(194): Homolog of NCBI NO: 7488727 NR Description: 21K protein precursor - alfalfa
  misc_feature (8)..(193): Homolog of NCBI NO: 15234980 NR Description: pectinesterase family [Arabidopsis thaliana]
MVTMMRPTLLILLFSTFLPQILTVDPPLLPSNGSDFIRLACNTTLYPDLCFSTLSSFANSIQNDSNRLARVAISLTLHNTLHLLSYLQNAYNRDHPTPVLRDCFENLKDAVDGMRGSMKQMKELVSASGSIESFRFQMSNVKTWLSAALTDEYTCTDGFKDVHEDDSIKDDVCSRVDDVKKLTSNALALVNRYADESIIN

SEQ ID NO: 105628 - protein, 197 aa, Arabidopsis thaliana
  peptide (1)..(197): Ceres Seq. ID no. 13617605
  misc_feature (1)..(197): Homolog of NCBI NO: 18409660 NR Description: pectinesterase - related [Arabidopsis thaliana]
  misc_feature (1)..(197): Homolog of NCBI NO: 25406069 NR Description: hypothetical protein F5A18.10 [imported] -
  misc_feature (1)..(197): Homolog of NCBI NO: 21554277 NR Description: unknown [Arabidopsis thaliana]
  misc_feature (1)..(195): Homolog of NCBI NO: 15220674 NR Description: pectinesterase - related [Arabidopsis thaliana]
  misc_feature (2)..(195): Homolog of NCBI NO: 21555465 NR Description: unknown [Arabidopsis thaliana]
  misc_feature (1)..(192): Homolog of NCBI NO: 15226321 NR Description: pectinesterase - related [Arabidopsis thaliana]
  misc_feature (5)..(192): Homolog of NCBI NO: 18394174 NR Description: pectinesterase family [Arabidopsis thaliana]
  misc_feature (9)..(191): Homolog of NCBI NO: 112717 NR Description: 21 KD PROTEIN PRECURSOR (1.2 PROTEIN)
  misc_feature (28)..(191): Homolog of NCBI NO: 7488727 NR Description: 21K protein precursor - alfalfa
  misc_feature (5)..(190): Homolog of NCBI NO: 15234980 NR Description: pectinesterase family [Arabidopsis thaliana]
MMRPTLLILLFSTFLPQILTVDPPLLPSNGSDFIRLACNTTLYPDLCFSTLSSFANSIQNDSNRLARVAISLTLHNTLHLLSYLQNAYNRDHPTPVLRDCFENLKDAVDGMRGSMKQMKELVSASGSIESFRFQMSNVKTWLSAALTDEYTCTDGFKDVHEDDSIKDDVCSRVDDVKKLTSNALALVNRYADESIIN

SEQ ID NO: 105629 - DNA, 1957 bp, Arabidopsis thaliana
  misc_feature (1)..(1957): Ceres Seq. ID no. 13617606
  misc_feature: MA Experiment ID: 108461 Result: Up-regulated in Transcription
  misc_feature: MA Experiment 108461 PARAMETER Experiment Name: At_Germinating_Seeds_cDNA_P Parameter: Age (day) Value: 1 vs. 0
  misc_feature: MA Experiment 108461 PARAMETER Experiment Name: At_Germinating_Seeds_cDNA_P Parameter: Tissue Value: Germinating Seeds
  misc_feature: MA Experiment ID: 108462 Result: Up-regulated in Transcription
  misc_feature: MA Experiment 108462 PARAMETER Experiment Name: At_Germinating_Seeds_cDNA_P Parameter: Age (day) Value: 2 vs. 0
  misc_feature: MA Experiment 108462 PARAMETER Experiment Name: At_Germinating_Seeds_cDNA_P Parameter: Tissue Value: Germinating Seeds
  misc_feature: MA Experiment ID: 108463 Result: Up-regulated in Transcription
  misc_feature: MA Experiment 108463 PARAMETER Experiment Name: At_Germinating_Seeds_cDNA_P Parameter: Age (day) Value: 3 vs. 0
  misc_feature: MA Experiment 108463 PARAMETER Experiment Name: At_Germinating_Seeds_cDNA_P Parameter: Tissue Value: Germinating Seeds
  misc_feature: MA Experiment ID: 108464 Result: Up-regulated in Transcription
  misc_feature: MA Experiment 108464 PARAMETER Experiment Name: At_Germinating_Seeds_cDNA_P Parameter: Age (day) Value: 4 vs. 0
  misc_feature: MA Experiment 108464 PARAMETER Experiment Name: At_Germinating_Seeds_cDNA_P Parameter: Tissue Value: Germinating Seeds
  misc_feature: MA Experiment ID: 108569 Result: Up-regulated in Transcription
  misc_feature: MA Experiment 108569 PARAMETER Experiment Name: At_0.001%_MeJA__cDNA_P Parameter: Timepoint (hr) Value: 6
  misc_feature: MA Experiment 108569 PARAMETER Experiment Name: At_0.001%_MeJA__cDNA_P Parameter: Tissue Value: Aerial
  misc_feature: MA Experiment 108569 PARAMETER Experiment Name: At_0.001%_MeJA__cDNA_P Parameter: Treatment Value: 0.001% MeJA vs. No Treatment
  misc_feature: MA Experiment ID: 108573 Result: Up-regulated in Transcription
  misc_feature: MA Experiment 108573 PARAMETER Experiment Name: At_Drought_cDNA_P Parameter: Timepoint (hr) Value: 6
  misc_feature: MA Experiment 108573 PARAMETER Experiment Name: At_Drought_cDNA_P Parameter: Tissue Value: Aerial
  misc_feature: MA Experiment 108573 PARAMETER Experiment Name: At_Drought_cDNA_P Parameter: Treatment Value: Drought vs. No Drought
  misc_feature: MA Experiment ID: 108579 Result: Up-regulated in Transcription
  misc_feature: MA Experiment 108579 PARAMETER Experiment Name: At_4deg_Cold_cDNA_P Parameter: Temperature (deg C) Value: 4 vs. 22
  misc_feature: MA Experiment 108579 PARAMETER Experiment Name: At_4deg_Cold_cDNA_P Parameter: Timepoint (hr) Value: 6
  misc_feature: MA Experiment 108579 PARAMETER Experiment Name: At_4deg_Cold_cDNA_P Parameter: Tissue Value: Aerial
  misc_feature: MA Experiment ID: 108595 Result: Down-regulated in Transcription
  misc_feature: MA Experiment 108595 PARAMETER Experiment Name: At_Ler-pi_Ovule_cDNA_P Parameter: Plant Line Value: null
  misc_feature: MA Experiment ID: 20000087 Result: Down-regulated in Transcription
  misc_feature: MA Experiment 20000087 PARAMETER Experiment Name: At_100uM_ABA_Mutants_cDNA_P Parameter: Plant Line Value: WS
  misc_feature: MA Experiment 20000087 PARAMETER Experiment Name: At_100uM_ABA_Mutants_cDNA_P Parameter: Timepoint (hr) Value: 6
  misc_feature: MA Experiment 20000087 PARAMETER Experiment Name: At_100uM_ABA_Mutants_cDNA_P Parameter: Tissue Value: Aerial
  misc_feature: MA Experiment 20000087 PARAMETER Experiment Name: At_100uM_ABA_Mutants_cDNA_P Parameter: Treatment Value: 100uM ABA vs. No Treatment
  misc_feature: MA Experiment ID: 20000179 Result: Up-regulated in Transcription
  misc_feature: MA Experiment 20000179 PARAMETER Experiment Name: At_Germinating_Seeds_P Parameter: Age (hr) Value: 6 vs. 0
  misc_feature: MA Experiment 20000179 PARAMETER Experiment Name: At_Germinating_Seeds_P Parameter: Tissue Value: Germinating Seeds
  misc_feature: MA Experiment ID: 20000180 Result: Up-regulated in Transcription
  misc_feature: MA Experiment 20000180 PARAMETER Experiment Name: At_Germinating_Seeds_P Parameter: Age (hr) Value: 24 vs. 0
  misc_feature: MA Experiment 20000180 PARAMETER Experiment Name: At_Germinating_Seeds_P Parameter: Tissue Value: Germinating Seeds
  misc_feature: MA Experiment ID: 20001451 Result: Down-regulated in Transcription
  misc_feature: MA Experiment 20001451 PARAMETER Experiment Name: At_Far-red-induction_P Parameter: Age (day) Value: 7
  misc_feature: MA Experiment 20001451 PARAMETER Experiment Name: At_Far-red-induction_P Parameter: Light Value: Far-red vs. White
  misc_feature: MA Experiment 20001451 PARAMETER Experiment Name: At_Far-red-induction_P Parameter: Organism Value: A. thaliana
  misc_feature: MA Experiment 20001451 PARAMETER Experiment Name: At_Far-red-induction_P Parameter: Plant Line Value: Columbia
  misc_feature: MA Experiment 20001451 PARAMETER Experiment Name: At_Far-red-induction_P Parameter: Timepoint (hr) Value: 24
  misc_feature: MA Experiment 20001451 PARAMETER Experiment Name: At_Far-red-induction_P Parameter: Tissue Value: Whole Plant
tattttatcatcttcaggcttattcgattttcttcagatttgaaatggtgtcgttcaaggtctctctcgtctctacttcgcctattgatggccagaaacctgggacttctggactccgtaagaaggtgaaagtgtttaagcaaccaaattaccttgaaaattttgtccaggcaacgttcaatgctcttactacagagaaagttaaaggtgcgacacttgtggtttctggtgatggtcgttattattcagagcaagctattcagattatagtaaagatggcagcagctaatggtgttagacgtgtgtgggttggtcaaaacagtctgctatcaactcctgcagtatcagctattattcgtgaaagagtaggggctgatggatctaaagccacaggagcatttatcttaacagcaagtcataatcctggtggcccaactgaggatttcggaattaagtacaatatggaaaatggtggaccagctcctgaatcaatcactgataagatttacgagaacacaaagacaatcaaggagtacccaatagcggaagatctacccagggttgatatttctactattggtataaccagctttgaaggacctgaaggaaagtttgacgtcgaagtttttgattctgcagatgactatgttaaactaatgaagtcaatcttcgactttgaatccatcaagaaattgctatcttatccaaaatttactttctgctatgatgcattgcatggagtggctggagcatatgcacatcgcatctttgtcgaagaactaggtgcaccagaaagttcgttgttgaactgcgtacccaaggaggactttggagggggccacccggatcccaatcttacctatgctaaggagctcgtggcacgcatgggattgagtaaaactgatgatgctggtggcgagcctccagagtttggcgccgctgctgatggtgatgcagaccgaaacatgatcctcggtaaaaggtttttcgtaactccttcggattcagttgctataattgctgcaaatgctgttggggccataccatacttcagctctggtttaaaaggtgttgctaggagcatgccgacctcagctgcacttgatgtcgttgcaaaaaacttgggtttgaagttctttgaggttccaacaggctggaaattctttggcaatctaatggatgctgggatgtgctctgtatgcggagaagaaagttttggaaccggttcggatcatatccgtgagaaagatgggatctgggcagttcttgcttggctatcaatactggctcacaagaacaaggaaacccttgatgggaatgcaaaactggtgacggttgaagacattgtccgccagcactgggctacatatggccgtcactattacactcgatacgactatgagaacgtagacgcaactgcagctaaagaactcatgggacttttggttaagttgcaatcttcacttcccgaagtcaacaagattataaagggaattcatccagaggtggcaaatgttgcaagcgcagatgagttcgagtacaaagatccagtagatggctctgtttcaaagcaccaagggatccgatacttattcgaggatggatcacgacttgtgttccgtctctcgggaactggctcagaaggagcaacaataaggctatacattgaacaatacgagaaggacgcctcaaagatcggccgagattctcaggatgctcttggtcccctggttgatgttgcattaaagctgtcgaaaatgcaagagttcaccggccgatcatcaccaactgttattacataagacagctttcagaagacgctgtctccaatactactctcattccaacttcatttcttatgaatttgggttttgcttttttcctgttatctgttatcttacacaagtatacttcaatacatataattttaatggaatatacattaggttggcaattg

SEQ ID NO: 105630 - protein, 599 aa, Arabidopsis thaliana
  peptide (1)..(599): Ceres Seq. ID no. 13617607
  misc_feature (331)..(456): Pfam Name: Phosphoglucomutase/phosphomannomutase, Pfam Description: Phosphoglucomutase/phosphomannomutase,
  misc_feature (15)..(599): Homolog of NCBI NO: 15223226 NR Description: phosphoglucomutase -related [Arabidopsis >gi|12585324|sp|Q9SGC1|PGM2_ARATH Probable phosphoglucomutase,
  misc_feature (18)..(599): Homolog of NCBI NO: 15220668 NR Description: phosphoglucomutase -related [Arabidopsis >gi|16649113|gb|AAL24408.1| phosphoglucomutase [Arabidopsis >gi|20148521|gb|AAM10151.1| phosphoglucomutase [Arabidopsis
  misc_feature (18)..(599): Homolog of NCBI NO: 12643355 NR Description: Probable phosphoglucomutase, cytoplasmic 1 phosphomutase 1) (PGM 1) >gi|25292702|pir||B86366
  misc_feature (15)..(599): Homolog of NCBI NO: 12585330 NR Description: Phosphoglucomutase, cytoplasmic (Glucose (PGM) >gi|4234941|gb|AAD13031.1| cytosolic phosphoglucomutase
  misc_feature (15)..(599): Homolog of NCBI NO: 13324798 NR Description: phosphoglucomutase [Oryza sativa]
  misc_feature (15)..(599): Homolog of NCBI NO: 12585296 NR Description: Phosphoglucomutase, cytoplasmic (Glucose (PGM) >gi|6272281|emb|CAB60127.1| cytosolic phosphoglucomutase
  misc_feature (15)..(599): Homolog of NCBI NO: 12585316 NR Description: Phosphoglucomutase, cytoplasmic (Glucose (PGM) >gi|8250624|emb|CAB93681.1| cytosolic phosphoglucomutase
  misc_feature (15)..(599): Homolog of NCBI NO: 12585308 NR Description: Phosphoglucomutase, cytoplasmic (Glucose
  misc_feature (18)..(599): Homolog of NCBI NO: 12585309 NR Description: Phosphoglucomutase, cytoplasmic 1 (Glucose
  misc_feature (18)..(599): Homolog of NCBI NO: 12585310 NR Description: Phosphoglucomutase, cytoplasmic 2 (Glucose
FYHLQAYSIFFRFEMVSFKVSLVSTSPIDGQKPGTSGLRKKVKVFKQPNYLENFVQATFNALTTEKVKGATLVVSGDGRYYSEQAIQIIVKMAAANGVRRVWVGQNSLLSTPAVSAIIRERVGADGSKATGAFILTASHNPGGPTEDFGIKYNMENGGPAPESITDKIYENTKTIKEYPIAEDLPRVDISTIGITSFEGPEGKFDVEVFDSADDYVKLMKSIFDFESIKKLLSYPKFTFCYDALHGVAGAYAHRIFVEELGAPESSLLNCVPKEDFGGGHPDPNLTYAKELVARMGLSKTDDAGGEPPEFGAAADGDADRNMILGKRFFVTPSDSVAIIAANAVGAIPYFSSGLKGVARSMPTSAALDVVAKNLGLKFFEVPTGWKFFGNLMDAGMCSVCGEESFGTGSDHIREKDGIWAVLAWLSILAHKNKETLDGNAKLVTVEDIVRQHWATYGRHYYTRYDYENVDATAAKELMGLLVKLQSSLPEVNKIIKGIHPEVANVASADEFEYKDPVDGSVSKHQGIRYLFEDGSRLVFRLSGTGSEGATIRLYIEQYEKDASKIGRDSQDALGPLVDVALKLSKMQEFTGRSSPTVIT

SEQ ID NO: 105631 - protein, 585 aa, Arabidopsis thaliana; identical to SEQ ID NO: 41581
  peptide (1)..(585): Ceres Seq. ID no. 13617608
  misc_feature (317)..(442): Pfam Name: Phosphoglucomutase/phosphomannomutase, Pfam Description: Phosphoglucomutase/phosphomannomutase,
  misc_feature (1)..(585): Homolog of NCBI NO: 15223226 NR Description: phosphoglucomutase -related [Arabidopsis >gi|12585324|sp|Q9SGC1|PGM2_ARATH Probable phosphoglucomutase,
  misc_feature (4)..(585): Homolog of NCBI NO: 15220668 NR Description: phosphoglucomutase -related [Arabidopsis >gi|16649113|gb|AAL24408.1| phosphoglucomutase [Arabidopsis >gi|20148521|gb|AAM10151.1| phosphoglucomutase [Arabidopsis
  misc_feature (4)..(585): Homolog of NCBI NO: 12643355 NR Description: Probable phosphoglucomutase, cytoplasmic 1 phosphomutase 1) (PGM 1) >gi|25292702|pir||B86366
  misc_feature (1)..(585): Homolog of NCBI NO: 12585330 NR Description: Phosphoglucomutase, cytoplasmic (Glucose (PGM) >gi|4234941|gb|AAD13031.1| cytosolic phosphoglucomutase
  misc_feature (1)..(585): Homolog of NCBI NO: 13324798 NR Description: phosphoglucomutase [Oryza sativa]
  misc_feature (1)..(585): Homolog of NCBI NO: 12585296 NR Description: Phosphoglucomutase, cytoplasmic (Glucose (PGM) >gi|6272281|emb|CAB60127.1| cytosolic phosphoglucomutase
  misc_feature (1)..(585): Homolog of NCBI NO: 12585316 NR Description: Phosphoglucomutase, cytoplasmic (Glucose (PGM) >gi|8250624|emb|CAB93681.1| cytosolic phosphoglucomutase
  misc_feature (1)..(585): Homolog of NCBI NO: 12585308 NR Description: Phosphoglucomutase, cytoplasmic (Glucose
  misc_feature (4)..(585): Homolog of NCBI NO: 12585309 NR Description: Phosphoglucomutase, cytoplasmic 1 (Glucose
  misc_feature (4)..(585): Homolog of NCBI NO: 12585310 NR Description: Phosphoglucomutase, cytoplasmic 2 (Glucose

SEQ ID NO: 105632 - protein, 508 aa, Arabidopsis thaliana; identical to SEQ ID NO: 41582
  peptide (1)..(508): Ceres Seq. ID no. 13617609
  misc_feature (240)..(365): Pfam Name: Phosphoglucomutase/phosphomannomutase, Pfam Description: Phosphoglucomutase/phosphomannomutase,
  misc_feature (1)..(508): Homolog of NCBI NO: 15223226 NR Description: phosphoglucomutase -related [Arabidopsis >gi|12585324|sp|Q9SGC1|PGM2_ARATH Probable phosphoglucomutase,
  misc_feature (1)..(508): Homolog of NCBI NO: 15220668 NR Description: phosphoglucomutase -related [Arabidopsis >gi|16649113|gb|AAL24408.1| phosphoglucomutase [Arabidopsis >gi|20148521|gb|AAM10151.1| phosphoglucomutase [Arabidopsis
  misc_feature (1)..(508): Homolog of NCBI NO: 12643355 NR Description: Probable phosphoglucomutase, cytoplasmic 1 phosphomutase 1) (PGM 1) >gi|25292702|pir||B86366
  misc_feature (1)..(508): Homolog of NCBI NO: 12585330 NR Description: Phosphoglucomutase, cytoplasmic (Glucose (PGM) >gi|4234941|gb|AAD13031.1| cytosolic phosphoglucomutase
  misc_feature (1)..(508): Homolog of NCBI NO: 13324798 NR Description: phosphoglucomutase [Oryza sativa]
  misc_feature (1)..(508): Homolog of NCBI NO: 12585296 NR Description: Phosphoglucomutase, cytoplasmic (Glucose (PGM) >gi|6272281|emb|CAB60127.1| cytosolic phosphoglucomutase
  misc_feature (1)..(508): Homolog of NCBI NO: 12585316 NR Description: Phosphoglucomutase, cytoplasmic (Glucose (PGM) >gi|8250624|emb|CAB93681.1| cytosolic phosphoglucomutase
  misc_feature (1)..(508): Homolog of NCBI NO: 12585308 NR Description: Phosphoglucomutase, cytoplasmic (Glucose
  misc_feature (1)..(508): Homolog of NCBI NO: 12585309 NR Description: Phosphoglucomutase, cytoplasmic 1 (Glucose
  misc_feature (1)..(508): Homolog of NCBI NO: 12585310 NR Description: Phosphoglucomutase, cytoplasmic 2 (Glucose

SEQ ID NO: 105633 - DNA, 1493 bp, Arabidopsis thaliana
  misc_feature (1)..(1493): Ceres Seq. ID no. 13617610
  misc_feature: MA Experiment ID: 20000173 Result: Down-regulated in Transcription
  misc_feature: MA Experiment 20000173 PARAMETER Experiment Name: At_42deg_Heat_P Parameter: Age (day) Value: 14
  misc_feature: MA Experiment 20000173 PARAMETER Experiment Name: At_42deg_Heat_P Parameter: Organism Value: A. thaliana
  misc_feature: MA Experiment 20000173 PARAMETER Experiment Name: At_42deg_Heat_P Parameter: Plant Line Value: WS
  misc_feature: MA Experiment 20000173 PARAMETER Experiment Name: At_42deg_Heat_P Parameter: Temperature (deg C) Value: 42 vs. 22
  misc_feature: MA Experiment 20000173 PARAMETER Experiment Name: At_42deg_Heat_P Parameter: Timepoint (hr) Value: 6
  misc_feature: MA Experiment 20000173 PARAMETER Experiment Name: At_42deg_Heat_P Parameter: Tissue Value: Aerial
  misc_feature: MA Experiment ID: 20000182 Result: Up-regulated in Transcription
  misc_feature: MA Experiment 20000182 PARAMETER Experiment Name: At_2mM_SA_P Parameter: Age (day) Value: 14
  misc_feature: MA Experiment 20000182 PARAMETER Experiment Name: At_2mM_SA_P Parameter: Organism Value: A. thaliana
  misc_feature: MA Experiment 20000182 PARAMETER Experiment Name: At_2mM_SA_P Parameter: Plant Line Value: WS
  misc_feature: MA Experiment 20000182 PARAMETER Experiment Name: At_2mM_SA_P Parameter: Timepoint (hr) Value: 6
  misc_feature: MA Experiment 20000182 PARAMETER Experiment Name: At_2mM_SA_P Parameter: Tissue Value: Aerial
  misc_feature: MA Experiment 20000182 PARAMETER Experiment Name: At_2mM_SA_P Parameter: Treatment Value: 2mM SA vs. No Treatment
  misc_feature: MA Experiment ID: 20000184 Result: Down-regulated in Transcription
  misc_feature: MA Experiment 20000184 PARAMETER Experiment Name: At_Shoots__P Parameter: Age (day) Value: 7
  misc_feature: MA Experiment 20000184 PARAMETER Experiment Name: At_Shoots__P Parameter: Tissue Value: Shoots vs. Whole Plant
  misc_feature: MA Experiment ID: 20000438 Result: Down-regulated in Transcription
  misc_feature: MA Experiment 20000438 PARAMETER Experiment Name: At_Shoots__P Parameter: Age (day) Value: 14
  misc_feature: MA Experiment 20000438 PARAMETER Experiment Name: At_Shoots__P Parameter: Tissue Value: Shoots vs. Whole Plant
  misc_feature: MA Experiment ID: 20001247 Result: Up-regulated in Transcription
  misc_feature: MA Experiment 20001247 PARAMETER Experiment Name: At_Far-red-induction_P Parameter: Age (day) Value: 7
  misc_feature: MA Experiment 20001247 PARAMETER Experiment Name: At_Far-red-induction_P Parameter: Light Value: Far-red vs. White
  misc_feature: MA Experiment 20001247 PARAMETER Experiment Name: At_Far-red-induction_P Parameter: Organism Value: A. thaliana
  misc_feature: MA Experiment 20001247 PARAMETER Experiment Name: At_Far-red-induction_P Parameter: Plant Line Value: Columbia
  misc_feature: MA Experiment 20001247 PARAMETER Experiment Name: At_Far-red-induction_P Parameter: Timepoint (hr) Value: 1
  misc_feature: MA Experiment 20001247 PARAMETER Experiment Name: At_Far-red-induction_P Parameter: Tissue Value: Whole Plant
atggtcactaagaactctcataagagcaatctgggcatgacaaagtccatgaatttctttcagaacatcattaaacctttcaaacgcagctccaatcgaggtcttgaagatgatattgagcgaattgctgctatggagcaaaaagttttcccatttcaagttttagtttccgctaccaaagattttcacccgacccataaactcggtgaaggtggtttcggtcccgtcttcaagggaagattacctgacgggagagacatagcagtgaagaagctatctcaggtttcaaggcaaggcaaaaacgagtttgtgaacgaggctaagttgttggctaaagttcagcatcgcaatgttgttaatctttggggttattgtacacatggagatgataagctcttggtttatgagtatgtcgttaatgagagcctcgacaaggtcctcttcaaatccaacagaaaatcggagatagattggaagcagaggtttgagatcataacaggcattgctcgaggactgctctatctacatgaagacgcgccaaactgcatcatccacagggatattaaggctggcaatattttgctggatgaaaaatgggttcctaagattgcagattttgggatggctagactctatcaggaagatgtaacacatgtcaacactcgtgttgcaggaaccaatggttatatggcgccagagtacgtaatgcacggggttctatcggtaaaggcagacgtattcagctttggggttttggttctggagctcgtaagtggacagaagaactcgagttttagcatgagacaccctgaccagactcttcttgaatgggcatttaagttgtacaagaaaggccggaccatggagatactagaccaagatatagcagcttcagctgatccagatcaagtcaaactctgtgtacagatcggactactctgcgttcaaggcgatccgcatcaaagaccgagcatgagacgggtatctctacttctctctagaaaaccaggacatctagaagaaccggatcatcctggtgtcccgggatctagataccgtcggcgaacacaacgtccttcaggagcagcatcacttggaacattgtcgaccactggttccagcacagattctttcggttcaaacctgaacacaaacacgggaactggtgttagaggtacccccgcatcttctaaagcttcaactcggagtaatgccactagaagtgctggtcagagctctagctcagaccctcacgggaaacgacatatgagttattgaagtacataaaatctggtcataggtgattgtaaatagcgagctgcatatataatatttgtttcataatttatttaattttgcttttgaaaagtaaattaatttatttttttgactgcagtagtgatttagttttgtagtatgatttgttatattagcggaaaaaaattatgattcatttgttacatttgtatattagaataatcacttgtagtccc

SEQ ID NO: 105634 - protein, 425 aa, Arabidopsis thaliana
  peptide (1)..(425): Ceres Seq. ID no. 13617611
  misc_feature (1)..(425): Homolog of NCBI NO: 30698743 NR Description: protein kinase family [Arabidopsis thaliana]
  misc_feature (45)..(425): Homolog of NCBI NO: 25287628 NR Description: hypothetical protein F5A18.8 [imported] -
  misc_feature (267)..(425): Homolog of NCBI NO: 26449977 NR Description: putative protein kinase [Arabidopsis thaliana]
  misc_feature (50)..(345): Homolog of NCBI NO: 34896978 NR Description: putative receptor-like kinase [Oryza sativa
  misc_feature (25)..(388): Homolog of NCBI NO: 4530126 NR Description: receptor-like protein kinase homolog RK20-1
  misc_feature (45)..(357): Homolog of NCBI NO: 34910120 NR Description: putative receptor kinase [Oryza sativa (japonica group)] >gi|20804899|dbj|BAB92579.1| putative receptor kinase
  misc_feature (54)..(375): Homolog of NCBI NO: 34895498 NR Description: putative receptor-like protein kinase [Oryza
  misc_feature (23)..(369): Homolog of NCBI NO: 16040950 NR Description: receptor kinase 3 [Brassica rapa]
  misc_feature (29)..(407): Homolog of NCBI NO: 6056376 NR Description: Similar to serine/threonine kinases [Arabidopsis
  misc_feature (29)..(407): Homolog of NCBI NO: 18405700 NR Description: receptor-related protein kinase -related
MVTKNSHKSNLGMTKSMNFFQNIIKPFKRSSNRGLEDDIERIAAMEQKVFPFQVLVSATKDFHPTHKLGEGGFGPVFKGRLPDGRDIAVKKLSQVSRQGKNEFVNEAKLLAKVQHRNVVNLWGYCTHGDDKLLVYEYVVNESLDKVLFKSNRKSEIDWKQRFEIITGIARGLLYLHEDAPNCIIHRDIKAGNILLDEKWVPKIADFGMARLYQEDVTHVNTRVAGTNGYMAPEYVMHGVLSVKADVFSFGVLVLELVSGQKNSSFSMRHPDQTLLEWAFKLYKKGRTMEILDQDIAASADPDQVKLCVQIGLLCVQGDPHQRPSMRRVSLLLSRKPGHLEEPDHPGVPGSRYRRRTQRPSGAASLGTLSTTGSSTDSFGSNLNTNTGTGVRGTPASSKASTRSNATRSAGQSSSSDPHGKRHMSY

SEQ ID NO: 105635 - protein, 413 aa, Arabidopsis thaliana
  peptide (1)..(413): Ceres Seq. ID no. 13617612
  misc_feature (1)..(413): Homolog of NCBI NO: 30698743 NR Description: protein kinase family [Arabidopsis thaliana]
  misc_feature (33)..(413): Homolog of NCBI NO: 25287628 NR Description: hypothetical protein F5A18.8 [imported] -
  misc_feature (255)..(413): Homolog of NCBI NO: 26449977 NR Description: putative protein kinase [Arabidopsis thaliana]
  misc_feature (38)..(333): Homolog of NCBI NO: 34896978 NR Description: putative receptor-like kinase [Oryza sativa
  misc_feature (13)..(376): Homolog of NCBI NO: 4530126 NR Description: receptor-like protein kinase homolog RK20-1
  misc_feature (33)..(345): Homolog of NCBI NO: 34910120 NR Description: putative receptor kinase [Oryza sativa (japonica group)] >gi|20804899|dbj|BAB92579.1| putative receptor kinase
  misc_feature (42)..(363): Homolog of NCBI NO: 34895498 NR Description: putative receptor-like protein kinase [Oryza
  misc_feature (11)..(357): Homolog of NCBI NO: 16040950 NR Description: receptor kinase 3 [Brassica rapa]
  misc_feature (17)..(395): Homolog of NCBI NO: 6056376 NR Description: Similar to serine/threonine kinases [Arabidopsis
  misc_feature (17)..(395): Homolog of NCBI NO: 18405700 NR Description: receptor-related protein kinase -related
MTKSMNFFQNIIKPFKRSSNRGLEDDIERIAAMEQKVFPFQVLVSATKDFHPTHKLGEGGFGPVFKGRLPDGRDIAVKKLSQVSRQGKNEFVNEAKLLAKVQHRNVVNLWGYCTHGDDKLLVYEYVVNESLDKVLFKSNRKSEIDWKQRFEIITGIARGLLYLHEDAPNCIIHRDIKAGNILLDEKWVPKIADFGMARLYQEDVTHVNTRVAGTNGYMAPEYVMHGVLSVKADVFSFGVLVLELVSGQKNSSFSMRHPDQTLLEWAFKLYKKGRTMEILDQDIAASADPDQVKLCVQIGLLCVQGDPHQRPSMRRVSLLLSRKPGHLEEPDHPGVPGSRYRRRTQRPSGAASLGTLSTTGSSTDSFGSNLNTNTGTGVRGTPASSKASTRSNATRSAGQSSSSDPHGKRHMSY

SEQ ID NO: 105636 - protein, 409 aa, Arabidopsis thaliana
  peptide (1)..(409): Ceres Seq. ID no. 13617613
  misc_feature (1)..(409): Homolog of NCBI NO: 30698743 NR Description: protein kinase family [Arabidopsis thaliana]
  misc_feature (29)..(409): Homolog of NCBI NO: 25287628 NR Description: hypothetical protein F5A18.8 [imported] -
  misc_feature (251)..(409): Homolog of NCBI NO: 26449977 NR Description: putative protein kinase [Arabidopsis thaliana]
  misc_feature (34)..(329): Homolog of NCBI NO: 34896978 NR Description: putative receptor-like kinase [Oryza sativa
  misc_feature (9)..(372): Homolog of NCBI NO: 4530126 NR Description: receptor-like protein kinase homolog RK20-1
  misc_feature (29)..(341): Homolog of NCBI NO: 34910120 NR Description: putative receptor kinase [Oryza sativa (japonica group)] >gi|20804899|dbj|BAB92579.1| putative receptor kinase
  misc_feature (38)..(359): Homolog of NCBI NO: 34895498 NR Description: putative receptor-like protein kinase [Oryza
  misc_feature (7)..(353): Homolog of NCBI NO: 16040950 NR Description: receptor kinase 3 [Brassica rapa]
  misc_feature (13)..(391): Homolog of NCBI NO: 6056376 NR Description: Similar to serine/threonine kinases [Arabidopsis
  misc_feature (13)..(391): Homolog of NCBI NO: 18405700 NR Description: receptor-related protein kinase -related
MNFFQNIIKPFKRSSNRGLEDDIERIAAMEQKVFPFQVLVSATKDFHPTHKLGEGGFGPVFKGRLPDGRDIAVKKLSQVSRQGKNEFVNEAKLLAKVQHRNVVNLWGYCTHGDDKLLVYEYVVNESLDKVLFKSNRKSEIDWKQRFEIITGIARGLLYLHEDAPNCIIHRDIKAGNILLDEKWVPKIADFGMARLYQEDVTHVNTRVAGTNGYMAPEYVMHGVLSVKADVFSFGVLVLELVSGQKNSSFSMRHPDQTLLEWAFKLYKKGRTMEILDQDIAASADPDQVKLCVQIGLLCVQGDPHQRPSMRRVSLLLSRKPGHLEEPDHPGVPGSRYRRRTQRPSGAASLGTLSTTGSSTDSFGSNLNTNTGTGVRGTPASSKASTRSNATRSAGQSSSSDPHGKRHMSY

SEQ ID NO: 105637 - DNA, 1700 bp, Arabidopsis thaliana
  misc_feature (1)..(1700): Ceres Seq. ID no. 13617632
  misc_feature: MA Experiment ID: 108433 Result: Down-regulated in Transcription
  misc_feature: MA Experiment 108433 PARAMETER Experiment Name: At_rhl_Mutant2_cDNA_P Parameter: Age (day) Value: 7
  misc_feature: MA Experiment 108433 PARAMETER Experiment Name: At_rhl_Mutant2_cDNA_P Parameter: Organism Value: A. thaliana
  misc_feature: MA Experiment 108433 PARAMETER Experiment Name: At_rhl_Mutant2_cDNA_P Parameter: Plant Line Value: rhl Mutant vs. wt landsburg
  misc_feature: MA Experiment 108433 PARAMETER Experiment Name: At_rhl_Mutant2_cDNA_P Parameter: Tissue Value: Roots
  misc_feature: MA Experiment ID: 108434 Result: Down-regulated in Transcription
  misc_feature: MA Experiment 108434 PARAMETER Experiment Name: At_Root_Tips_cDNA_P Parameter: Tissue Value: Root Tips
  misc_feature: MA Experiment ID: 108595 Result: Up-regulated in Transcription
  misc_feature: MA Experiment 108595 PARAMETER Experiment Name: At_Ler-pi_Ovule_cDNA_P Parameter: Plant Line Value: null
  misc_feature: MA Experiment ID: 20001910 Result: Up-regulated in Transcription
  misc_feature: MA Experiment 20001910 PARAMETER Experiment Name: At_Drought_Reproduction_P Parameter: Age (day) Value: 37
  misc_feature: MA Experiment 20001910 PARAMETER Experiment Name: At_Drought_Reproduction_P Parameter: Organism Value: A. thaliana
  misc_feature: MA Experiment 20001910 PARAMETER Experiment Name: At_Drought_Reproduction_P Parameter: Plant Line Value: WS
  misc_feature: MA Experiment 20001910 PARAMETER Experiment Name: At_Drought_Reproduction_P Parameter: Timepoint (day) Value: 7
  misc_feature: MA Experiment 20001910 PARAMETER Experiment Name: At_Drought_Reproduction_P Parameter: Tissue Value: Flowers
  misc_feature: MA Experiment 20001910 PARAMETER Experiment Name: At_Drought_Reproduction_P Parameter: Treatment Value: Drought vs. No Drought
acttcaaacctcaaaagcaatttagctctctgtcttcaagatgacttctcttttcttctttgttctccttttctcgtctcttctcataagcaatggcgatgccaacccaaattacaaagaagctctctccaagtcattgctcttcttccaaggtcagcgatctggtcctcttcctagaggccaacaaatttcctggagggctagctctggcctttccgatggctctgctgctcatgtggacttaaccggcgggtactatgacgcaggagacaacgtcaagttcaatttaccaatggcgtttaccaccacaatgctctcatggagcgcactggaatacggtaaacggatgggtcctgagctggaaaatgcacgtgtgaacatccgttgggccacagattatctgctgaaatgtgccagagccacgccggggaagctttatgtcggtgtaggagatcctaatgttgatcacaaatgctgggaacggcctgaagacatggacacaccacgtacagtttactctgtatccgcttccaatcctggttctgatgtcgcagctgaaacagcagcagctctagctgcagcttctatggttttcagaaaagttgattccaagtattcacgtttgctgctcgcaacagctaaggatgtgatgcagtttgccattcagtaccagggagcttacagtgattccctttcctcatctgtctgtcctttctactgctcctactctggttacaaggacgagctaatgtggggtgcgtcatggctgctaagagcaacgaataacccgtattacgcaaacttcataaaatctttaggaggtggagatcagcctgacatcttcagctgggacaataaatatgctggtgcctatgttcttctctcacggagagcattacttaacaaagacagcaactttgaacaatataagcaagcagctgagaatttcatctgcaaaatccttccagattctccttcttcctctacccaatacactcaaggaggattaatgtacaagctacctcaaagcaatcttcagtacgtaacctccataacattcttgctcacaacttacgccaaatacatgaaagccacaaaacacacattcaattgcggaagctccgttatcgtccccaacgccttgataagcctatcgaagcgacaagttgattacatactcggagataacccaatcaaaatgtcatacatggttggattctcttccaatttccctaagagaatccaccacagagcatcttctcttccttcacacgcacttcgttctcaatcgttaggctgcaatggtggattccaatcgttctacactcaaaaccctaaccctaacattctcaccggagcaatcgtaggaggtccgaatcaaaacgatgggtatccagatcagagagacgattatagtcacgcggaaccggcgacttatataaacgccgccttcgtcggacctttggcgtacttcgccgccggccgttcgacttgaaattgaattcgccaccgccacattctccgatttgtagttccattgttagttaaagatccgttggtccaagcctaacgtgaaaatcagaagggacaaagttatttaaatgtaaaactcttaatgggctaagacccaatactaaaggacccgacggaaatatttctcgtggtcttatttaactctaaccatcatcattacgcgtttc

SEQ ID NO: 105638 - protein, 484 aa, Arabidopsis thaliana
  peptide (1)..(484): Ceres Seq. ID no. 13617633
  misc_feature (24)..(478): Pfam Name: Glycosyl hydrolase family 9 Pfam Description: Glycosyl hydrolase family 9
  misc_feature (1)..(484): Homolog of NCBI NO: 15217446 NR Description: glycosyl hydrolase family 9 [Arabidopsis thaliana]
  misc_feature (1)..(484): Homolog of NCBI NO: 21554174 NR Description: putative beta-glucanase [Arabidopsis thaliana]
  misc_feature (1)..(483): Homolog of NCBI NO: 15219963 NR Description: glycosyl hydrolase family 9 [Arabidopsis thaliana]
  misc_feature (14)..(483): Homolog of NCBI NO: 7488905 NR Description: cellulase (EC 3.2.1.4) - sweet orange
  misc_feature (2)..(482): Homolog of NCBI NO: 7488790 NR Description: cellulase (EC 3.2.1.4) precursor - garden pea
  misc_feature (8)..(478): Homolog of NCBI NO: 16903349 NR Description: endo-beta-1,4-glucanase precursor [Nicotiana
  misc_feature (14)..(482): Homolog of NCBI NO: 7488976 NR Description: cellulase (EC 3.2.1.4) - tomato
  misc_feature (5)..(309): Homolog of NCBI NO: 2129545 NR Description: cellulase (EC 3.2.1.4) - Arabidopsis thaliana
  misc_feature (24)..(479): Homolog of NCBI NO: 11357128 NR Description: cellulase (EC 3.2.1.4) 2 precursor - Monterey pine
  misc_feature (21)..(479): Homolog of NCBI NO: 7484476 NR Description: cellulase (EC 3.2.1.4) 1 precursor - Monterey pine
MTSLFFFVLLFSSLLISNGDANPNYKEALSKSLLFFQGQRSGPLPRGQQISWRASSGLSDGSAAHVDLTGGYYDAGDNVKFNLPMAFTTTMLSWSALEYGKRMGPELENARVNIRWATDYLLKCARATPGKLYVGVGDPNVDHKCWERPEDMDTPRTVYSVSASNPGSDVAAETAAALAAASMVFRKVDSKYSRLLLATAKDVMQFAIQYQGAYSDSLSSSVCPFYCSYSGYKDELMWGASWLLRATNNPYYANFIKSLGGGDQPDIFSWDNKYAGAYVLLSRRALLNKDSNFEQYKQAAENFICKILPDSPSSSTQYTQGGLMYKLPQSNLQYVTSITFLLTTYAKYMKATKHTFNCGSSVIVPNALISLSKRQVDYILGDNPIKMSYMVGFSSNFPKRIHHRASSLPSHALRSQSLGCNGGFQSFYTQNPNPNILTGAIVGGPNQNDGYPDQRDDYSHAEPATYINAAFVGPLAYFAAGRST

SEQ ID NO: 105639 - protein, 400 aa, Arabidopsis thaliana
  peptide (1)..(400): Ceres Seq. ID no. 13617634
  misc_feature (1)..(394): Pfam Name: Glycosyl hydrolase family 9 Pfam Description: Glycosyl hydrolase family 9
  misc_feature (1)..(400): Homolog of NCBI NO: 15217446 NR Description: glycosyl hydrolase family 9 [Arabidopsis thaliana]
  misc_feature (1)..(400): Homolog of NCBI NO: 21554174 NR Description: putative beta-glucanase [Arabidopsis thaliana]
  misc_feature (1)..(399): Homolog of NCBI NO: 15219963 NR Description: glycosyl hydrolase family 9 [Arabidopsis thaliana]
  misc_feature (1)..(399): Homolog of NCBI NO: 7488905 NR Description: cellulase (EC 3.2.1.4) - sweet orange
  misc_feature (1)..(398): Homolog of NCBI NO: 7488790 NR Description: cellulase (EC 3.2.1.4) precursor - garden pea
  misc_feature (1)..(394): Homolog of NCBI NO: 16903349 NR Description: endo-beta-1,4-glucanase precursor [Nicotiana
  misc_feature (1)..(398): Homolog of NCBI NO: 7488976 NR Description: cellulase (EC 3.2.1.4) - tomato
  misc_feature (1)..(225): Homolog of NCBI NO: 2129545 NR Description: cellulase (EC 3.2.1.4) - Arabidopsis thaliana
  misc_feature (1)..(395): Homolog of NCBI NO: 11357128 NR Description: cellulase (EC 3.2.1.4) 2 precursor - Monterey pine
  misc_feature (1)..(395): Homolog of NCBI NO: 7484476 NR Description: cellulase (EC 3.2.1.4) 1 precursor - Monterey pine
MAFTTTMLSWSALEYGKRMGPELENARVNIRWATDYLLKCARATPGKLYVGVGDPNVDHKCWERPEDMDTPRTVYSVSASNPGSDVAAETAAALAAASMVFRKVDSKYSRLLLATAKDVMQFAIQYQGAYSDSLSSSVCPFYCSYSGYKDELMWGASWLLRATNNPYYANFIKSLGGGDQPDIFSWDNKYAGAYVLLSRRALLNKDSNFEQYKQAAENFICKILPDSPSSSTQYTQGGLMYKLPQSNLQYVTSITFLLTTYAKYMKATKHTFNCGSSVIVPNALISLSKRQVDYILGDNPIKMSYMVGFSSNFPKRIHHRASSLPSHALRSQSLGCNGGFQSFYTQNPNPNILTGAIVGGPNQNDGYPDQRDDYSHAEPATYINAAFVGPLAYFAAGRST

SEQ ID NO: 105640 - protein, 394 aa, Arabidopsis thaliana
  peptide (1)..(394): Ceres Seq. ID no. 13617635
  misc_feature (1)..(388): Pfam Name: Glycosyl hydrolase family 9 Pfam Description: Glycosyl hydrolase family 9
  misc_feature (1)..(394): Homolog of NCBI NO: 15217446 NR Description: glycosyl hydrolase family 9 [Arabidopsis thaliana]
  misc_feature (1)..(394): Homolog of NCBI NO: 21554174 NR Description: putative beta-glucanase [Arabidopsis thaliana]
  misc_feature (1)..(393): Homolog of NCBI NO: 15219963 NR Description: glycosyl hydrolase family 9 [Arabidopsis thaliana]
  misc_feature (1)..(393): Homolog of NCBI NO: 7488905 NR Description: cellulase (EC 3.2.1.4) - sweet orange
  misc_feature (1)..(392): Homolog of NCBI NO: 7488790 NR Description: cellulase (EC 3.2.1.4) precursor - garden pea
  misc_feature (1)..(388): Homolog of NCBI NO: 16903349 NR Description: endo-beta-1,4-glucanase precursor [Nicotiana
  misc_feature (1)..(392): Homolog of NCBI NO: 7488976 NR Description: cellulase (EC 3.2.1.4) - tomato
  misc_feature (1)..(219): Homolog of NCBI NO: 2129545 NR Description: cellulase (EC 3.2.1.4) - Arabidopsis thaliana
  misc_feature (1)..(389): Homolog of NCBI NO: 11357128 NR Description: cellulase (EC 3.2.1.4) 2 precursor - Monterey pine
  misc_feature (1)..(389): Homolog of NCBI NO: 7484476 NR Description: cellulase (EC 3.2.1.4) 1 precursor - Monterey pine
MLSWSALEYGKRMGPELENARVNIRWATDYLLKCARATPGKLYVGVGDPNVDHKCWERPEDMDTPRTVYSVSASNPGSDVAAETAAALAAASMVFRKVDSKYSRLLLATAKDVMQFAIQYQGAYSDSLSSSVCPFYCSYSGYKDELMWGASWLLRATNNPYYANFIKSLGGGDQPDIFSWDNKYAGAYVLLSRRALLNKDSNFEQYKQAAENFICKILPDSPSSSTQYTQGGLMYKLPQSNLQYVTSITFLLTTYAKYMKATKHTFNCGSSVIVPNALISLSKRQVDYILGDNPIKMSYMVGFSSNFPKRIHHRASSLPSHALRSQSLGCNGGFQSFYTQNPNPNILTGAIVGGPNQNDGYPDQRDDYSHAEPATYINAAFVGPLAYFAAGRST

SEQ ID NO: 105641 - DNA, 736 bp, Arabidopsis thaliana
  misc_feature (1)..(736): Ceres Seq. ID no. 13617674
  misc_feature: MA Experiment ID: 20000171 Result: Down-regulated in Transcription
  misc_feature: MA Experiment 20000171 PARAMETER Experiment Name: At_42deg_Heat_P Parameter: Age (day) Value: 14
  misc_feature: MA Experiment 20000171 PARAMETER Experiment Name: At_42deg_Heat_P Parameter: Organism Value: A. thaliana
  misc_feature: MA Experiment 20000171 PARAMETER Experiment Name: At_42deg_Heat_P Parameter: Plant Line Value: WS
  misc_feature: MA Experiment 20000171 PARAMETER Experiment Name: At_42deg_Heat_P Parameter: Temperature (deg C) Value: 42 vs. 22
  misc_feature: MA Experiment 20000171 PARAMETER Experiment Name: At_42deg_Heat_P Parameter: Timepoint (hr) Value: 1
  misc_feature: MA Experiment 20000171 PARAMETER Experiment Name: At_42deg_Heat_P Parameter: Tissue Value: Aerial
  misc_feature: MA Experiment ID: 20000173 Result: Down-regulated in Transcription
  misc_feature: MA Experiment 20000173 PARAMETER Experiment Name: At_42deg_Heat_P Parameter: Age (day) Value: 14
  misc_feature: MA Experiment 20000173 PARAMETER Experiment Name: At_42deg_Heat_P Parameter: Organism Value: A. thaliana
  misc_feature: MA Experiment 20000173 PARAMETER Experiment Name: At_42deg_Heat_P Parameter: Plant Line Value: WS
  misc_feature: MA Experiment 20000173 PARAMETER Experiment Name: At_42deg_Heat_P Parameter: Temperature (deg C) Value: 42 vs. 22
  misc_feature: MA Experiment 20000173 PARAMETER Experiment Name: At_42deg_Heat_P Parameter: Timepoint (hr) Value: 6
  misc_feature: MA Experiment 20000173 PARAMETER Experiment Name: At_42deg_Heat_P Parameter: Tissue Value: Aerial
  misc_feature: MA Experiment ID: 20000180 Result: Down-regulated in Transcription
  misc_feature: MA Experiment 20000180 PARAMETER Experiment Name: At_Germinating_Seeds_P Parameter: Age (hr) Value: 24 vs. 0
  misc_feature: MA Experiment 20000180 PARAMETER Experiment Name: At_Germinating_Seeds_P Parameter: Tissue Value: Germinating Seeds
  misc_feature: MA Experiment ID: 20000437 Result: Down-regulated in Transcription
  misc_feature: MA Experiment 20000437 PARAMETER Experiment Name: At_Drought_P Parameter: Age (day) Value: 8
  misc_feature: MA Experiment 20000437 PARAMETER Experiment Name: At_Drought_P Parameter: Organism Value: A. thaliana
  misc_feature: MA Experiment 20000437 PARAMETER Experiment Name: At_Drought_P Parameter: Plant Line Value: WS
  misc_feature: MA Experiment 20000437 PARAMETER Experiment Name: At_Drought_P Parameter: Timepoint (hr) Value: 24
  misc_feature: MA Experiment 20000437 PARAMETER Experiment Name: At_Drought_P Parameter: Tissue Value: Whole Plant
  misc_feature: MA Experiment 20000437 PARAMETER Experiment Name: At_Drought_P Parameter: Treatment Value: Drought vs. No Drought
  misc_feature: MA Experiment ID: 20001451 Result: Down-regulated in Transcription
  misc_feature: MA Experiment 20001451 PARAMETER Experiment Name: At_Far-red-induction_P Parameter: Age (day) Value: 7
  misc_feature: MA Experiment 20001451 PARAMETER Experiment Name: At_Far-red-induction_P Parameter: Light Value: Far-red vs. White
  misc_feature: MA Experiment 20001451 PARAMETER Experiment Name: At_Far-red-induction_P Parameter: Organism Value: A. thaliana
  misc_feature: MA Experiment 20001451 PARAMETER Experiment Name: At_Far-red-induction_P Parameter: Plant Line Value: Columbia
  misc_feature: MA Experiment 20001451 PARAMETER Experiment Name: At_Far-red-induction_P Parameter: Timepoint (hr) Value: 24
  misc_feature: MA Experiment 20001451 PARAMETER Experiment Name: At_Far-red-induction_P Parameter: Tissue Value: Whole Plant
gcttagctaatgttgacgactcttcgatctcgttgttcgtctcttcttctaaatcaatcatggaagctagctcccaatcgcatcttcgcttcctctccctctttttcttcatccgccgggatctctaatgtctcagagattctcacacttcccgaagtggagaagattctcgccgacgtgaaagctgataacgtgactgtgattcctacacataatcattgtttctgggctgatttcactgtcatcgccaccggtagatccgattggcacttaagaaacatcgctcaagctttagtttatagggccaagcaaaagcagaaaggagctaaacatgtaatgttaccttctgtgcaagggtacaatagcaagtggattgtcatagactacggaaagtttgtagtccatgcacttgatgagaaagccagaggttatttcaatttggaaagcctttggtctgctgaatcctctggtactgatacttcagatcaggatctccaaaacgtttttgtaaaggtccgaccaaagaacaattcgaaaaggaaaccggctaaagtgagttcttgatcctgtccgatggatacaatttctcataaacttctcgagtctagacgagttaagaataggaggattttaaagcctattaagtatttatctccttaatatttttttttttggtaagttttatctccttaatatttgtagtcatctatctattttttccttaatatctttgctt

SEQ ID NO: 105642 - protein, 184 aa, Arabidopsis thaliana
  peptide (1)..(184): Ceres Seq. ID no. 13617675
  misc_feature (44)..(149): Pfam Name: Domain of unknown function DUF143 Pfam Description: Domain of unknown function DUF143
  misc_feature (1)..(184): Homolog of NCBI NO: 18408812 NR Description: expressed protein [Arabidopsis thaliana]
  misc_feature (1)..(184): Homolog of NCBI NO: 21536608 NR Description: unknown [Arabidopsis thaliana]
  misc_feature (37)..(162): Homolog of NCBI NO: 32473879 NR Description: conserved hypothetical protein [Pirellula sp.]
  misc_feature (50)..(165): Homolog of NCBI NO: 22998575 NR Description: hypothetical protein [Magnetococcus sp. MC-1]
  misc_feature (26)..(150): Homolog of NCBI NO: 15966916 NR Description: HYPOTHETICAL PROTEIN [Sinorhizobium meliloti]
  misc_feature (50)..(153): Homolog of NCBI NO: 24372753 NR Description: iojap domain protein [Shewanella oneidensis MR-1]
  misc_feature (50)..(154): Homolog of NCBI NO: 23109914 NR Description: hypothetical protein [Novosphingobium
  misc_feature (54)..(149): Homolog of NCBI NO: 33519773 NR Description: conserved hypothetical protein [Candidatus floridanus] >gi|33504118|emb|CAD83380.1| conserved hypothetical
  misc_feature (45)..(161): Homolog of NCBI NO: 15838771 NR Description: conserved hypothetical protein [Xylella
  misc_feature (50)..(157): Homolog of NCBI NO: 23028923 NR Description: hypothetical protein [Microbulbifer degradans
MLTTLRSRCSSLLLNQSWKLAPNRIFASSPSFSSSAGISNVSEILTLPEVEKILADVKADNVTVIPTHNHCFWADFTVIATGRSDWHLRNIAQALVYRAKQKQKGAKHVMLPSVQGYNSKWIVIDYGKFVVHALDEKARGYFNLESLWSAESSGTDTSDQDLQNVFVKVRPKNNSKRKPAKVSS

SEQ ID NO: 105643 - DNA, 1220 bp, Arabidopsis thaliana
  misc_feature (1)..(1220): Ceres Seq. ID no. 13617676
  misc_feature: MA Experiment ID: 108434 Result: Up-regulated in Transcription
  misc_feature: MA Experiment 108434 PARAMETER Experiment Name: At_Root_Tips_cDNA_P Parameter: Tissue Value: Root Tips
  misc_feature: MA Experiment ID: 108463 Result: Down-regulated in Transcription
  misc_feature: MA Experiment 108463 PARAMETER Experiment Name: At_Germinating_Seeds_cDNA_P Parameter: Age (day) Value: 3 vs. 0
  misc_feature: MA Experiment 108463 PARAMETER Experiment Name: At_Germinating_Seeds_cDNA_P Parameter: Tissue Value: Germinating Seeds
  misc_feature: MA Experiment ID: 108464 Result: Down-regulated in Transcription
  misc_feature: MA Experiment 108464 PARAMETER Experiment Name: At_Germinating_Seeds_cDNA_P Parameter: Age (day) Value: 4 vs. 0
  misc_feature: MA Experiment 108464 PARAMETER Experiment Name: At_Germinating_Seeds_cDNA_P Parameter: Tissue Value: Germinating Seeds
  misc_feature: MA Experiment ID: 108585 Result: Down-regulated in Transcription
  misc_feature: MA Experiment 108585 PARAMETER Experiment Name: At_5mM_NaNP_cDNA_P Parameter: Timepoint (hr) Value: 6
  misc_feature: MA Experiment 108585 PARAMETER Experiment Name: At_5mM_NaNP_cDNA_P Parameter: Tissue Value: Aerial
  misc_feature: MA Experiment 108585 PARAMETER Experiment Name: At_5mM_NaNP_cDNA_P Parameter: Treatment Value: null
  misc_feature: MA Experiment ID: 108595 Result: Down-regulated in Transcription
  misc_feature: MA Experiment 108595 PARAMETER Experiment Name: At_Ler-pi_Ovule_cDNA_P Parameter: Plant Line Value: null
  misc_feature: MA Experiment ID: 108668 Result: Down-regulated in Transcription
  misc_feature: MA Experiment 108668 PARAMETER Experiment Name: At_2mM_SA_cDNA_P Parameter: Plant Line Value: WS
  misc_feature: MA Experiment 108668 PARAMETER Experiment Name: At_2mM_SA_cDNA_P Parameter: Timepoint (hr) Value: 6
  misc_feature: MA Experiment 108668 PARAMETER Experiment Name: At_2mM_SA_cDNA_P Parameter: Treatment Value: 2mM SA vs. No Treatment
  misc_feature: MA Experiment ID: 20000069 Result: Up-regulated in Transcription
  misc_feature: MA Experiment 20000069 PARAMETER Experiment Name: At_100uM_ABA_Mutants_cDNA_P Parameter: Plant Line Value: CS23
  misc_feature: MA Experiment 20000069 PARAMETER Experiment Name: At_100uM_ABA_Mutants_cDNA_P Parameter: Timepoint (hr) Value: 6
  misc_feature: MA Experiment 20000069 PARAMETER Experiment Name: At_100uM_ABA_Mutants_cDNA_P Parameter: Tissue Value: Aerial
  misc_feature: MA Experiment 20000069 PARAMETER Experiment Name: At_100uM_ABA_Mutants_cDNA_P Parameter: Treatment Value: 100uM ABA vs. No Treatment
  misc_feature: MA Experiment ID: 20000070 Result: Up-regulated in Transcription
  misc_feature: MA Experiment 20000070 PARAMETER Experiment Name: At_100uM_ABA_Mutants_cDNA_P Parameter: Plant Line Value: CS24
  misc_feature: MA Experiment 20000070 PARAMETER Experiment Name: At_100uM_ABA_Mutants_cDNA_P Parameter: Timepoint (hr) Value: 6
  misc_feature: MA Experiment 20000070 PARAMETER Experiment Name: At_100uM_ABA_Mutants_cDNA_P Parameter: Tissue Value: Aerial
  misc_feature: MA Experiment 20000070 PARAMETER Experiment Name: At_100uM_ABA_Mutants_cDNA_P Parameter: Treatment Value: 100uM ABA vs. No Treatment
  misc_feature: MA Experiment ID: 20000071 Result: Up-regulated in Transcription
  misc_feature: MA Experiment 20000071 PARAMETER Experiment Name: At_100uM_ABA_Mutants_cDNA_P Parameter: Plant Line Value: CS8104
  misc_feature: MA Experiment 20000071 PARAMETER Experiment Name: At_100uM_ABA_Mutants_cDNA_P Parameter: Timepoint (hr) Value: 6
  misc_feature: MA Experiment 20000071 PARAMETER Experiment Name: At_100uM_ABA_Mutants_cDNA_P Parameter: Tissue Value: Aerial
  misc_feature: MA Experiment 20000071 PARAMETER Experiment Name: At_100uM_ABA_Mutants_cDNA_P Parameter: Treatment Value: 100uM ABA vs. No Treatment
  misc_feature: MA Experiment ID: 20000072 Result: Up-regulated in Transcription
  misc_feature: MA Experiment 20000072 PARAMETER Experiment Name: At_100uM_ABA_Mutants_cDNA_P Parameter: Plant Line Value: CS8105
  misc_feature: MA Experiment 20000072 PARAMETER Experiment Name: At_100uM_ABA_Mutants_cDNA_P Parameter: Timepoint (hr) Value: 6
  misc_feature: MA Experiment 20000072 PARAMETER Experiment Name: At_100uM_ABA_Mutants_cDNA_P Parameter: Tissue Value: Aerial
  misc_feature: MA Experiment 20000072 PARAMETER Experiment Name: At_100uM_ABA_Mutants_cDNA_P Parameter: Treatment Value: 100uM ABA vs. No Treatment
  misc_feature: MA Experiment ID: 20000086 Result: Up-regulated in Transcription
  misc_feature: MA Experiment 20000086 PARAMETER Experiment Name: At_100uM_ABA_Mutants_cDNA_P Parameter: Plant Line Value: CS22
  misc_feature: MA Experiment 20000086 PARAMETER Experiment Name: At_100uM_ABA_Mutants_cDNA_P Parameter: Timepoint (hr) Value: 6
  misc_feature: MA Experiment 20000086 PARAMETER Experiment Name: At_100uM_ABA_Mutants_cDNA_P Parameter: Tissue Value: Aerial
  misc_feature: MA Experiment 20000086 PARAMETER Experiment Name: At_100uM_ABA_Mutants_cDNA_P Parameter: Treatment Value: 100uM ABA vs. No Treatment
  misc_feature: MA Experiment ID: 20000087 Result: Up-regulated in Transcription
  misc_feature: MA Experiment 20000087 PARAMETER Experiment Name: At_100uM_ABA_Mutants_cDNA_P Parameter: Plant Line Value: WS
  misc_feature: MA Experiment 20000087 PARAMETER Experiment Name: At_100uM_ABA_Mutants_cDNA_P Parameter: Timepoint (hr) Value: 6
  misc_feature: MA Experiment 20000087 PARAMETER Experiment Name: At_100uM_ABA_Mutants_cDNA_P Parameter: Tissue Value: Aerial
  misc_feature: MA Experiment 20000087 PARAMETER Experiment Name: At_100uM_ABA_Mutants_cDNA_P Parameter: Treatment Value: 100uM ABA vs. No Treatment
  misc_feature: MA Experiment ID: 20000088 Result: Up-regulated in Transcription
  misc_feature: MA Experiment 20000088 PARAMETER Experiment Name: At_100uM_ABA_Mutants_cDNA_P Parameter: Plant Line Value: Landsberg
  misc_feature: MA Experiment 20000088 PARAMETER Experiment Name: At_100uM_ABA_Mutants_cDNA_P Parameter: Timepoint (hr) Value: 6
  misc_feature: MA Experiment 20000088 PARAMETER Experiment Name: At_100uM_ABA_Mutants_cDNA_P Parameter: Tissue Value: Aerial
  misc_feature: MA Experiment 20000088 PARAMETER Experiment Name: At_100uM_ABA_Mutants_cDNA_P Parameter: Treatment Value: 100uM ABA vs. No Treatment
  misc_feature: MA Experiment ID: 20000089 Result: Up-regulated in Transcription
  misc_feature: MA Experiment ID: 20000111 Result: Down-regulated in Transcription
  misc_feature: MA Experiment 20000111 PARAMETER Experiment Name: At_42deg_Heat_cDNA_P Parameter: Temperature (deg C) Value: 42 vs. 22
  misc_feature: MA Experiment 20000111 PARAMETER Experiment Name: At_42deg_Heat_cDNA_P Parameter: Timepoint (hr) Value: 6
  misc_feature: MA Experiment 20000111 PARAMETER Experiment Name: At_42deg_Heat_cDNA_P Parameter: Tissue Value: Aerial
  misc_feature: MA Experiment ID: 20000112 Result: Down-regulated in Transcription
  misc_feature: MA Experiment 20000112 PARAMETER Experiment Name: At_42deg_Heat_cDNA_P Parameter: Temperature (deg C) Value: 42 vs. 22
  misc_feature: MA Experiment 20000112 PARAMETER Experiment Name: At_42deg_Heat_cDNA_P Parameter: Timepoint (hr) Value: 2
  misc_feature: MA Experiment 20000112 PARAMETER Experiment Name: At_42deg_Heat_cDNA_P Parameter: Tissue Value: Aerial
  misc_feature: MA Experiment ID: 20000113 Result: Down-regulated in Transcription
  misc_feature: MA Experiment 20000113 PARAMETER Experiment Name: At_42deg_Heat_cDNA_P Parameter: Temperature (deg C) Value: 42 vs. 22
  misc_feature: MA Experiment 20000113 PARAMETER Experiment Name: At_42deg_Heat_cDNA_P Parameter: Timepoint (hr) Value: 8
  misc_feature: MA Experiment 20000113 PARAMETER Experiment Name: At_42deg_Heat_cDNA_P Parameter: Tissue Value: Aerial
  misc_feature: MA Experiment ID: 20000117 Result: Up-regulated in Transcription
  misc_feature: MA Experiment 20000117 PARAMETER Experiment Name: At_100uM_ABA_Mutants_cDNA_P Parameter: Plant Line Value: Columbia
  misc_feature: MA Experiment 20000117 PARAMETER Experiment Name: At_100uM_ABA_Mutants_cDNA_P Parameter: Timepoint (hr) Value: 6
  misc_feature: MA Experiment 20000117 PARAMETER Experiment Name: At_100uM_ABA_Mutants_cDNA_P Parameter: Tissue Value: Aerial
  misc_feature: MA Experiment 20000117 PARAMETER Experiment Name: At_100uM_ABA_Mutants_cDNA_P Parameter: Treatment Value: 100uM ABA vs. No Treatment
  misc_feature: MA Experiment ID: 20000185 Result: Down-regulated in Transcription
  misc_feature: MA Experiment 20000185 PARAMETER Experiment Name: At_Roots__P Parameter: Age (day) Value: 7 vs. 21
  misc_feature: MA Experiment 20000185 PARAMETER Experiment Name: At_Roots__P Parameter: Organism Value: A. thaliana
  misc_feature: MA Experiment 20000185 PARAMETER Experiment Name: At_Roots__P Parameter: Tissue Value: Roots vs. Whole Plant
  misc_feature: MA Experiment ID: 20000439 Result: Down-regulated in Transcription
  misc_feature: MA Experiment 20000439 PARAMETER Experiment Name: At_Roots__P Parameter: Age (day) Value: 14 vs. 21
  misc_feature: MA Experiment 20000439 PARAMETER Experiment Name: At_Roots__P Parameter: Organism Value: A. thaliana
  misc_feature: MA Experiment 20000439 PARAMETER Experiment Name: At_Roots__P Parameter: Tissue Value: Roots vs. Whole Plant
  misc_feature: MA Experiment ID: 20001247 Result: Down-regulated in Transcription
  misc_feature: MA Experiment 20001247 PARAMETER Experiment Name: At_Far-red-induction_P Parameter: Age (day) Value: 7
  misc_feature: MA Experiment 20001247 PARAMETER Experiment Name: At_Far-red-induction_P Parameter: Light Value: Far-red vs. White
  misc_feature: MA Experiment 20001247 PARAMETER Experiment Name: At_Far-red-induction_P Parameter: Organism Value: A. thaliana
  misc_feature: MA Experiment 20001247 PARAMETER Experiment Name: At_Far-red-induction_P Parameter: Plant Line Value: Columbia
  misc_feature: MA Experiment 20001247 PARAMETER Experiment Name: At_Far-red-induction_P Parameter: Timepoint (hr) Value: 1
  misc_feature: MA Experiment 20001247 PARAMETER Experiment Name: At_Far-red-induction_P Parameter: Tissue Value: Whole Plant
atgaggctagttcaagtatcttccactgaatccatttcttctatttccgcttcctcggcccggaatggtggagttctctacttgaagcgtggttctgtctgtgtatgtagagtcttgaagccgaataaagttgctctcaacagtatgattctttcagctatgaggacttgctcaatctctgggttccatactcatcttccgaagtcaagcggttcagtttcttcgagaaagaggttttcttctactgctttatcactcatcactcaaaccatttcaccatttgctcatccccgttcatcagtaattgtgtcaagccttctctccccatctgatatccctcagaaatctgaagaatggtttgctttaaggaaagacaagttaaccacaagtacattcagtacagcgctggggttttggaaaggaaaccggcgtgccgagctctggcatgaaaaggtttatgattcagatgcacgagttgttgaggagtctgcacggtttgctatgaactggggtgtacaaatggaatcatctgcgatagaaaggtacaaaagaataatgggttgtgaggttggaacaatgggatttgctattcactccaatgaggaatttcactggcttggcgcttcaccggatggaatcctcgattgctttggtattctagaagtgaaatgtccatataacaaagggaaaaccgaaactgtattaccctggaaaaaagtgccctactattacatgcctcagctgcagggtcaaatggagataatggaccgggaatgggtcaacttatactgctggacacgaaatggaagcacggttttccgtgtgatgagagaccgaagctattggagaatcatacatgatgtattaagggagttctggtgggagagtgtgattcctgcaagggaggctttgttgttagggaaagaggatgaggaggtgaaaaagtatgagccaacatctacgcataaacgaaccaagcttgccatagctaaaagcctaaatttggctgcggaatcaaaactagtatgcagagaaattgctgatcatgtcgagttcttttagatgaaataggagaatgatgattcatcttattagatcacgcattgttgtacttatgaaactggttaaatgatgtaacactctttaatcagatttcactctttggagtttagtggttttctatcgtctgtaaattaattggatgtgaaatgattttcatt

SEQ ID NO: 105644 - protein, 353 aa, Arabidopsis thaliana
  peptide (1)..(353): Ceres Seq. ID no. 13617677
  misc_feature (1)..(353): Homolog of NCBI NO: 30697546 NR Description: F12A21.19 [Arabidopsis thaliana] unknown protein [Arabidopsis thaliana]
  misc_feature (32)..(353): Homolog of NCBI NO: 25404961 NR Description: protein F12A21.19 [imported] - Arabidopsis >gi|11072024|gb|AAG28903.1|AC008113_19 F12A21.19 [Arabidopsis
  misc_feature (80)..(353): Homolog of NCBI NO: 40253518 NR Description: unknown protein [Oryza sativa (japonica
  misc_feature (37)..(353): Homolog of NCBI NO: 38345347 NR Description: OSJNBa0081L15.20 [Oryza sativa (japonica
  misc_feature (99)..(353): Homolog of NCBI NO: 10241653 NR Description: contains similarity to F12A21.16 [Oryza sativa
  misc_feature (117)..(346): Homolog of NCBI NO: 15222951 NR Description: hypothetical protein [Arabidopsis thaliana]
  misc_feature (117)..(346): Homolog of NCBI NO: 25402766 NR Description: protein F16A14.4 [imported] - Arabidopsis >gi|8778385|gb|AAF79393.1|AC068197_3 F16A14.4 [Arabidopsis
  misc_feature (103)..(313): Homolog of NCBI NO: 9631735 NR Description: PBCV-1 exonuclease [Paramecium bursaria Chlorella
MRLVQVSSTESISSISASSARNGGVLYLKRGSVCVCRVLKPNKVALNSMILSAMRTCSISGFHTHLPKSSGSVSSRKRFSSTALSLITQTISPFAHPRSSVIVSSLLSPSDIPQKSEEWFALRKDKLTTSTFSTALGFWKGNRRAELWHEKVYDSDARVVEESARFAMNWGVQMESSAIERYKRIMGCEVGTMGFAIHSNEEFHWLGASPDGILDCFGILEVKCPYNKGKTETVLPWKKVPYYYMPQLQGQMEIMDREWVNLYCWTRNGSTVFRVMRDRSYWRIIHDVLREFWWESVIPAREALLLGKEDEEVKKYEPTSTHKRTKLAIAKSLNLAAESKLVCREIADHVEFF

SEQ ID NO: 105645 - protein, 305 aa, Arabidopsis thaliana; identical to SEQ ID NO: 73191
  peptide (1)..(305): Ceres Seq. ID no. 13617678
  misc_feature (1)..(305): Homolog of NCBI NO: 30697546 NR Description: F12A21.19 [Arabidopsis thaliana] unknown protein [Arabidopsis thaliana]
  misc_feature (1)..(305): Homolog of NCBI NO: 25404961 NR Description: protein F12A21.19 [imported] - Arabidopsis >gi|11072024|gb|AAG28903.1|AC008113_19 F12A21.19 [Arabidopsis
  misc_feature (32)..(305): Homolog of NCBI NO: 40253518 NR Description: unknown protein [Oryza sativa (japonica
  misc_feature (1)..(305): Homolog of NCBI NO: 38345347 NR Description: OSJNBa0081L15.20 [Oryza sativa (japonica
  misc_feature (51)..(305): Homolog of NCBI NO: 10241653 NR Description: contains similarity to F12A21.16 [Oryza sativa
  misc_feature (69)..(298): Homolog of NCBI NO: 15222951 NR Description: hypothetical protein [Arabidopsis thaliana]
  misc_feature (69)..(298): Homolog of NCBI NO: 25402766 NR Description: protein F16A14.4 [imported] - Arabidopsis >gi|8778385|gb|AAF79393.1|AC068197_3 F16A14.4 [Arabidopsis
  misc_feature (55)..(265): Homolog of NCBI NO: 9631735 NR Description: PBCV-1 exonuclease [Paramecium bursaria Chlorella

SEQ ID NO: 105646 - protein, 300 aa, Arabidopsis thaliana
  peptide (1)..(300): Ceres Seq. ID no. 13617679
  misc_feature (1)..(300): Homolog of NCBI NO: 30697546 NR Description: F12A21.19 [Arabidopsis thaliana] unknown protein [Arabidopsis thaliana]
  misc_feature (1)..(300): Homolog of NCBI NO: 25404961 NR Description: protein F12A21.19 [imported] - Arabidopsis >gi|11072024|gb|AAG28903.1|AC008113_19 F12A21.19 [Arabidopsis
  misc_feature (27)..(300): Homolog of NCBI NO: 40253518 NR Description: unknown protein [Oryza sativa (japonica
  misc_feature (1)..(300): Homolog of NCBI NO: 38345347 NR Description: OSJNBa0081L15.20 [Oryza sativa (japonica
  misc_feature (46)..(300): Homolog of NCBI NO: 10241653 NR Description: contains similarity to F12A21.16 [Oryza sativa
  misc_feature (64)..(293): Homolog of NCBI NO: 15222951 NR Description: hypothetical protein [Arabidopsis thaliana]
  misc_feature (64)..(293): Homolog of NCBI NO: 25402766 NR Description: protein F16A14.4 [imported] - Arabidopsis >gi|8778385|gb|AAF79393.1|AC068197_3 F16A14.4 [Arabidopsis
  misc_feature (50)..(260): Homolog of NCBI NO: 9631735 NR Description: PBCV-1 exonuclease [Paramecium bursaria Chlorella
MRTCSISGFHTHLPKSSGSVSSRKRFSSTALSLITQTISPFAHPRSSVIVSSLLSPSDIPQKSEEWFALRKDKLTTSTFSTALGFWKGNRRAELWHEKVYDSDARVVEESARFAMNWGVQMESSAIERYKRIMGCEVGTMGFAIHSNEEFHWLGASPDGILDCFGILEVKCPYNKGKTETVLPWKKVPYYYMPQLQGQMEIMDREWVNLYCWTRNGSTVFRVMRDRSYWRIIHDVLREFWWESVIPAREALLLGKEDEEVKKYEPTSTHKRTKLAIAKSLNLAAESKLVCREIADHVEFF

SEQ ID NO: 105647 - DNA, 1374 bp, Arabidopsis thaliana
  misc_feature (1)..(1374): Ceres Seq. ID no. 13617680
  misc_feature: MA Experiment ID: 108433 Result: Down-regulated in Transcription
  misc_feature: MA Experiment 108433 PARAMETER Experiment Name: At_rhl_Mutant2_cDNA_P Parameter: Age (day) Value: 7
  misc_feature: MA Experiment 108433 PARAMETER Experiment Name: At_rhl_Mutant2_cDNA_P Parameter: Organism Value: A. thaliana
  misc_feature: MA Experiment 108433 PARAMETER Experiment Name: At_rhl_Mutant2_cDNA_P Parameter: Plant Line Value: rhl Mutant vs. wt landsburg
  misc_feature: MA Experiment 108433 PARAMETER Experiment Name: At_rhl_Mutant2_cDNA_P Parameter: Tissue Value: Roots
  misc_feature: MA Experiment ID: 108434 Result: Up-regulated in Transcription
  misc_feature: MA Experiment 108434 PARAMETER Experiment Name: At_Root_Tips_cDNA_P Parameter: Tissue Value: Root Tips
  misc_feature: MA Experiment ID: 108572 Result: Up-regulated in Transcription
  misc_feature: MA Experiment 108572 PARAMETER Experiment Name: At_Drought_cDNA_P Parameter: Timepoint (hr) Value: 1
  misc_feature: MA Experiment 108572 PARAMETER Experiment Name: At_Drought_cDNA_P Parameter: Tissue Value: Aerial
  misc_feature: MA Experiment 108572 PARAMETER Experiment Name: At_Drought_cDNA_P Parameter: Treatment Value: Drought vs. No Drought
  misc_feature: MA Experiment ID: 108573 Result: Up-regulated in Transcription
  misc_feature: MA Experiment 108573 PARAMETER Experiment Name: At_Drought_cDNA_P Parameter: Timepoint (hr) Value: 6
  misc_feature: MA Experiment 108573 PARAMETER Experiment Name: At_Drought_cDNA_P Parameter: Tissue Value: Aerial
  misc_feature: MA Experiment 108573 PARAMETER Experiment Name: At_Drought_cDNA_P Parameter: Treatment Value: Drought vs. No Drought
  misc_feature: MA Experiment ID: 108577 Result: Down-regulated in Transcription
  misc_feature: MA Experiment 108577 PARAMETER Experiment Name: At_42deg_Heat_cDNA_P Parameter: Temperature (deg C) Value: 42 vs. 22
  misc_feature: MA Experiment 108577 PARAMETER Experiment Name: At_42deg_Heat_cDNA_P Parameter: Timepoint (hr) Value: 6
  misc_feature: MA Experiment 108577 PARAMETER Experiment Name: At_42deg_Heat_cDNA_P Parameter: Tissue Value: Aerial
  misc_feature: MA Experiment ID: 108594 Result: Down-regulated in Transcription
  misc_feature: MA Experiment 108594 PARAMETER Experiment Name: At_Ler-rhl_Root_cDNA_P Parameter: Plant Line Value: null
  misc_feature: MA Experiment ID: 108605 Result: Up-regulated in Transcription
  misc_feature: MA Experiment 108605 PARAMETER Experiment Name: At_100uM_ABA_cDNA_P Parameter: Timepoint (hr) Value: 6
  misc_feature: MA Experiment 108605 PARAMETER Experiment Name: At_100uM_ABA_cDNA_P Parameter: Tissue Value: Aerial
  misc_feature: MA Experiment 108605 PARAMETER Experiment Name: At_100uM_ABA_cDNA_P Parameter: Treatment Value: 100uM ABA vs. No Treatment
  misc_feature: MA Experiment ID: 108607 Result: Up-regulated in Transcription
  misc_feature: MA Experiment 108607 PARAMETER Experiment Name: At_100uM_ABA_cDNA_P Parameter: Timepoint (hr) Value: 4
  misc_feature: MA Experiment 108607 PARAMETER Experiment Name: At_100uM_ABA_cDNA_P Parameter: Tissue Value: Aerial
  misc_feature: MA Experiment 108607 PARAMETER Experiment Name: At_100uM_ABA_cDNA_P Parameter: Treatment Value: 100uM ABA vs. No Treatment
  misc_feature: MA Experiment ID: 20000169 Result: Up-regulated in Transcription
  misc_feature: MA Experiment 20000169 PARAMETER Experiment Name: At_100uM_ABA_P Parameter: Age (day) Value: 14
  misc_feature: MA Experiment 20000169 PARAMETER Experiment Name: At_100uM_ABA_P Parameter: Organism Value: A. thaliana
  misc_feature: MA Experiment 20000169 PARAMETER Experiment Name: At_100uM_ABA_P Parameter: Plant Line Value: WS
  misc_feature: MA Experiment 20000169 PARAMETER Experiment Name: At_100uM_ABA_P Parameter: Timepoint (hr) Value: 6
  misc_feature: MA Experiment 20000169 PARAMETER Experiment Name: At_100uM_ABA_P Parameter: Tissue Value: Aerial
  misc_feature: MA Experiment 20000169 PARAMETER Experiment Name: At_100uM_ABA_P Parameter: Treatment Value: 100uM ABA vs. No Treatment
  misc_feature: MA Experiment ID: 20000184 Result: Up-regulated in Transcription
  misc_feature: MA Experiment 20000184 PARAMETER Experiment Name: At_Shoots__P Parameter: Age (day) Value: 7
  misc_feature: MA Experiment 20000184 PARAMETER Experiment Name: At_Shoots__P Parameter: Tissue Value: Shoots vs. Whole Plant
  misc_feature: MA Experiment ID: 20000185 Result: Up-regulated in Transcription
  misc_feature: MA Experiment 20000185 PARAMETER Experiment Name: At_Roots__P Parameter: Age (day) Value: 7 vs. 21
  misc_feature: MA Experiment 20000185 PARAMETER Experiment Name: At_Roots__P Parameter: Organism Value: A. thaliana
  misc_feature: MA Experiment 20000185 PARAMETER Experiment Name: At_Roots__P Parameter: Tissue Value: Roots vs. Whole Plant
  misc_feature: MA Experiment ID: 20000234 Result: Up-regulated in Transcription
  misc_feature: MA Experiment 20000234 PARAMETER Experiment Name: At_Siliques_P Parameter: Age (day) Value: 21
  misc_feature: MA Experiment 20000234 PARAMETER Experiment Name: At_Siliques_P Parameter: Organism Value: A. thaliana
  misc_feature: MA Experiment 20000234 PARAMETER Experiment Name: At_Siliques_P Parameter: Plant Line Value: WS
  misc_feature: MA Experiment 20000234 PARAMETER Experiment Name: At_Siliques_P Parameter: Tissue Value: Less Than 5mm Siliques vs. Whole Plant
  misc_feature: MA Experiment ID: 20000264 Result: Up-regulated in Transcription
  misc_feature: MA Experiment 20000264 PARAMETER Experiment Name: At_Open_Flower_P Parameter: Age (day) Value: 21
  misc_feature: MA Experiment 20000264 PARAMETER Experiment Name: At_Open_Flower_P Parameter: Plant Line Value: WS
  misc_feature: MA Experiment 20000264 PARAMETER Experiment Name: At_Open_Flower_P Parameter: Tissue Value: Open Flower vs. Whole Plant
  misc_feature: MA Experiment ID: 20000265 Result: Up-regulated in Transcription
  misc_feature: MA Experiment 20000265 PARAMETER Experiment Name: At_Open_Flower_P Parameter: Age (day) Value: 21
  misc_feature: MA Experiment 20000265 PARAMETER Experiment Name: At_Open_Flower_P Parameter: Plant Line Value: WS
  misc_feature: MA Experiment 20000265 PARAMETER Experiment Name: At_Open_Flower_P Parameter: Tissue Value: Closed Flower vs. Whole Plant
  misc_feature: MA Experiment ID: 20000438 Result: Up-regulated in Transcription
  misc_feature: MA Experiment 20000438 PARAMETER Experiment Name: At_Shoots__P Parameter: Age (day) Value: 14
  misc_feature: MA Experiment 20000438 PARAMETER Experiment Name: At_Shoots__P Parameter: Tissue Value: Shoots vs. Whole Plant
  misc_feature: MA Experiment ID: 20000439 Result: Up-regulated in Transcription
  misc_feature: MA Experiment 20000439 PARAMETER Experiment Name: At_Roots__P Parameter: Age (day) Value: 14 vs. 21
  misc_feature: MA Experiment 20000439 PARAMETER Experiment Name: At_Roots__P Parameter: Organism Value: A. thaliana
  misc_feature: MA Experiment 20000439 PARAMETER Experiment Name: At_Roots__P Parameter: Tissue Value: Roots vs. Whole Plant
  misc_feature: MA Experiment ID: 20001248 Result: Down-regulated in Transcription
  misc_feature: MA Experiment 20001248 PARAMETER Experiment Name: At_Far-red-induction_P Parameter: Age (day) Value: 7
  misc_feature: MA Experiment 20001248 PARAMETER Experiment Name: At_Far-red-induction_P Parameter: Light Value: Far-red vs. White
  misc_feature: MA Experiment 20001248 PARAMETER Experiment Name: At_Far-red-induction_P Parameter: Organism Value: A. thaliana
  misc_feature: MA Experiment 20001248 PARAMETER Experiment Name: At_Far-red-induction_P Parameter: Plant Line Value: Columbia
  misc_feature: MA Experiment 20001248 PARAMETER Experiment Name: At_Far-red-induction_P Parameter: Timepoint (hr) Value: 4
  misc_feature: MA Experiment 20001248 PARAMETER Experiment Name: At_Far-red-induction_P Parameter: Tissue Value: Whole Plant
aacacaaagacaataaaattaatcaaaaataaacaaaggagagagacagaagaaacagagagagtagttaattccggtggttttctgctcatctacttctatccaccttcgtcccttccgccccaaaattcaattctctcttcctttctctctctttctccttaaaaactctaactttactcatctcatctccaaagtctcaacctttcttctctaatggagatctgcacttacttcaaatcacaacccacttggctcctcattctcttcgttctggggtcaatctcaatcttcaaattcatcttcaccctcctcagatctttctacatctacttcctccgaccatccaaaaacctccgccgatacggttcatgggcaatcatcaccggaccaacagacggaatcggtaaagctttcgcctttcagttagcccagaaaggtcttaaccttatactcgttgctcgtaacccagacaagctcaaagatgtctctgattccatcagatctaagtatagtcaaactcagatcttgaccgttgtgatggatttctctggagatattgatgaaggtgtgaaacggattaaggagagtattgaaggattagatgttgggattttgattaataatgctggcatgtcttatccttatgctaagtattttcatgaggttgatgaagagttgatcaataacttgattaagatcaatgttgaaggaactactaaagttactcaagctgtgttgcctaatatgcttaagaggaagaaaggtgctattattaatatgggttctggtgctgctgctcttattccttcttatcctttttactctgtttatgctggtgctaaaacgtacgtggatcagttcacaaagtgtctacatgttgagtataagaagagtgggattgatgttcaatgccaggttcccttgtatgttgcaacaaagatgacaaaaataagaagagcatccttcttagttgcatcaccagagggttacgcaaaggcagcactgcgttttgtaggctatgaagcacaatgcacaccgtactggcctcacgctctcatgggtgcagttgtctctgcattgcccgaaagcgtttttgaatcatttaacatcaagagatgcctccagatccggaagaagggtctccaaaaagactccatgaagaaagaatgaatcttccaggtttaagttactaccaagaatttccttcttctgaagttgttggtttcttgaaaagcttctgttctgaatcttttgtaagacttgtactctttagttttctaagttttttatattttaagattaaaaaccctaacgtacacgaataatttacttcctctgtttctatttattaatttaagcagtgttgtattg

SEQ ID NO: 105648 - protein, 318 aa, Arabidopsis thaliana
  peptide (1)..(318): Ceres Seq. ID no. 13617681
  misc_feature (1)..(318): Homolog of NCBI NO: 18408847 NR Description: short chain dehydrogenase/reductase family (b-keto acyl reductase, putative) [Arabidopsis thaliana]
  misc_feature (1)..(318): Homolog of NCBI NO: 28565597 NR Description: putative 3-ketoacyl-CoA reductase 1 [Brassica
  misc_feature (34)..(318): Homolog of NCBI NO: 11072027 NR Description: F12A21.14 [Arabidopsis thaliana]
  misc_feature (1)..(318): Homolog of NCBI NO: 28565601 NR Description: putative 3-ketoacyl-CoA reductase 2 [Brassica
  misc_feature (70)..(318): Homolog of NCBI NO: 2586125 NR Description: b-keto acyl reductase [Arabidopsis thaliana]
  misc_feature (109)..(318): Homolog of NCBI NO: 13605726 NR Description: At1g67730/F12A21_31 [Arabidopsis thaliana]
  misc_feature (109)..(318): Homolog of NCBI NO: 23505781 NR Description: At1g67730/F12A21_31 [Arabidopsis thaliana]
  misc_feature (6)..(317): Homolog of NCBI NO: 7489413 NR Description: probable b-keto acyl reductase (EC 1.1.-.-) -
  misc_feature (6)..(317): Homolog of NCBI NO: 7489808 NR Description: probable beta-keto acyl reductase - maize
  misc_feature (9)..(317): Homolog of NCBI NO: 38345332 NR Description: OSJNBa0081L15.5 [Oryza sativa (japonica
MEICTYFKSQPTWLLILFVLGSISIFKFIFTLLRSFYIYFLRPSKNLRRYGSWAIITGPTDGIGKAFAFQLAQKGLNLILVARNPDKLKDVSDSIRSKYSQTQILTVVMDFSGDIDEGVKRIKESIEGLDVGILINNAGMSYPYAKYFHEVDEELINNLIKINVEGTTKVTQAVLPNMLKRKKGAIINMGSGAAALIPSYPFYSVYAGAKTYVDQFTKCLHVEYKKSGIDVQCQVPLYVATKMTKIRRASFLVASPEGYAKAALRFVGYEAQCTPYWPHALMGAVVSALPESVFESFNIKRCLQIRKKGLQKDSMKKE

SEQ ID NO: 105649 - protein, 210 aa, Arabidopsis thaliana; identical to SEQ ID NO: 76409
  peptide (1)..(210): Ceres Seq. ID no. 13617682
  misc_feature (1)..(210): Homolog of NCBI NO: 18408847 NR Description: short chain dehydrogenase/reductase family (b-keto acyl reductase, putative) [Arabidopsis thaliana]
  misc_feature (1)..(210): Homolog of NCBI NO: 28565597 NR Description: putative 3-ketoacyl-CoA reductase 1 [Brassica
  misc_feature (1)..(210): Homolog of NCBI NO: 11072027 NR Description: F12A21.14 [Arabidopsis thaliana]
  misc_feature (1)..(210): Homolog of NCBI NO: 28565601 NR Description: putative 3-ketoacyl-CoA reductase 2 [Brassica
  misc_feature (1)..(210): Homolog of NCBI NO: 2586125 NR Description: b-keto acyl reductase [Arabidopsis thaliana]
  misc_feature (1)..(210): Homolog of NCBI NO: 13605726 NR Description: At1g67730/F12A21_31 [Arabidopsis thaliana]
  misc_feature (1)..(210): Homolog of NCBI NO: 23505781 NR Description: At1g67730/F12A21_31 [Arabidopsis thaliana]
  misc_feature (1)..(209): Homolog of NCBI NO: 7489413 NR Description: probable b-keto acyl reductase (EC 1.1.-.-) -
  misc_feature (1)..(209): Homolog of NCBI NO: 7489808 NR Description: probable beta-keto acyl reductase - maize
  misc_feature (1)..(209): Homolog of NCBI NO: 38345332 NR Description: OSJNBa0081L15.5 [Oryza sativa (japonica

SEQ ID NO: 105650 - protein, 179 aa, Arabidopsis thaliana; identical to SEQ ID NO: 76410
  peptide (1)..(179): Ceres Seq. ID no. 13617683
  misc_feature (1)..(179): Homolog of NCBI NO: 18408847 NR Description: short chain dehydrogenase/reductase family (b-keto acyl reductase, putative) [Arabidopsis thaliana]
  misc_feature (1)..(179): Homolog of NCBI NO: 28565597 NR Description: putative 3-ketoacyl-CoA reductase 1 [Brassica
  misc_feature (1)..(179): Homolog of NCBI NO: 11072027 NR Description: F12A21.14 [Arabidopsis thaliana]
  misc_feature (1)..(179): Homolog of NCBI NO: 28565601 NR Description: putative 3-ketoacyl-CoA reductase 2 [Brassica
  misc_feature (1)..(179): Homolog of NCBI NO: 2586125 NR Description: b-keto acyl reductase [Arabidopsis thaliana]
  misc_feature (1)..(179): Homolog of NCBI NO: 13605726 NR Description: At1g67730/F12A21_31 [Arabidopsis thaliana]
  misc_feature (1)..(179): Homolog of NCBI NO: 23505781 NR Description: At1g67730/F12A21_31 [Arabidopsis thaliana]
  misc_feature (1)..(178): Homolog of NCBI NO: 7489413 NR Description: probable b-keto acyl reductase (EC 1.1.-.-) -
  misc_feature (1)..(178): Homolog of NCBI NO: 7489808 NR Description: probable beta-keto acyl reductase - maize
  misc_feature (1)..(178): Homolog of NCBI NO: 38345332 NR Description: OSJNBa0081L15.5 [Oryza sativa (japonica

SEQ ID NO: 105651 - DNA, 1151 bp, Arabidopsis thaliana
  misc_feature (1)..(1151): Ceres Seq. ID no. 13617694
  misc_feature: MA Experiment ID: 108434 Result: Up-regulated in Transcription
  misc_feature: MA Experiment 108434 PARAMETER Experiment Name: At_Root_Tips_cDNA_P Parameter: Tissue Value: Root Tips
  misc_feature: MA Experiment ID: 108462 Result: Down-regulated in Transcription
  misc_feature: MA Experiment 108462 PARAMETER Experiment Name: At_Germinating_Seeds_cDNA_P Parameter: Age (day) Value: 2 vs. 0
  misc_feature: MA Experiment 108462 PARAMETER Experiment Name: At_Germinating_Seeds_cDNA_P Parameter: Tissue Value: Germinating Seeds
  misc_feature: MA Experiment ID: 20000112 Result: Up-regulated in Transcription
  misc_feature: MA Experiment 20000112 PARAMETER Experiment Name: At_42deg_Heat_cDNA_P Parameter: Temperature (deg C) Value: 42 vs. 22
  misc_feature: MA Experiment 20000112 PARAMETER Experiment Name: At_42deg_Heat_cDNA_P Parameter: Timepoint (hr) Value: 2
  misc_feature: MA Experiment 20000112 PARAMETER Experiment Name: At_42deg_Heat_cDNA_P Parameter: Tissue Value: Aerial
gagtgagagagagagagagagagaagatgggggttgatttctataaggttcttgaagttgatcgaagtgctaatgacgacgagcttaagaaagcttatcgcaaactcgccatgaaatggcatcctgataagaaccctaacaacaaaaaagaagccgaagctaaattcaagcagatctctgaagcttacgatgttttgagtgatcctcagaaacgagcaatctacgagcaatacggagaagaaggtttaaaccaagccccacctcccggcgccggtggtggctatcctggaggatcagacgccggagcttctttccggttcaatcccagaagcgctgatgatatcttctccgagttctttggtttcacgaggccttcttttggtacgggaagcgactcacgcgcaggaccttctggctttaggtatggcgatgatatcttcgcttccttcagggctgctactaccggaggagaagcctccattccttctaggaaatctgctcctattgagagacaattgccttgtagcttggaggatttgtataaaggtgtctccaagaagatgaagatctctcgtgatgttcttgactcttccgggaggccaacaccggttgaggagatcttgacgatagaaattaaacccggttggaaaaaaggaacaaagataaccttcctggaaaaaggtaatgagcatcgtggagtcataccatccgatctcgttttcatcgtagacgagaaaccgcatcccgttttcaaacgagacgggaatgatcttgtggtaatgcaaaagatttctctagtggatgctctcacaggttacaccgcacaggtcactactcttgacggaagaaccttaacagttccggtaaacaatgtgatcagtccgtcgtacgaagaggtggtgaaaggagaaggcatgccgatccctaaagatccgtcaagaaaaggaaacttgagaatcagattcatcatcaagttcccttcgaagctaaccactgagcagaaatcagggatcaagcggatgttatcaccttgaatgtccaaagattgaagcatctcgtttcagttttttcaatctgctagcttttttggaatcttttagaagcagaatatgtgcttatggtttttttaatttattttggttgcattttgg

SEQ ID NO: 105652 - protein, 343 aa, Arabidopsis thaliana; identical to SEQ ID NO: 40486
  peptide (1)..(343): Ceres Seq. ID no. 13617695
  misc_feature (219)..(341): Pfam Name: DnaJ C terminal region Pfam Description: DnaJ C terminal region
  misc_feature (9)..(343): Homolog of NCBI NO: 15240968 NR Description: DnaJ protein family [Arabidopsis thaliana]
  misc_feature (9)..(342): Homolog of NCBI NO: 15231987 NR Description: DnaJ protein family [Arabidopsis thaliana]
  misc_feature (9)..(342): Homolog of NCBI NO: 21618097 NR Description: putative heat shock protein [Arabidopsis thaliana]
  misc_feature (9)..(341): Homolog of NCBI NO: 15235310 NR Description: heat shock protein, putative [Arabidopsis
  misc_feature (9)..(341): Homolog of NCBI NO: 6179940 NR Description: DnaJ-like protein [Nicotiana tabacum]
  misc_feature (9)..(341): Homolog of NCBI NO: 15225377 NR Description: heat shock protein, putative [Arabidopsis
  misc_feature (9)..(341): Homolog of NCBI NO: 11863723 NR Description: DnaJ like protein [Lycopersicon esculentum]
  misc_feature (9)..(341): Homolog of NCBI NO: 34904486 NR Description: putative heat shock protein 40 [Oryza sativa
  misc_feature (9)..(341): Homolog of NCBI NO: 15218515 NR Description: heat shock protein, putative [Arabidopsis
  misc_feature (9)..(341): Homolog of NCBI NO: 21593202 NR Description: putative heat-shock protein [Arabidopsis thaliana]

SEQ ID NO: 105653 - protein, 335 aa, Arabidopsis thaliana; identical to SEQ ID NO: 40487
  peptide (1)..(335): Ceres Seq. ID no. 13617696
  misc_feature (211)..(333): Pfam Name: DnaJ C terminal region Pfam Description: DnaJ C terminal region
  misc_feature (1)..(335): Homolog of NCBI NO: 15240968 NR Description: DnaJ protein family [Arabidopsis thaliana]
  misc_feature (1)..(334): Homolog of NCBI NO: 15231987 NR Description: DnaJ protein family [Arabidopsis thaliana]
  misc_feature (1)..(334): Homolog of NCBI NO: 21618097 NR Description: putative heat shock protein [Arabidopsis thaliana]
  misc_feature (1)..(333): Homolog of NCBI NO: 15235310 NR Description: heat shock protein, putative [Arabidopsis
  misc_feature (1)..(333): Homolog of NCBI NO: 6179940 NR Description: DnaJ-like protein [Nicotiana tabacum]
  misc_feature (1)..(333): Homolog of NCBI NO: 15225377 NR Description: heat shock protein, putative [Arabidopsis
  misc_feature (1)..(333): Homolog of NCBI NO: 11863723 NR Description: DnaJ like protein [Lycopersicon esculentum]
  misc_feature (1)..(333): Homolog of NCBI NO: 34904486 NR Description: putative heat shock protein 40 [Oryza sativa
  misc_feature (1)..(333): Homolog of NCBI NO: 15218515 NR Description: heat shock protein, putative [Arabidopsis
  misc_feature (1)..(333): Homolog of NCBI NO: 21593202 NR Description: putative heat-shock protein [Arabidopsis thaliana]

SEQ ID NO: 105654 - protein, 307 aa, Arabidopsis thaliana; identical to SEQ ID NO: 40488
  peptide (1)..(307): Ceres Seq. ID no. 13617697
  misc_feature (183)..(305): Pfam Name: DnaJ C terminal region Pfam Description: DnaJ C terminal region
  misc_feature (1)..(307): Homolog of NCBI NO: 15240968 NR Description: DnaJ protein family [Arabidopsis thaliana]
  misc_feature (1)..(306): Homolog of NCBI NO: 15231987 NR Description: DnaJ protein family [Arabidopsis thaliana]
  misc_feature (1)..(306): Homolog of NCBI NO: 21618097 NR Description: putative heat shock protein [Arabidopsis thaliana]
  misc_feature (1)..(305): Homolog of NCBI NO: 15235310 NR Description: heat shock protein, putative [Arabidopsis
  misc_feature (1)..(305): Homolog of NCBI NO: 6179940 NR Description: DnaJ-like protein [Nicotiana tabacum]
  misc_feature (1)..(305): Homolog of NCBI NO: 15225377 NR Description: heat shock protein, putative [Arabidopsis
  misc_feature (1)..(305): Homolog of NCBI NO: 11863723 NR Description: DnaJ like protein [Lycopersicon esculentum]
  misc_feature (1)..(305): Homolog of NCBI NO: 34904486 NR Description: putative heat shock protein 40 [Oryza sativa
  misc_feature (1)..(305): Homolog of NCBI NO: 15218515 NR Description: heat shock protein, putative [Arabidopsis
  misc_feature (1)..(305): Homolog of NCBI NO: 21593202 NR Description: putative heat-shock protein [Arabidopsis thaliana]
